United States Patent Application Publication US 2007/0054278 A1 - sequence listing, part 107

SEQ ID NO: 97991 - DNA, 46588 bp, Homo sapiens
  misc_feature (1)...(46588): n = A,T,C or G
gtatcctgggttcaagccattctcctgcctcagcctcccaagtagctgggactacaggtgcccaccaccacgcctcctctgctctaaatgctcccatggctgccctctcccgtagagaaaaagccccagtcctcgccaagactgcagtccaggcccgacctgccctggccccctgttttttctctcatctccaggcagccactcaggtctccttcagatcttgactctaacagagtgatgtcttctccagcaactctatgggatgctgcaacccacccaatggcctcttctgttttatctgctcactatagccacataaatttctatatgtttattctttgcctgtctcctcctatacagcaggtaaactcagggattttctaaaaatctccctttctgctatgtctccagtgcctagaatagtgcctggcatgtaataagggctactcctaaaaaggggtctgagagaaatgtcagccagcctggagctgagcagacaagactgggctgaaaatacacatttgggggtcgctggagattataaagagattataatcgaagtcatgggaagggatggaactactcctgttttttttgccaaattctccatgttactatttgagggcgagagaaatcccgggtattccatatacactgttaaaactaggctgtcactaagcccctctcctttggatcatctggaatggnnnnnnnnnnnnnnnnnnnnnnnnnnnnnnnnnnnnnnnnnnnnnnnnnnnnnnnnnnnnnnnnnnnnnnnnnnnnnnnnnnnnnnnnnnnnnnnnnnnnnnnnnnnnnnnnnnnnnnnnnnnnnnnnnnnnnnnnnnnnnnnnnnnnnnnnnnnnnnnnnnnnnnnnnnnnnnnnnnnnnnnnnnnnnnnnnnnnnnnnnnnnnnnnnnnnnnnnnnnnnnnnnnnnnnnnnnnnnnnnnnnnnnnnnnnnnnnnnnnnnnnnnnnnnnnnnnnnnnnnnnnnnnnnnnntccgaaacccagcccacgtgggttcccagtaccaccaactccggccgtgagacttccgggttgtgttatcgcgagaactgtaactgactttgccgctgaggggcggggttgcaagagaaacccagcgaagaggagaggcggagccgggccgggcagggggcgggactatttagagaagtaggcggggcctgaggtcccagcggaggcccgagtttaagtcctgggctgttctcgcttggggtagtctgggtttaaatatgaattatatctactgatactaatttggcttcttgggagtggaagtgttttgccaccttttaaaatataccccgcccccagtactccaaacttcttccccccaaccctggtttgcgcatctgtattttctgatattcctacaagaaacgtattagtcgtgtacttttaaaaaggcaccaaatatttccatcacagggatagatggaagatctaaaaggaggcctctacgggcgcggtggctcacgcctgtaatcccagcacttttggaggccgaggcgggcggatcacgaggtcaggatttcaagaccagcctggccaagatggtgaaacccccgtctctaccaaaaatacaaaaaaaatttagctaggcctggtggcaggcgtctgtaatcccagctacttgggaggctgaggcagagaattgattgaacccgggaggtggacgttgcagtgagccgagactgcaccactgcacttcagcctgggcaacagagctagactctgtctcaaaaaaaaaaaaataaagttgtctattacataactttaaattcccattaccgcatcacattgtaacacactgggaaacaatgcattattattattattgagacaaggtctggctttgttgcccaggctggagtgtagtggagcaatctcggctcactgcaacctctgcctcccgggtttaaacgattctcctgcctcagccttccgagtagctgggactacaggtgcccgccaccacccccagctagtttttgtattttagtagagacggagtttcaccatgttggccaggctggtctcaaactcctgacctcgtgatctgcctgcctgggcctcccaaagtgctgggattacaggcatgagccaccgcgcccgacttttttttttttttttttaagagatgagatctcgccctgtgggccaggccagagtgcagtggtgcaatcaccactcgctgcagccttgacctgtcctcccacctcagcctcctgagtagttaggactacaggcacacaccaccacgacgggctaatttttctatttttttgtagagatggtgtctccctatgttgcttagactggtctcaaaattctgggctcaagggatccgtttgtctcggcctcccaaagtgccggaattacaggcataagccactgtgaaggccttaatgaatgacgtttaaaaaaatcataattagcgtatcaaatctatggggttttttgtttgtttgcttgtttttgtttttttgagacagaactctccctctgacgcccaggctggagtgtagtggagcagtctcggctcactgcaacctccacctctcgggttcaagcgattctcctgtctcagccttccaagtagctgggattacaggcacccaccaagatgcccatctaatttttgtatttttagtagagatggggtctcaccatgttggccaggatggtctcaaactcctgacatcaagtgatcggcccaccttggcctctcaaaatgatgagattacgggcctgagccactgcacccaggctcaaatctgtgtttttatggattttgttgctcaggatgatagtgatctaaagtttcttctttaaatatgtttatttaaataaattaaaagtttaagaaacgtttaaaaaatgttaagtaggtagtagtacacttgcctatatttccttctaaaatataatatatcagtgaattaccttccagaaggtatagaccattctagacagcaagaagaaggcagatacataacagcatggatggatctcacaaatataaagttgaacaaaagctgggcgtggtggctcacgcctgtaattccagcactttgggaggccaaggcaggcggatcacctgaggtcaggagtttgagaccagcctggccaacatggcgaaacctgtctccactaaaaatacaaacattagccgggtgtggtggcgcgtgcctatagtcccagctacacggaaggctgaggcaggagaatcgcttgaaccccggaggcggaggttgcagtgagccgagatcatgccactgcactccagcctgggcaacagagcaagactccgtctcaaaaaataaaaaataaataaaaaaaaaagttgaacaaaagaagccaacccccagagtactgtgtggttcatttacataaacttcaaacacaggcaaatgaatcccctaaattttaagaggaacatagtgaatgggaggggacaaagggaggcttcgtgggggaactggtaatgtttcgtttcttgatttgggtgctggttaccttgggtattcagtttgtgaaaattcataaaaatttatatgattgtgtatttttctgtatgttataccttaattaaaaagtttattattattattattattatcattttttatagagataggtttcactatgttggccaggctggcctcgaactcctgtgttcaagcaatcctcctgccttggcctcccaaaacaagcttgtgccactacacctggcgtaaaaaaaggtttttgttttgttttgttttgtttttgggacggagtttcactcttgttgcccaggctggagtgcagtggcttagtctcggctcactgcaacctccgcctcccaggtttaggcggttgtcctgcctcagcctcccgagtagctgggatcacaagcaggcaccaccataactggctcattttggatttttttttttttttttttttttttttgagacggagtctcgctctgtcgcccaggctggagtgcagtggcacgatctcggctcactgcaacttccgcctcccgggttcacgccattcttctgcctcaggctctgagtagctgggactacggcgcccgccgccacgcccggctattgtatttttagtagagacggggtttcactgtgttagccaggatggtctcgatctcctgacctcgtgatccgcccgcctcggcctcccaaattgctgaccttgtgatccgcccgcctcggcctcccaaagtgctgggattacaggcgtgagccacggcgcctggcctcattttgtatttttagtagagacggagggatttctccatgttggtcaagctggtctcgaactcccgacctcaggtcacccgcctcagcctcccaaagtgctggaatcacaggcgttaaccaccgcacccgacctacaaaaaagtttttaaaaagataaacaatacaggaaaaaatgtgcaaaggatatgaataggtaattcacagagaagtaattcaaatggccaataaatctatgaaaatcttactaggaatccagaaaatgtaaattcaaaaataagagcattttgtattctttggattggcaaaaattgagttttattttcttggttgtctaaaaaaaatgttggttagacttgatttgtttgatttaggatgcaaacagggtccttgcattgcatgggttattatggctcttaagtctttaaaaccaattatcctcctcttcgctcaccttttataccaattatttattgaacaaactgggtcgtttgtttggtagaatgccccacatgctggagttggttggttgcttctgctgcttctaagttttccttatctgccatatttcctgtaaactgtaggtttgatctagaggccccatcaggttcatgctcaacttgtcttggcaagaatccatcgcaggtggcgctggtacttcctggcactaagatcgattggcgggaccgggacttcgcggcttagcccctccatnnnnnnnnnnnnnnnnnnnnnnnnnnnnnnnnnnnnnnnnnnnnnnnnnnnnnnnnnnnnnnnnnnnnnnnnnnnnnnnnnnnnnnnnnnnnnnnnnnnnnnnnnnnnnnnnnnnnnnnnnnnnnnnnnnnnnnnnnnnnnnnnnnnnnnnnnnnnnnnnnnnnnnnnnnnnnnnnnnnnnnnnnnnnnnnnnnnnnnnnnnnnnnnnnnnnnnnnnnnnnnnnnnnnnnnnnnnnnnnnnnnnnnnnnnnnnnnnnnnnnnnnnnnnnnnnnnnnnnnnnnnnnnnnnnnnnnnnnnnnnnnnnnnnnnnnnnnnnnnnnnnnnnnnnnnnnnnnnnnnnnnnnnnnnnnnnnnnnnnnnnnnnnnnnnnnnnnnnnnnnnnnnnnnnnnnnnnnnnnnnnnnnnnnnnnnnnnnnnnnnnnnnnnnnnnnnnnnnnnnnnnnnnnnnnnnnnnnnnnnnnnnnnnnnnnnnnnnnnnnnnnnnnnnnnnnnnnnnnnnnnnnnnnnnnnnnnnnnnnnnnnnnnnnnnnnnnnnnnnnnnnnnnnnnnnnnnnnnnnnnnnnnnnnnnnnnnnnnnnnnnnnnnnnnnnnnnnnnnnnnnnnnnnnnnnnnnnnnnnnnnnnnnnnnnnnnnnnnnnnnnnnnnnnnnnnnnnnnnnnnnnnnnnnnnnnnnnnnnnnnnnnnnnnnnnnnnnnnnnnnnnnnnnnnnnnnnnnnnnnnnnnnnnnnnnnnnnnnnnnnnnnnnnnnnnnnnnnnnnnnnnnnnnnnnnnnnnnnnnnnnnnnnnnnnnnnnnnnnnnnnnnnnnnnnnnnnnnnnnnnnnnnnnnnnnnnnnnnnnnnnnnnnnnnnnnnnnnnnnnnnnnnnnnnnnnnnnnnnnnnnnnnnnnnnnnnnnnnnnnnnnnnnnnnnnnnnnnnnnnnnnnnnnnnnnnnnnnnnnnnnnnnnnnnnnnnnnnnnnnnnnnnnnnnnnnnnnnnnnnnnnnnnnnagagatcgagcgactgcagtagttctcaccgagctcaacagcctgttcggcgaggacaacattcccaccgctcggaaggtgggcgccgggcccgcgcccgcggtcaccttgccccggtcgccacgcacctggctaccggggccgacctgggaggagcgcggcctccggggctgcccgcccggcaagcgcgcgggaagagggggtccggcctgcgcctcggggcctgccgcctgcggcccccgccgggcctgaccagtgcgggtctgggcggccgggcctcggggcgccctctcctctgcgccgcgcttctccttggaccttgcctccgcggtcggcgcagccagagtctctcccggctgcgctgacgcctgccgcgcgtctcattcattcattcaccgcgtttgaatggctcctactgtgagccaggcagcacactggcgctctcggtccccacgcggctgcgccctccccagctaccccgggtttgtcctagcctcgcatcccgacccacttcccctgggaccttctgccccactcctcctcctgctttgaagatacttggagttgtttttactttacaggaaaagaagggagcaatgcgatttgctcggtggctttggraaaccgagcacctactgtgtgcggggcctttcgcgtggagccttttgtttagtttggggaggtcccggatcctgcagcctcctgggaagggtgttgagtcccaggaggatcgcagggggttttccccaattcctgctctctggagctaggtgcgataggggtgccattccgggccgaagtccgccgactagctcttgagaaggaggaagttactggggacagttgtgtgtggtattgcggttcctttgctgttccctggggaggagggggctcttgcttgctgccagccttcctggggttttggagtcagagaagtttgggttcaagttggagctctaccagttggatgactttggggaagtgacttcacttctttgagcttgtttctttatttgttaaatggggatagtaatcattccccttcattgcgaggttgtaattatgactagttggtaccttcctggcccagaatcatggctaaaaagttaaagttttctgctcattgagagggagtggggaatagaagggaatatgaaggccgaaatcagattgactgcatgttcttactggataacatgaaaggttaatttgttaggaaaacagtaagttttgacctccctctcctgtgggcaggggcacctcttgcacaggtgggtctgtgtcttcatacatgtaggggagagaacgctttgtaggtggccaaagaggggcaaggaagcagggctgaacgcctgaatgtgaaaaggttgccctggagtctggcgcgggaaaggatcaggggtgtgagtgcagggagtctcacttacttcctcttgatgccgtttcggagctatttgaaggcagaaatcatttgttttagagcaaaaataagcctgtctttttcacscagggtgaccacaggatccccatgtctcaactgacggtggttccatgtgacaatctaaggccaacaaacatgaaatacgagtggttatttaagacttttacttaaataagacaatctgtattctggcagagcatctccgaatctgggggtcagagctcttcctgggctaaaccggggtttgtgcctttaatagagatactaatgattactaagtgcttttgtagatagaataatcttatgtaatccttagaatgaccctgtgcagtaggtactgttactgttcccatttgacagatgaggaaactgagacacagagcagtgaagtggctggtttcaggtcagatgagtggcagagccaggatgtgaacctaggcagagtggacatggagcccacattagtatctctcgcctgttttcctgcttcatgaccccttccctgttccccgagtcagtacagcatccagaggctgacctgacttctttcctttttgtttttttgagacggaggtctggctctgttgctcaggctggagtgcagtggagtgatctcgtctcactacaacctccacctcccaggttcaagcgatcttccccactcaccctcccaagtagttgggattacaggtgtccaccagcatgcctggctaagttttgtatttttagtagaaaagaggtttcaccatgttgaccagtctggtctcaaactcctgacctcaagtgatcctcccgcctcggccttccaaagtgctgggattacaggtgtgagccattgcacctggcctgacttattttatttcctgctgagtgtagcccacactggccaggcttggggatattgttttgttaattttatggggttttttttaaatttaattaattaatttattttttgagacagactcttactctgtcacccaggctggagtgcgttggcacgatcttggctcacggcaacgtctgcctcctgggcaagcaattctcctgcctcagcctcctgagtagccgggattacaagtgagtagccgggattacaagtgagcaccaccacatccggctaattttttatgtttttggtagagatgaggtttcatcatgttggccaggctggtctcaaactcctgacctcaagtgatctgccgacctcagccttccaaaagtgctgggattacaggcgtaagccaccgtgcccagcctgttttgtgaattttaaataaaggaaaactgggtctgccagcaactgtagttttcagcatgcctgggtttacgaattagagccaaacctgctttgtgaagtttaatggtatttaaaaaaacaccccatagtcttttttttttttttttttccgagatggagtattgctttgtcgcccaggctggaatgcagtggttcagtcttggctcatggcaacctctgccgcccaggttcaaacaattctcctgcctcagccccctgagtagctgggattacaggcgtgtgtgccaccatgcctggctaatttttgtatttttagtagagatggggtttcaccatgttggccaggctggtttcgaactcctgacctcgtaatccgccctcctcagcctcccaaagtgctatgattagaggcttgagccaccgtgcccggcctcccatattctaatctaggacttgtctgaaatacacctatgaccatcctgtttggagcatgggaacagacatgagtttgaatcctagctgtttctcactcgctctgtgaccctgagccagttgctttacttctcttttttttttgctttacttctctttttttttttttttttttgagatgcagtctcgcttcttctcccaggctggagtgcaatggcgagctctcggcttactgcaacctccgcctcccggattcacgaaattctcctgcttcagcctccctagtagctggggttacaggcagatgccaccacgaccagctaatttttgtatttttagtagagacagggtttcactgtgttggccaggctggtctcgatctcatgacttcaggtgatctgcctgcctcggcctcccaaagtgccggatttacagacgtgaaccaccgtgcaccacccagttgctttacttatctgtgtcccatttgttcagaggagataaattggggaattaaaggagattggttgggctgcacaatgccagggactgaataagcatttagtaaatggtagaatatttctatatgaagggaatttgtctggtaggaggtaatagacttgttaattcctttaaaaattattaagtgatgccctggcatggtggctcacacctgtaatcccagcacttagggaggccaaggtgggcagctcatctgaagtcaggagctcgagaccagcctggtcaacatggcgaaaccctgtctctactaaaaatacaaaaattaggccaggtgtggtggctcacgcctgtaatcctagcactttgggaggccaaggtggatggatcacctgaggtcaggagttcaagaccagcctgaccaacatggtgaaacccygtctctaccaaatacaaaaaattagccaggcgtggtgatgcatgcctgtaatcccagctacttgggagcctgaggcaggagaatcgcttgaacccgggaggcggccgttgcagtgagccaagattgcaccgttgcgcgcgccagcctgggcaacgagtgaaactccgtctcaaaaaaaaaaaaaaaaattagctgggcgtggtggtgcacgactgtaatcccagctacttgggaggctgaggcaggagaatagattgagcccgggaggctgacgttgcggtgaggttgagtcgccccactgcactcaagccggggggacagagactccgtctcaaaaaaaattattaagcaacttatacacatgtgttcatagcaacactttttacaatagctaaaaagtggaaatatcccaaatgtcttatcagctgatgaagggataaaatgtgatgtgtctgtataatgaaatatgattcagccataaaaaggaatgaagtattgctatatgctacaacttggacgaaccttgaataaatgagagaagccagtcacgaaagggcacacattatatgattccatttacagcatatgaaatatctggaataggaagatccgtagagacagaaagcagatgggtggttgccaggggctgggggagggagcaatgggcgaattactgcttaattgatctagggtttccttttggggtgatgacagattgtggaactagataataatggttgcatgatattgtgaacgtactcatgccactgaattgtacacttyaaaatggttaaaatggccaactttatgtgtatatgactacagttttttaaaaaaattggcctggtgcagtggctcacatctgtaatcccaccactttgggaggcctaggtgggaggattgcttgagcccaggagtttgagaccagcctgggcaacatagtgagaccccatctctacgaaaaaccaaaacctttggctaggcatggtggcrcacacctgtggtccyagctacttgggaggttgcatagggaggatcgcttgatcctgggaggttgagactacagtgagctgtgatcacaccactgtactccagcctcagggacagcacaaaactctttgtctccaaaaaaaacaaacaaatgaaaaatttcaagcacctactgtatgtggagaaaatgattcctctcaggcagaatatagctggactgatgtggtggaaacatcctgaatgccaggtcgagaaactagtacttttttcccttgctccttggtcgtagttgcatggaatacaatttcatgtagttctgaaggttaagaaactaactccacttcccactaccgacccgtctaccacccccttccccgaagcagccagatattctgaacatgtataaatatatggatctatagatctgctccctrttgttggtttttgtttattttgcactatgcgcactgttttgtatttttattttatttttccctgaaacagagtctccctctgtcgcccaggctggagtgcagtagctcaatcttggctcactgcagtctctacctcccgggctcaaatgatcctcctgcatcagcctctcaagtagctgggattacaggtctgcaccgccatgccctgctaagttttttattttttatttttatttatttatttatttatttttcttgagacggagtctccctctgtcgcccaggctggagtgcagtggcgcaatttcggctcactgcaagctccacctcctgggttcatgccattcttctgcttcagcctcccaagtagctgggactacaggcgcctgccaccacgcccggctaatttttttttgtatttttagtagagacggggtttcactgtgttcgccaggatggtttcgatttcctgacctcgtgatccgcccgcctcggcctcccaaagtgctgggattacaggtgtgagccaccgcgcccggccttaagttttttattttttgtagaggtgcggtttcactctattgcccaggctggtctctaactcctggcctccagtgatctacctgcctcagcctcccaaagtgctggcattacgggcgtgagccactgcgccggcccctgtttttaaaaatgaataaattttgggctgggtgcggtgcctcatgcctgtaatcccagcactttgggagnnnnnnnnnnnnnnnnnnnnnnnnnnnnnnnnnnnnnnnnnnnnnnnnnnnnnnnnnnnnnnnnnnnnnnnnnnnnnnnnnnnnnnnnnnnnnnnnnnnnnnnnnnnnnnnnnnnnnnnntggcattccagcctgggcaacagagcaagactctgtctcaaaaaaaaagaataaattttggagggctgggtatagtggctcacgcctataatcccagcactttgggaggctgaggcaggtagatcacctgaggtcaagagttcgagaccagcctggccaacrtggtgaaaccctgtctctactaaaaatacaaaaattagccaggcctggtggcmtgtgcctgtagtcccacctactcggaaggctgacacaggagaatcgcttgaaccccggaggtggaggttatagtgagtagagatcacgccactgcactccagcctgggcaacagagtgagactgtctcaaaaaaaggaagatcagaacttatcagtacataaactttgcttcctccttgtgaagggctgcaaagagctcattgctgtaaggatgtgccagcgttaaacctgcccctggtagctaacatttgatcctgtctcgggccactctaaacatggctgcagtgtaggtctttctgtatgtattgttttgtgtgcacctagacaagttcatctgtaaattgttagaaatggaattgctgagtcaaagggtctgtgcatttaaaaagaagtttttttttttttgagatggartctcgctgtgtcaccaaggctggagtgcagtggcgcgatctyggctcactgcaagctctgcctcccgggttcacgccattctcctgcctcagcctcccaagtagctgggactacaggcacccgccaccacgccctgctaattttttgtatttttagtagagacggggtttcaccgygttagccaggatggtctcgatctcctgatcgcgtgatccgcccgccttggcctcccaaagtgctgggattacagacgtgagccaccgcgcccggccttttttttttttttttttttaagagataggttcgtgctctgtcacccaggctgaaatgcagtggtgaaatcatagctcactgaagccttggactcctcgcttcaagtagtcctaacctcagcctcccaaagtgctgggattacaggggtgagccagcactccctgctcttttacttttttttttttttttttttttgggagacggagtttcattcttcttgcccaggctggagtgcaatggcatgatcttggctcactgcaacctctgactcctgggttcaagtgattctccttcctcagcctcctgagtagctgggattacaggcgcatgcctccacacccagctacttttgtatttttagtagagacagggtttctccatgttggtcaggctggtctcaaactcccggcctcaggtgatccacctgccttggcctcccaaagtgccgggattacaggcgtgagacactgcgcttggcctcttttacatttttcatcgaaatgtcattggtatacgttttttgcttacatcaatctatagcatcatgaattgtcacacacagaacacactccttgaccagcagatctaaaaatggattgttccagcctccagaagtccctttctgctcccacatggttactaaccccctaaggtcgctactgtgtgtgctacccatgtgaattaactctgtttgcttgagcccttgcatagtaagggctctayatgcattgttcatattgcaaagatactactaaatggtccttcaaagggtgatagcagtttctactctcaccagacacgtgtgaaggctagttcccaagccctttccaacgaagtggctcsttaattttttttttttttttttttttgagaccgagtcttgctctgtcgcccaggctggagtgcagtggcgcgatctcggctcactgcaacctccgcctcccgtgttgaagtgattctcctgcctcatcctcccaagtagctgggattacagacatgtgccaccacgcccggctaatttttgtatttttaggagagtttttcaccatgttggccaggctggtctggaacttgcgacytcgtgattckcccaactcagcctcccaaagtgctgggattacaggtgtgagacacccgacccggcctcattaaactttttggctttattatgtatgagacagatggtcttttcatttattcagaatccatcgatatgttctgggaactgccttttggtttttctttttttttttttttttgccgttctattgagctgttgggttcttttgtttttgctttttttttttttttgtaaagaggtttgcattttttgctgtttgcaagaaagtattttgagcaaaataactttgacactttccagtcctttttcccctaccaacattttaacagcttttttgaggtgtaattgcactacacctcaatagactgtgcgtatttaaagtgtacaggttgacaccttttgacatacacacttgtgaaaaattaccacagttaagataaagtttcatrtgattttttttttttttttttttttgagagggagtctcgctctgccacccaggctggagtgcagtggcgcaatctcggctcactgcaagctctgcctcccgggttcacacctttcccctgcctcagcctcccgagtagctgggactacagacgcccaccaccacgcccggctaattttttgtatttttagtagagacggggtttcaccatgttagccaggatggtctcgatctcctgacctcatgatygcctgcctcggcctcccaaagtgctgggattacaggcgtgagccamyacgcccagcctgtttcctataattttttatgttgataatttttcaaagtactaaaatgctgaaagaacagaacaaggaatagctgcaaacatctcccctaaagtcaccagttcttacatttcccctcaaacttttttctctgcaaacacatccgatagacacatacacacatgcacacacatttatttttattttttggcaggatcatttgaaagttagttgcagacgtcttaatactttttcctacagaaccacaataccattgtctcagccaagaaacttaaatatagtacagtattttgtaacagatagtccatattcaaattgtctttatagctcataaaaaatccaacacccagtcaaggactgctcatgcatttrgtgttcatgtctctagtctgtcagagtttcctcacttttggtggaggaagggacttaattatgaatttwtttttatttttatttttttttgagayggagtcttgctctgtcacccaggctggagtgcagtggcgcgatctcggcccactgcaagctccacctcctgtgttcacgccattctcctgcctcagcctcccaaatagctgggaccaagggtgcccgccatcacgcccggctaattttttttgtatttttagtagagatggggtttcaccgtgttagccaggatrgtctggatctcctgacctcgtgatcygcccggctcggcctcccaaagtgctgggattacaggcatgagccaccgcacccrgccccaattatgcatttttttcttttagacaagctctcactctgtagcccagaatggagtgcagtggcgcagtctcggctcrgtgcaacctctgcctcctgggttcaagcgatcctcccaccttaacctcctgagtagctgggmttacaagcatgtgccaccatgcctatttatttatttattgtatttttcgtagagacaggatttctcctcgaaatccctgtgttgcccaggctggtctcttgactcctgggctcatgcgatcctcccgccttggcctcccaaagtgctgggattataggcgtgagccactkcgcctggcccagtaagggacttttacagcattgacatttctgaagakyacagactaaatgtcttttttttttttgagctataattcatataccatacagtttattcattgaaagctcagcggtttgtagtatattcacagtgctgtacagctgtcactacagtcagttttagaacatttgcattaccccaaaaagaaactctgtacccattagcagtcactacttttttcctttgccccaactcccagccttaagcaactgccaatctgctttctgtctctatttctgagcctactgtgggcttttcataggagtggagtcctgtacagtctggccttttgtgtctggcttctttcacttagcctcatgttttcaaggttcatccatactgcaggatcaatactttattcctctttatggctttttatttacctgatcatcaactgatgcacatttcggtttatgtcactttttgtctattgtgaatggatgctgctgtgaatatccatgtgcaaatatttgtgtgggcattgtttccagtattttgcggtgcatacctaggagtccagttgctgggtcatacaggaactttttgtttaacactttggggaaccgtcacccttttccaaggcagatgtaccgttttacctgcctaccagcatgtggggcctggtttccccacatccttgtcagcacttgctatggtctacctttttaattctagccatcttggcagacgtgaagtagtattgctgtggttttgacagtccagaactggtttttttttttgttttgttttttttttttttgagacagagtctcgctctgttgccaggctggagtgcagtggcacaatctctgctcactgcaacctccgcctccggggttcacgccattctcctgcctcagcctcccgagtagctgggactacaggcacccgccaccacgcccagctaattttttgtatttttagtacagacagagtttcactgtgttagccaggatggtctcgatctcctgacctcgtgatccgctcaccttggcctcccaaagtgctgggattacaggcgtgagccaccacacctggcccagaactgtcttttgaaatgtcccacagtgtgtattgtattattctgattatctcctccgggttaggctcagacttagctttcatggcaagaattctgcagaaggcatcatgtgtccttgctgaggcagtaccatatcggggctcgtggtgtctgtttgtgccatcgcattctcgttggttgacgctgaatttgatctctgggttgaggctgggcaggcccactgcgctgggggtgccctttcccctctgtggttcatacgtggtctgtatgttatgttccagcattttccgttcatctggcttttgcatttctgtgtgttcttcagatgcttgggaaacctctgaatggcagaatctcccgtcccctctccctggcttgcttatcaagatgcctttgccctcatggcctgattttccataggacccgtttgcatgtgcctgagggtgatggaggtaaagcgagattaggatgcaggaaggccattgtcacccaacccsggtgttggatgtccccrggtgttggatgtcccccgcctgactgctgcaagaagagcgctgatgaaatcccaggcttgaagcaatcttgttccctcccayggaggcgatggctgggccttgtttgtctgagtcctcaggcatccacagtttgctcacctggtccccttatttcaactttccattctgaaaattgtccaacataaccaaaggtagggagagtagagtgaacccttgttcacccaggtcttcccatgtagcaactttctgccattctggttacttctttccttcctaaatttttttgagggtgcctggaataatattttaaagctaatccaatacattagttcacctttgcatatttcagttagcatctttaacaataaaaattttgtgaaaatcaaaaccacaataccggccgggcatggtggctcatgcctgtaatcccagcactttgggaggccgaggcgggtgggtcactagaggtcaggagtttgagactagcctggccaacatagtgaaaccccatctctactaaaaatataaaaattagctgggcatggtggcgctcacctataatcccagctactcaggaggctgaggcaggagaattgcttgagcccaggaggcggaggttgcagtgaaccaagattgcaccactgcactccagcttgggcgacagagcgagactccatctcaaacacacacacaacacacacacacacacacacacacacacacaaaacacacaataccatcattacagcttataacaattccttaacatctaatgcaggtccattttctgatttccctggcccaaaatgtctttacaaaactttttgtttgaatttgtatctaaacaaagtctacacatgaagtgtcttttaagtctcttttttaaatttttaaatttttttaaaatttttttgagacaaggtcttgctttgtcacccagactggagtgcagtggcacgaacacagctcacttgcagcctcaacctcccaggttcgatgatcccccagccttctccygagtagctggaaccacaggtacatgccaccatgcccagctaattttttaattttttgtagagacagtgtctsgccatgttgcccaggctagtctctaactcccagactcaaacgatcctctggccttggcctcccaaagtgttgggattacaggcrttagccaccatgcctggccctaagccttttttaaaaaaaaattaactttattctttttataagtagagtttaaaaaatagtcttttcttttagagttatagaaaaattgtgaagataatacagggagtcgccatatacccctcaccctgtttcccccattattaacgttgtatattcatgttctattaatgaaccaatattggtacatcaattattcgctgaagtctgtactttattcagacttctgtagtttttcctgccacccttttctgtcccaggatcccawctgggatcccacccgatatttggtcctcaggtctcccgaggtcctctcggctgggagtttctcaggctctacttgtttttgatgaccttgacagttttcaggagcattgatcaggcctttttcttttcttttcaaatctccctgtgtcacscaggctggagtgaagtggtgtgatctctgctcactgcaacctctgcctcccagattcaagcaattctcctgcctcagcctcctgagtaactgggaccacagttgcatgccatcacacccggctaagttttgtgtttttagtagagtcaagaggtttcaccatgttggccaggctggtcttgaactcctgaactcaagtgatctgcctgccatggcctcccaaaatgctgggattacaggtgtgagccacagcgcccagccggtcagggattttgtaggatgctcccaattggaatttgtctgatgtttttctcataatgagactgggtgatgggttttggggaggaagacacagagttaaggaccattttcatcccatcacatccagggtacagcaaatcatcatgatttaagtcacttttaattttaatgcccccacctcatgctttttcttggatgccatcttattctgtggagaaactgggtctcaccccatagcatctccaccatctgcatctggctgggtgcatcctcatggtggtgtttccctgtgtcccatttcccagatccccaagaaccagtggttagatctagaggcctggccagggatggtggctcatgcctgtaatcccagcactttgggaggccgaggckggcagatcacttgaggtcaggaattcaagaccagtttggccaacatggttgaaaccccatctctactaaaaatacaaaaaattagccagacatggtgccttacgcctgtaatcccagctactcgggaggctgaggcatgagaattgcttgaacccgtggggtggggagcggaggttgcagtgagccgagatcgcgccactgcacttcagcctgggtgacagagcaagactgtttaaaaaaaaaaaaaagatctagaggcccgataagattcaggcttgcattttcaccggatttctgctggaactgcctccaggctttgggcttcgctgtaagctcctgtgtttgtgtgcactgcagcccagtcgcctaaacagcagacatacattttctcccattctggaggctggaaatctgagctcgaggtgccagggttgctttctcctgaggcccctcgtcttggcttgcagatggccgccctctccctgtgtcttcgagtggtctttcctctgtttatctgggtcctgctctcctacttgcataaggacaccagtcgcatcggattagggcccaccgtaaatatctcatttcagcttaatcacctctgtaaagaccctgtctccaaatacagtcccattctgaggtcctagggtttagggcttccacataagccttttgggggacagagttcagcccatattattccccttagggctcctgtgtctccatccacacaaagtgggtcagggtgtcacacaccagagcaggcaggcccagccccacagggaacagcaaattctccagccaaatggttcaacggcaagagatgggatcctccccgaattcaccctctcctgcccggggccagttttcaggaggggacaggtgccgttctttccaccgtgagaaagaacctctgacctacacctttcttagcactgctaggagctcctcaggcacgccagcttctcaggcatggcagttttcagagcacctgcctgtcagcttgtgttacatgggaggtgactgctcagcttgcagggagttccaggttgccaccctgcaacccatgaatctgacaagaaccacctcagctgctcygacacgctgggcacctgccgtgtgctgggcgccacgccgaggtctttacaggttctgctcttgaatcctctcttagtcccatttctcccacagcagagaaaactgaggcacagagaggttcaacagtgtgagcaggaaagtctcttcctcccagaataattgcttccacgcaccctttcctgggcacttggtggcattttaaaggcctgctactcttttctcacaaaaacctttctttttccctccatttgaacaaattatagaaattgctatatattatctgggcgcggtgggtcacgcctgtaatcccagcactttgggaggtcaaggtgggtggatcatctgaggtcaggagtttgagatcagcttggccaacatgacaaaaccctgtctctactaaaaatataaaaattagccaggtatggtggcacatgcctgtaatcccagctacttaggaggctgaggcaggagaattgcttgaatccacaaggcagaggttgcagtgagccgaggtcgcaccactgtactctagcctgggtgacagagtgagactctgtctccgccccccccaaataaattgccatgtattgacaaacatgtacaagtcacacatactttaaataattgtaggttgagcrcggtggatcacacctgtaatcccagtgctttgggaggctgaggcaggcagatcacctgaggttagaagttcgaaaccagcctggccaacataggaaaaccctgtctctactattttacaaaaactagccaggcttggtggcatgtgtctgtaattccagttactcaggaggctaaggcaagagaattgcttggacctgggatggggaggttgcagtgagctgagatggcgctaatgcactgtagcccaggtgacaaagcaagactctgtctcaggaaaaaaaaatgtaacaggaagagctgggcatgtagcagctgcctgtggtcccagctacgtgggaggctgaggtgggaggattgcttgaacccaggagtttgagactgcagtgagccgtaattacccccactgtactccaggctgggcaacagagcaagaccctgtctccaaaaaaaaaaaaagagcgtacattctgtaatctatttatttactcattattattattttctgctatttctcgatgttgctggatatgtccatcgttgtttttgttgctgtggaattggactccattctgtgagcagatcatgtcttactacgcgtctcttccattgtgcacgtatgtctggcctgcctgcagctttttagtgcagtggcgctctgaaggcacatgtgcaactgcctctctcagtcaaggtcctcaacctggagtgtgcctcagcatcaccaggagggctgtggaaacagattgctgggctccatccctggagagtctgaggcagtggatctggatggggccctgagagtctgcatttctggcaagctcctgggtgabgctgctgctgctagtccgggcaccaccacactctgagaaccactgagctgggatgtgtaccgtgacatggaatctctggaagacctcttcatgggtgtggttctgattcatgctggtcttctgcaggccctcctcccagatcccgccgcctacccccacccaagggaggggcagtcaccctcctcttctttcttttttttttttttttttttgatttttttgagacagagtctcgctctgtcgcccaggctggagtgcagtggcgcgatctcggctcactgcaagctccgcctcccgggttcacaccattctccttcttcagcctcctgtgtagctgggactacaggcgcccaccaccacgcatggctaattttttgtatttttagtagagacggggtttcaccgtgttagccaggatggtctagatctcctgaccttgtgatccgcccgcctcggcctcccaagtgctgggattacaggcatgagccaccacgcctggccaccctcctcttctttctaatgcagcggtcctcaacctttttggcagcgggaccagttttgtggaagacagtttttccatggactgggtcgggggatggtttcgggatgattcaggcgcattacgtttattgtgtactttatttctattatcattacattgtaatatagaatgaaataattatacaactcaccataatgtagaatcagtgggagcactgagcttgttttcctgcaactagacagttgcatctgttccttctgggggtgacgcggacagtggcagatcatcaggcattaggrtctcacaaggaacatgtaacctagatccctcgcatgcagttcacaatagggttcacactcctatgaaaawtttttttttttttgagacagagtctcgctctgttgcccaggttggagtgcaatggcgtgatcttgactcagtgtaacctccacctcccaggttcaagcgattctcctgcctcagtctctcccaagtagctggaattacaggcgcacaacactacactcagctaattttttttgtatttttagtagagatggggtttcagcatgttagtcaggctggtctcaaactcctgacctcaggtgatccacctgccttggcctcccaaagtgctgggattacaggtgtgggccaccgcacccagccatcttttttttttttttttttttttttgagatgctgtctccctctatcacccaggctggagtgcagtggcatgatctcggctcattgcaacctctgcctcccaggttcaagcaattctcctgcctcagcctcccaagtagctgggattacaggcgtgcaccaccacgcccagctaatttttgtgttttcagtagagacaaggtttcgccatgttggccaggctggtcttgaactcctggcctcaggtgatctactcgcctcggcttcccaaagtgctgagattacaggcgtgagccaccaggcacagcctataatgttttcttaaggtaaattagagatgggggggggtctcattttgttgcccaggctggtctcgaactcctgggctaaagcagtcctcccacctcagcctcccaaagtgctgggattataggtgtgagccaccgtgcccagcctctatactgttttttagggctaaaatgttggtgtcctcacaggacatcgtggagtcaatacttctgttagaatattggacatcggccgggcatggtggctcatgcttatagtcccagcactttgggacgcctaggcaggcgggtcacttgaggtcagcagttcgagaccagcctggccagcatggtgaaaccccatctctactaaaaatacaaaaattagctgggtatgatggcaggcgcctggaattccagctactcaggaggctgaagcaggagaatctcttgaacccaggaggcgaaggttgccttgagtcgagattgcaccagtgcactccagcctgggtgacagagtgagaccctgtctcaaaaaaaaaaaagaagaagaatattggatgtggatgtcaacaggagtcttgaacacttaccatgtgctcaaagcatttcacgtgaatatcccatgtaaagctcgcaataaccagatgaagtaggtactgttatctccattgttagtggaaaccctgcagccccagagagcttatgaatatatataatatgctcatggacacccagctagtaagaggcagagctgggatttgaacccakgcagtcgacagcctggcttgtgctttctcagccacagtgccacctctgaggttaytggcattttctactctcctggtccctgwttcagccctgctcttatctcctctgtcctgtaggaaccatccagtcaggatatccagtttaaaatgctgtagcyggccaggcatggtggctcatgcstgtaatcccagcactttgggaagctgagatgggtggatcacaaggtgaagagatcgagaccatcctggccaacatggagaaaccccatctctactgaaaatacaaaattagctgggcatggtggcgcatgcctgtagtcgcagctactcgagaggctgaggcaggagaatcacttgaacctgggaggaggaggttgcagtgagccgagatcgtgccacttgcactccagcctggcgacaaagcgagactccaaataaaataaaattaaattaaaacataaaatactgtagctgcccgggtgtggtggctcacgcctrtaatcccagcactttgggaggccggggtgggcagatcacctgaggtcaggagttcaagaccagcctggccaacatggtgaaaccccgtctctactaaaaatatgaaaattacctgagtgtgatggtgcgtgcctgtagtaccagctactcgggaggctgaggtgggaggattgcttgaacttgggaggtggaggctgcagtgagccgagatcataccactgcactccagccggagtgacagagcgagaccctgtcttaaaaaaaaaaaaaaaaaaaaaaagctgtagccaattcacggaggcatttacccttcacacgtgagccgagtggcccatgtaggtgggttctattatggcagcactctgcgtgatgcagccctgcagagtcccagcccccatagataccttggtcagcccttacaagggaaggggcgtgttttactcagttttgctcagttgttgggctgtcatcaattagtatcaagttcaagttaatcccctgggccagtagaccacttggtggcattcatcatgggctcgctgttttttcccctgtaatagccaaggctggaaaccatgtaggtatccatgagtatgggcctggctccaggtgtaccatgtttaaaaaggatgaggcagctctgtgtggtctgagtgtgagtatctccaagacagagtgttgcatgagcaaagcagctcagctgtacacctgtgctgccattgcagaaagaatatgtctgtgccattattcacctggcacgtctaaggaagggttcctccggagggggattccagttgccaggaaatgagagggaaggcttagtctccactgaatacctgttggtaggcttgagttttatgctacatgtatacaatatcactaattttttaaaaaaaaaagttaaaatgaggctgtaccttgtattcatgtttctttagccctgtgtcacctggagggcaaataaagacctcagaggctcagggtccttagagttggatagagcatggggctgtatcattaccagcttccttggagcagaaacttccactctttaaaaatgagaaacccgcagggtgcggtgcagtgtttcacgcctataatcccaggactttgggagggccaggcaggaggactgcttgaggcttagagtttgagaccagcctggacaacatagcaagagyccatctctacaaaataataataaagcctggtgtggtggctgcacctgtagccctagctacttgggaagctaaggcaggattgcttgagcccgggagtttgagggtgcagtgagctatcattgcaccactgcactccagcctggtcaacagtgagaccctgtctctttagagaaatcaggcagaggaaggcagagaycctgacccaagaggaagcatgaaagacagcaggagcaatggcaagcggcgtaacgcggccctgcagagagtcccagcctccataggtgccttgttcagcccttgcaaggaaggggtcgttttcaccagtttttctcagttaggctgtgatcagtacccagttcaagtcaatcccctgggccagtagtcyacatgtgtrgtattcatcatgggctcactatttttcccttcccaggtataaactcccaagctccccagttcactgcttgactgatggaggaaaacagtgattgggtratgaccrttttcttgtttctgcagttcttggccaggctgactgagagatttgtgctgggagtggatatgttcgtggagacactgtggaaagtctggaccgagctcttggatgttcttggacttgacggtaggtgtaggggtggcattcacgtaaggtgtcattctattttggtggttctcatagtgtggaactggtactcacagtgagtaatacatgagaaggttgcggagggctggtcagtgaggatatgagtgaacattttttattttaatagtctcatatataggccaggcatggtggctcatgcctgtaatcccagcactttgggagaccaaggtgggagggttgcttgaacccaagaattcaagaccagcctgggcaacatggtgagatcccatctctataaaaaaaaagtacaaaaaaattgctgggtgcagtgatgtgcacctgtagtccccatccacttgggaggctgaggcaggaggattgcctgagatgaggaattcgaggctgcagtgagctatgatcatgccactgtactccagactggacgacagagcaagactcctctcaaataatcataaaaataaaaaacaaatggcccatcaaagctgagatttcccagatgccacttaggataaggtgcgactgggtagtgggagtgccaatttgtgtgcaaaacacatggaccagaggtatagtgctctggcttactggcatccgtgcaagaaatgactagttatttaggcagaaggggatttcatgagacagagacactcacagaaccatcagaaaggctgaggaagagatgcatggcctcagacactgccgaacwggctgtccagggttgcagctgttgaaaccgttgagttcgaagtcacacaactgtagtataatttgaggaccaggaggccactgctgccgccacaacaactagactttgcatgtgggtgcagggacccttgccatttctggaaccatgcatatcagctgcaacacttcacttaatttccaaagtcgtgtgtgtatgggggaactgccaggtggaacttactttctgtccagtccctagctgcgagggaggcaggctaatgcggttcttagctctccagcttctgccatccaggaaggcagcctgggagcaggtgtcacctgatgctgcaccagcccatccaccatacccaccgcacagggcaagaattgccaggggagctggcccctggttttgtgggctaggggaggagggtagtccagtttgatagtgcagtgctagtcacacgtttataatcaggaagagaacattggtgaggcayggcccctccctttctacatgtgggagggggcactgatactggtcttggcggatggcaaggcagcaacggtcatggtaactgagctgggcactcctagtccagtcctgcagcctgtgctacccccagccttacactccccttcccaggtggctctgccccacctccacctgcattccatcggtgggtgacaggagctaacccgggcagagtgcccagggtgtacagcttttatacccagaggagaccttgtcccttaccgccttaagagcttcagaggcatcccatgctctcaggatgaagtaaccttcccgttttctctaccgtgccccatggtgtgccaggtaaacagggatctcctagctgcccccgctccactgctctccttctgtccacaaggtggaggccgctcttcccctgggcctttccagaggaaattccccagctgggctctttccagccccaccgccctggtccctggtcccagctgccacctgtctcacgggaaggtctgcagttgctgcatgtggcagggttcctaagaccatctacaggctcrccggttccctaggagcactggcaggactcagcatatagttgtcctcacagccgtgatttattgtgacggaaggaygcaaacaycatcagcaaagggaaaaggtgcgcgaattcccgggcaggccaggcycaagcttcagagtyctctccctgtggagtcatacgggacacacttaattcccccagcagagggtgcccaccaaggactccctgcccaggctttttactgggggctggtcatgtagtcaccctctgcttgacacgtgtcaaaattctagactcccagagggaacgcaggtgttgtcataaaccacatcatttgtgtcaacagcctaggcctggcrtctccaggctgcactctggccccagctctgcacctggcacaaagagrccctttttgtttrtttttgtttaggatctcactctgttgcccaggctggagtgcagtggctcaatcacagctcactacagcctcaacttcctgggctcgtgatcctcccacctcagcctcccgagtagctgggaccacaggcccatgcyaccacacctggctaatttttgaattttctgtagagacagggtcttaccatgttgcccaggctggtctcaaactcttgggctcaaaccattctactgtttcagcctcccaaagtgctgagattrtaggcgtgagccaccacacccagcccacccttggttaataagagcaggagggctgtgggtcccactgcttagccagtcatgtgggctgaaatgtgctcytcaagaatatgtgttccagtcctaatcctggacctgtgagtgagcccttgtttgggagtggggtctgcagatgtgataaagttaaatgagatcgtcttggattagggtggaccctcagtgtaatgattgctgtccttataagaagtggggaatttggacacagaaacaccaagaaacatagggagaagacggccatgcgaaatgagaaacagggactggagggacggagccacaagccaaggaacactgggaccaccagaagctggaagaggcgaggaaggatcctcccttgaactttcagagggagtgtggccccaccaagaccttgatttcagacttccagcctccagaaccgcaagtggatgaatttctgttgtaaaccacccagttkgtagtggtttgttgcggcagtcacgggaaaccattataccatagccctgttacatgcggaatctctcagcascgcccatyggtgcttgacacccagagatgggggagtggggtccactggccatgatgggcacactggttcatacctgttgacaccccaggccattcagaaaygtctccagccttaattcattgagttcaacctttaagaggccttaggccaactcagtcacctcactgctcagacaaagaatcagaggcgtcagcatagccagaggacactgtgcacctggcagccccctggggccactcatggcccctccagggacttggcagagttaacgcaccctcccccagatgcagccaccgcgtgcaatcctcttagcttccgtatccaccacctgcccggattgtcaaactctgtgttttcgtcgccacccattgaaccctggagaaacaaacctgattgcagaaaatcgcacgcagcttggaatgaaaaactacagagtaggaacagcctcctaatcatatggaagaagcccagaatagaggcatcggcagcggatccacgagccctgaatgcctgcattcatcaggggagcagctggcgcgttctggaggcgaaacgagcttgcttccgtgtcraagcttttctagttctgtttgatgcgtaagcttcaaggcatccgaaggcctttggaattcgtgtcttatgcgtagaagtttgagtgcaaaatgctttacaggaagccatacaccaacgttggatattctggtaaaaaaggtttctgtgagcacaattctataatttctttcttcagtgtttttttttttttttgagtctggttaaaatgggaactctgtagccccgaatggtctaatagcaaaaaaatgtgagccccctaggtgatgtgaagttttctagtaaccatgtcaaaagagtaaaaagaaatggtgaaattagtttttcttccttttttgggggggagggggtggggagtggggggtaggagggacgaagtctcactctattgcccaagctgaagtgcaatggcgctatctcggctcactgcaacctctgcctcctgggttcaagtgattctcctgccccagcctgccaagtagctgggattacaggcatgcaccaccacacccggctaatttttctgtatttttagtagagacagggtttcactatgttggccaggctggtcttgagctcctgacctcgtgatccgcccgcctcagcctcccaaagtgctgggattacgggcatgagccactgcgcccagccttttttttttttttttttttttttgagacagagtcttgctctgttgcccaggctggagtgcagtggtgcaatcccagctcactgcaacctccaccaacccaggctcaggtgatcctcccacctcagcttcccaactagctgggaccacaagtgtgcaccaccacatctggctaaygtttgtattattattattttttttttttttctgagaccgagtattgctctgtcgcccaggctagaatgcagtggccgatctcatctcaccactgcaacctccacctcccgggttcaagcaattctcgtgcctcagtctcccgagtagctgggattacaggcacctgccaccatgcctggctaatttttgtatttttttttagtagagatggggtttcaccatcttggccagggtattctcgaactcctgacctcatgatccacctgcctcggcctcccaaagtgctaggattacaggcgtgagccaccgtgcccccctaatgtttktwttttttatagagatggggttttgccatgttgcccagggtggtctcgaactcctgagctccagtgatctgcctgccttggcctcccagagtgctgggattacaggcatgtgccaccatgcccaggtgaaattaattttaataagatattttagttaacccaatatattaaaaacaacttataattaatagaaaattatcaggtgtctcacagttttttgggtaactaaggcctttgagacagtctctatttgacacttagagcgcacatcagttctgacttgtcacatttcaagggctcagcacacgatagatggcacagcctttgtccccattctagatctgctggcacagagcacatgtccaggagttggaaggatggcttagaaggatggatttaaggctcatgtcttcatcgtgttgcttacccctctgaagctgctgaggccacttccaacaaagtttccagtaaactggggaaaataggaatcgtgcttcagtgatgcgtcggcacagggcaggggttgtgtggctccggaaactggatcccctggttccaaatcccagctctgccctgtcctagctgtgggaccctgggcaaggagtccttgtgtggaaaatgctgtttaccctatcagcgagtcatgaggactggatgactgtgtgtgtagggtggtgggatggcgcccagcccatggtcggtattcagtaaacactcgggggcttacaaaggggccctccttcaaaatgtacatcactgtgcagttctgggacctgccaatctcacttctccacactgaggggcggctggccagctgcacccagagccagcttcccctgctgcagccatcaggacttgacaagtgtgcaggtgtaaacccgacccacgctgaggaacaagttggccaccaaaacattcactttgcttgaacagtgcctgttaggagttgaattgtgtgtccccgtattcatctgttttatctgttgaagtcctaacccccagagcctcagaatgggatgctatttggagatggggtcattgtgggtgtcatttgttaagatgaggtcatactggagtagggtgagtcccaaatccaatgtgaccggtgtccttatacgaaggggaaatttagacacagacacacgtagggagaaggccacgtgaaggcagagtaagagagaggagtgtgtctggcagtcacggagcgccaaggatcaccagcaatccgcagacactaggagaggcccgggcagattcaccctcgagcctctggagccagccctgctgacacgctgttcacagacttccagcctccaaacaaactgagagaataaacttctgttcttttttttttttttttttcttttcttgagatggagtcttgccctgttgcccaggctgaagtgcagtggcgctatctcggctcactgcagcctccgcctcctgagttcaagcgattctagtacctcagcctcccgagtggctgagattacaggcacatgccaccaaatctggctaattctgtttttgtttttgtttttgtttttttgagacagaatgttgctctgttgcccaggttggagagcaatgccacaatcttggctcactgcaacctccgcctcccgggttcaagcgattctcctgcctcagcctcctgagtagctggaattacaggcacccaccaccacgcctggctaatttttatatttcagtagagacggtatttcaccatgttggccaggctggtctcgaactcctgatctcaggtgatccacctgcgttggcctcccaaagtgttgggattacagacatgagccactgcgcccggccttctactcctttttagctacttggccatggcagcgctagggaagtcagacggtgcccctttgctgtcagaacgtgcagggccactcgtgttttctttaggattttcagggcctcggagtgacgttgctttggaccacccttccttggtttaaaggacagctttcactgaagtcaccgagaggggaaagcaggggtggcattctcgtctctgggcgatatttccgtgagaatactgcatgaactgatcnnnnnnnnnnnnnnnnnnnnnnnnnnnnnnnnnnnnnnnnnnnnnnnnnnnnnnnnnnnnnnnnnnnnnnnnnnnnnnnnnnnnnnnnnnnnnnnnnnnnnnnnnnnnnnnnnnnnnnnnnnnnnnnnnnnnnnnnnnnnnnnnnnnnnnnnnnnnnnnnnnnnnnnnnnnnnnnnnnnnnnnnnnnnnnnnnnnnnnnnnnnnnnnnnnnnnnnnnnnnnnnnnnnnnnnnnnnnnnnnnnnnnnnnnnnnnnnnnnnnnnnnnnnnnnnnnnnnnnnnnnnnnnnnnnnnnnnnnnnnnnnnnntttgtgttaacctattgtcttggtcagttcaggctgctataacaaaattccatagactgtgtggcttatcaacaacagacttttttttttttttttttttttttgagatggagtctctctctgttgcccaggctggagtgcagtggcgcaacctcagcctcccgggttccagtgattctcctgcctcagcctcctgagtagctgggattacaggcatgcaccactatgcccggctaattttgtattttttttaatagagacaaggtttcgccatattggtcaggctggtctcgaactcctgacttcagatgatctgcccaccttggcctcccaaagagctgggattacaggcatgagccaccgtgcccggcctaacagacattttcatttcttacagtttggaggcaggaagtccaaaatgaaggcactggcagatgcaggctgtggggagagccctttcttgtagacgatgcctcactgtgtctcacatgaaggaacaaggcggttctctgggacctctttataagggcactaaacccattcatgggggctccacccctacgacctgatcacctccccaggaccccacctcctaagaccatcacttttggggttaggatttcaacataggaattttgtgggggacacaaatactcaaagcctagcatctgtaatgggttgttatttgaaaatgagttaatgatagcaatgtttttaaattattaacaatggctggacacagtggctcatctggtaatcccagcactttgggaggttgaggcagatggattgcttaagcccaggagtttgagaccatccttggcaacacagtgagaccctgtatctacaaaaaatcaaaacattagcttggtggtgcatgcttgtagtctcagctacttgggaggctgaggtgagaggatcgcttgagcccaggaggtagaggttgcaatgagctaagatcatgctactgaagtctagcctgggctacagagcaagactctgtctcaaawaaataaataaataaataataaaatttaaaagataattaacaactaattaaaaactacctaattttctgctatggaaaatatatcagttaggtagaacccacataaacgaaagctctggggacgcttcaataatactgaagagtgcaaacggtcttgagactgagaggtctgggaaacactggtttagcctccagtctgcaggggacaggtgtgaaagtcagctcccaagtcaaccacatttagtcaaaatgctcacgatgcctcaggaaggcacagtgtagcaaacacactctggcttctggggagtcctggtgaccccaagcctttagtcccagagatggctgctgtttacagtgttggactctagacactggccagctgtgcggagtctgatcattttggggaactatgagatgttcacgccgtaggtgtcgttrttgaccggaggagctccagggttgaggcttcccatctcaggcctgctctggatttgcgcttgcccactccagatcgttgtgtcacactttggtcctctttggctgggcgtggtgcctcacacctataatcccagcacttagggaagccaaggcaggcaggttgcttgagctcaggagttcgagaccagcctgggcaacatagcgagatcctatctgtatttgctggtttccacactgctataaggaactacctgaggctgtgtaatttataaataaaagagatttaattgactcacagttccacatggctggggaggcctcaggaaacttgtaatcatggcggaaggcaaaggggaagcaaggcacgtcttacgtggtggcaggagagaggaagcaagagcgaggggtaaactgccaaacacttttaaaccatcagatctcgtgagactcactcactttcatgagaatagcatggaggaaaccacctccacgatccaatcacctcctaccaggtccctccctggacacgtggggattacaatttgaaattagatttgggtgagaacacagaaccaaaccacttcactgtctctacaaaaaaatacaaaaattagccagctgtggtggtgcatgcctatagtcctagctactcgggagtctgaggtgggaggatcgcttgagcccaaaaggtcaaggctgcagtgagccgagatcacaccatcacactccagcctgggtgacagaaaaagaccctgtcttaaaaaaaaaaaaaaaaaaaaaagaccacagattcttgggcccacccaggacctactgaatcagatgtcctgggggtggggcccagcaacctgttttcctaagccctccaggggattcctggaggaatcacacaagtttgagaactgcttgtgtgagaaggcttaggatataactctccttgaactcattaaacaacactgtcaggaaacaaacaattgcagcatgtgggacctcctgcaagaaaaccatcctggaaaaattagacttcagaatttcagtgtttctaaaatgtcatgggtctcttctcaattaatggagactaaagtgatggcaaatgctgaacgtgaactgtcgctgggtcctggtgagggttgggaggaaacagctattcctggataactgagaaattcaagtgatgttatatggaattgttaatttattatttatttatttatttatttattttttgagacagagcctcactgtgtctcaggttggagtgcagtggcgccattggctcactgcaacctctgcctccctgggttcaagcgattctcgtgcctcagcctcccaggtagcttggattacaggtgtgcgccaccacgcccagctaatttttatatttttagtagagatggggtttcaccatgttggccaggctggtctcaaactcctgatctcaggtgatccaccyaccttggcctcccaaatgctggcatgagccaccgtgcccagcctggaattgttaatattcttagaatgatgatagtatcatggttttgaggtgaatgatgtctttattcttagatgtatgatgaagtatgatgtgtacatctttcaaatgggttaatctaaaaagtatgtaaatagagaatgcaacattcagaatttttaataattgttcagtctagttggtttcaaaaggaatattctactgttcttttaacttttttgtttgaatttcttcaagtcaggcacacagaagatgctactcttacatttcactgcattcttgagatggaacttcgtgtgtgggtaccagttaggatcaggtttggctgaaacagaaatccaacataacattggcttaaccaagatggacacctatttccctcttatatgaaagttctcagggaggtggtgaggcgggtttgatggctctgatgcatgtggtgctctggaccaaagcaccttccattttattgttcctccatgagtgccttccaaaatggctgctccagttccagccattgtatccatgttccagcaggcagaagaggtaaaggacacattcctgctacttttagggaacacatggccaaagcttagttatgtagctgcaagagaggctaggaaatgctttaatcctaggtagttgtgtgcccagcctgaaggtgggcatttgttactatggaaattgaaggacaatttgcaggctatgccccacttccagaggtgttttagtaaaaggtgaaagttgtcttttgagacaaagtcttactctgtcacacaggctggagtrcagtggcacattatggctcactgcagcctctacctcccagcctcaagtgatcctcccacctcagcctcctgagtagctgggactacaggtgtgtgctaccacacctgtctaatttttttaaaatttgtgttctctagagattgggtctgtattagtctattttcacactgctatcaaaacatacccgaggccaggcgcagtggctcacacttgtaatcccagcactttgggaggctgaggaggtggatcacttgaggacactagttcaagaccagcctggccaacatggtgaaacctcatctctactaaaaatacaaaaatcagctgggtgtggtggcatgtgcctataatcccagctacttgggagactgaggcaggagaattgcttgaacctgggatgcagaggttgcaacgagccaagattgtgccactgcactccaacctcaaaaacacaaacaaaaaaaccaaaaaacctgagactaggtaatgcataaataaaagaggtttaattgactcacagttctgcgtggctcaggaaacttataatcatggcagaaggcaaaggagaagcaagcaccttcttcacaaggcagcaggagagaaagagagagcaaagggggcagctgccaaacacttaaaccatcagatctcatgaaacccccccccctccactgtcacaagaacagcatggggaaaccacccccatgatccaatcaccccccacgaggttccttcctccacacgtgaggattataattcaagatgagatttgtgtgggagcacagagccagtccatatcagggtctcactatgttgcccaggctaaaggtgaaagatgtatatgatttgaagagaaaccagtatatggagaggtttttaaaactcaacatggcaggtcgtcttaaagggcttccctggctgggcatggtggctcatgcctgtaatcccagcactttgggaggccgaggcaggtggatcacctgaggtcaggagttcgagaccagcctgattaacatggagaaaccccgtctctactaaagatacaaaattagccgggtgtggtggcgcatgcctgtaatcccagctaccccggaggctgagacaggagaattgcttgaacccaggaggcggaggttgtggtgagccgagatcacaccattgcactccagcctgggcaacagagcaagactccatctcaaaaaaaagaggcttccctgtgtgtcctcatggagcaaagtgtgactattcacagaggaacttccttgagttcctttggttgttgcaaaggccttttaagccccacaggccagctcaactatccaattctagcttgttaagaaacccctggcccctgygtaacgagccctgttcctcttttctgtcccgcagtctccaacctgtcccagtatttcagcccagcctcggtgtccagcagcccggcccgcgcgctcctgctggtcggcgtcgtcctcctggcctactggttcttgtccctgaccctgggcttcactttcagcgtcctgcacgtggtgttcggccgcttcttctggatcgtgcgggtcgtcctgttttccatgtcctgcgtgtacatcctgcacaagtacgagggcgagccggagaacgcggtgctgccgctgtgcttcgtggtggccgtctacttcatgaccgggcccatgggcttctactggcgaagcagtcccagcggccccagcaaccccagcaaccccagcgtggaggagaagctggagcacctggagaagcaggtcagactgctcaacatccgtctcaaccgggtgctcgagagcctggaccgctccaaggacaagtgaaggtcagccggccgggcgggtccacagttaccagcacgctgtctcagaaaacgaaaacggaggaaaaaaaccccaaaccccaaacaatcttaataaacacgactgagcaagaaagtggcgctgtgtarggctatttcyacccacccggcagctcttaggacacattcccagaagagcggaaagatcattgacgtggaactacacacgaagtgtaattagtgggggaaaaaatattttttaaacaaaggatataaccatatttagttgtacagtaagagaaatttatctgtgcatagagcataaagttaattttttcaagcatttaaatacatcttttgtaaggttttttaataaaggcagattgagtcaagtttattaaaactttacatggaggggaagaatatgctaatttgacatttgagaaaagtttaaatgcgagcgtttgttttcacagcttagggattggtgggtgaggtctgtgtgcgttattttcatgttcccaaactgtgagctttatttcatgttatttttggtggatgttgacttagttcatgaatgttgtcacttctaaatgtggacagttgggctgcaggatgcaactcaacctcttttggatcctagagacccctgccaagcccccatcagtcctatttttaaatgaagacatcgccatttctagaagacctgagattttcttccctctgtgcttcgatgtattttaacctcaacattttgaaacggaaaatgcaaggaggggccaagaaatgtcctggggatttgatgccaggaagtacctggtaaggattggagattgctccagaatctactgcatgtcccaatttgcagtttgctcactagggctatatacaaaagctatacccttgagggtttttttttttttcttttgatttcctcaggaccttagagggaaaacaaacagtagcagctaatattctcaagtatattgctgcttagaaagatcctcaggaacaattagcagcaataagcaagcctttgaaaagatctgaattctttttcctgaaatatttacgatacacaggtgctttttatctgaaatctgttgtgtcctccttttaggcagtctctgtgggcagagagtgggacttgcgaggtggacagctgtggggatcctgggcaagggagtttcagaaggtgtggctcaggggctggtagaaacccccttttgttaggacttgttttttaaaaaagaaagccctaggccaggcgcagtggctgatgcctgtaatcccagcgctttgggaggccgaggagtatggatcacctgaggtcaggagttcaagaccagcctggccaacatggtgaaacccccgtctctactaaaaatacaaaaattagtcaggcatggtggtgggtgcctgtagtccagctactcaggaggctgaggcaggagaattgcttgaacctgggaggtggaggttgcggtgagccgagatcacgccactgcactccagcctaggcaacagagcaagacttcatcttaaaaaaaaaaaaaaaagcccagcattttgcagctttgaagctgctggggatcacgactgtctctgtggcccttacctggccacagatgtaccctggcaacccgctcacagtgccctgcgtgcaggtttatagataacccctgccagacctgctacaaccaagaccttatggtccaggtctcagtttggagaagatttagctgtctaccacttcttgtgtagtgttcctgtgaagttttatttttggttgcaagtatctggaaaacagatgcagatgtttttgtggatgttgttgagacttttgagacttctgtttctaaggtacacatgatgggacccaaactctcctggagagttccattcacttcctgaaacgtgcacctgtttcaggtgcatgtttattcagtgtgcatggatatttaagatttgctggagcaggctgggcagggtggctcacccctataatcccaacactttgggaggccaaggcaggtggatcacctgaggtcaggagtttgagaccagcccggccaacagagtgaaaccccgtctctactaaaaatacaaaaattagccaggcatggtggtgggtgcctgtaatcccagctactcaggaggctgagnnnnnnnnnnnnnnnnnnnngaataaataggcgcgcccctccctcgcccaatataataaccatattcggagcacgcggcacaaataaacaaaagcttcatttcgcagacaatgtcttcctgtggtcgtagcgcggtatgcaaagggaggggaggtaatacccgtgctacaaggggcgtttttcacacattatgcgcgaaggagttccatgcgatcccgtaagtcgatccgggacaatgttcatttaataaacacttacaggtcaaggtgcctataaatctaaaattgttgatctctggcgtgcgaccttatcccatcagatcatgaccgggtggatatccagagatcctcattcgggtgtgcgaaattaatgaagcgtgatcgactttttcttcaactgtatatctgcatcctcccgcatcttgtgacaaatgtaaggccaccgagccattatttgagccgcactcgaaagtaagcatttgcctcacagtcgtctctatataccccgaatcaacactgcacataggcccccctcccccctccgacttacacaaaccaaaaaagggactggcaccgcttacacttgtagaaggaaaaaaacagccagtcaggcctggagtgcagtggcaccatctcggctcactgcaagctccgcctcctgggttcacgccattctcctacctcagcctcccaagtagccgggactacaggcgcccaccatcatgcccggctaattttttatatttttagtagagacggggtttcaccgtgttagccaggatggtctcgatctcctgacctcgtgatccgcccgcctcggcctcccaaagtgctgggattacaggcgtgagccaccgcgctgggcctagatcaaatctttatccatgcacattggaacacaggattactgggttgaaatcattctagttttgtcatttagatacttgtagatgaatctattttagcacaaggtataaataactcgggaggtcatctctatcttctttccttttgtgcatttggctataccacgtttaggtactaaaacagctttgcttatgttggccaggggaaaacatggcattctgtgcgcaaagctaatgatcgccagccctgccttggcccctcccttgtttatggtcattgtaagatgcccgcatgttaaggcttaagctgtcactgggctgggtgtaatacccgcttcattcctcctcccaccctcttacccgaaacatgaagggcactgtgctctattgagatctcgataagatcatcattttaacttgtattcaactgagggaggtaacatgatatctgggtgctggtggattgagacctcaagcatcaattcaaaattgctgtcgaaaatatgcactattttttttttccactctggctaagtgtaggctctgaagccagttttatagcttgatacattctggtgaaagatgtcttcatttttaatgaaagaacctacagttagtaggtgtcacctcagggtagaaattctgatagaaattctgattatttgaaactctgatagaaatcctagatgctagatttgaagaaaacctgggttttattgcatagatttcaccttttctggggcacatcttaccccaaaataattggggatttttttgttccttctccattccatggaaccttgtagggtgttgggattgggcctcccctcgccacccgccacatgtctttgtttttttctctcttttgtatgtggaaaaatgtatttttgtaccatatctcatacctggagagaaaccttttttctatcttcagggctgtagaatatattagcgtaacacttcactgaatgtgacgtaaaagcattctgatgaaaactggttctgttataattaagactcagtgtttaaaatatcttaatcagtgttaatttcccagtgtttcagtatcacagtaaatacttgttttactgagaacagaaaataatccagaaaaggaaaaggaccagccctctctagattgctggaattgtatggatgtgttggggttggtttagtgatctcttccttgacaccctagcaaagatgcttttgtggagtgcaaacctttcataaatatactttccaggctgggtgcagtggctcaagcttgtaatcccagcactttgggaggccaaggcgggtggatcacttgcggtcgggagttcgagaccagcctggccaacatagtgaaatcccgtctctaccaaaaaatacaaaaaaaaaaaaaaaaaaaaaatagccaggtgtggtggtgggttcctgtagtcccagctactcaggaggctgaggtgggagaattgtatgaacctgggaggcagaggttgcagtgaactgagatcacaccactgtactccagttgaggcgacagagtgagacccagtctcaaaaaaaaaaaaatgatgaactactgtccatcgatagcgcgnnnnnnnnnnnnnnnnnnnnacacactttcaataccagtcggcattacccgccctttggtttcttttgctttggatttcagcccccatatcatttctggtaacagagcacagcaatagaatttctgggaagcagaccttgtgaatcgtgcctgtgtcttaattcacaaagggtaagtgaatgccgttgaaaggtgtttcatacacttaccccagaaatgagagcctgtctcatgcaggagtcgggaggcagcgatgtcagggaactgggactatgtctttatgactgtgatggtggtaaccaagtggggtggtcccctctggggagctgagtaagaacgcaaaggtttgggtcagtgattaggaagactataatatgactttgtgcatgcccgggagggctgccttgtagagaggatgtgagcagcttagtcgctcatctggccctgtgattcaggcttatggagcgttaagaataacagctgtcaaatggcctagacatggttaatgcaatttgttgctagtggaaatcctgaattgcttcctttctgtgatcactgctacttcttaagatgcttttgatgaatgtcatctgccttacaagttgacacctgataacttctccctgatgggtttccgaactggctgacttaaccaaaaagccagctcttgccatctatcttgcattaaaaggaattcctgaggctcctaaggggtcagctgccccactcctgacttttttatttttaatggtctataccttctgcaacatttttgtttatggccatttgaatagttggactttgactcctcacttgtgaataataggaatatattttgcagaatctaacataatacccttaaaattcatactggacaaccatcagtgtgatgtatagtatctggtgtaaacaaattttattcagcatattaaattattctgtgttttgcttttccttgatatgtaggaggtgcaccagtaccagtttttctcttgtggtggcttaaaacgctgattgccatttgcattgtctactgaaaagctgtggcagcgagtggtattattgaccatgtgttctcatgtctttttgcagatttaaaggttttattgtagtgtccatttaatatctgcatgtgtgtttaatctctgaataccatgtaattaaactgattaacttgtgatggtgatggtgattagcacacactaaaaacccaatgaagcaattgtctccctcttcttaactggaaatcacacttgtgaggtatggtatccattatcaacagtggattcatgattgacttcatattttgtgtatctggttataaattttgtatagcatttaatttggcacttaatataaatccatttgatttgaatagtgtgtgtgtgtacatggtgtgtgtgtgtgtgcactttagtttcgtgagccttgggaaactgattctacaaatatcttatatagagataaatgtatcaggcatttttttgcaaagcgatatatacattcctcttatttattaaatcactggctttggtgttatgtagagatatttgtagatctcagaacagaattaaaatattgtgaaaattacagcttaataaatgtttattgtaattttgttgtatggacttttaaaatatatctcatcacttctaaccaaacatttgtggagtttccccagttttgatgtgtaaccaggattctatggttctattcctcgatctgagaagagtcataaaaccttgaatttatgtattcagttggaggtaaggttgcaagataaaatacaggatgcccagttaaatttgaatttcagataaacaaccagtagtgttttagtatagtgtagaagtgttggttgcttatctgaaattcaaatgtaagcaagtttcctgtatttttagttgccaaatctgacagtcctagcacagtgatgcgtgcctctccaccccaccccgcatacccatgctgctttctcaggtcctaacaatccttttctttctattttttttttttttttttttttttttttgagatggactctcacccaggctggagtgcagtggcgagatctcagctcactgctgcctccatctcctgggctcaagcgagcatgtccggccaatttttgtatttttagtagagatggggtttcaccatgttggccaggctggtctccaactcctgacctcagtgatccgcccgtttcggcctcccaaagtgctgggataacaggcgtgagccatcatgcccagccttaaaaatcctattcttagtaaacatttaggagcaaatgt

SEQ ID NO: 97992 - DNA, 28189 bp, Homo sapiens
ttgggaaactttcctgggtaagatcttcagcaaatgctgaataggatgctgaaagtgggcctcctttgctttctttcctgatattcagtatttcaccattaagtgtgatgttagctgtgagtttttcatagatgtcctttatcaggttgaggaaattcccttctgttcctagtttgttgagtgtttttggcatggaggggtgttgaattttgtcaaatgtttttatgtgtccattgaggtgatcatagggtttttgttctttattctattgaggtggtgtatttcattaattcattttcagcagttaaaccaaccttacattcctgggataaatcccacttggtcatcgtgtataatcctttttatatactactggatttgatttacttatattttgttgagtatttttttttttttttttgagacagggtctcactccgtcacccaggctggagtgcagtgttcataaccatggctcactgcagcctcaacttccctggcttgagctagcctcccacctcagcctcccaggtctctgggactacaggcatgcaccaccatgcctggctgattttttctagtgtttgtagagatggggtctcactatgttgcctaggctggtcttgaactcctgtgctcaaacaatcctcccacatcaagtctcccaaagtgctgggattacaggcgtgagccaccatgcctggctttgtttgtttgtttgtttgtttgtttttacagagtctcagtctgttgtccaggttagagtgcggcagcaggacctcgtctcatattgaaacctctgcctcccgggttcaagtgattctcgtgccttagcctcctgagtagctgggattgcaggtgcacgccagcacacctggctaatttttgtttgttttttgctttttgagacagtctcactcttatcacccacgatggagtggagtggtgcaatctcggctcactgtaacctccacctcccgggttcaagcaattcttgttcctcagcctcccaagtagctgggattacaggagcgtgccaccacacctggttaatgtttgtattttagtagagatagggtttcatcatgttgcccaggctagtcttgaacccctgagctcaggcgacctgcctgcctcagcctcccaaagtgctggcattacaggcatgagccactgcacccagctatgttaagaatttttttttttttgcatttacatccattatgtaatggtgaataggcatgacagtagagaataaataaaaccagggaaggtttggtattacagaacaatgggatctcatattggggtgggggggaaagtgagaaattgggtgagattgatgctggatgggagatgggacaattttatcctttattctatagtggttctatttattctgttctattgatgcattttcacacgttaaaacaaccttgcattccagggaagcagagaatgggtaaacaactgtatataattctgatttagtcataaatttctgaagggagaatttactttttagaggatgatagggtcaactatattatttctgcagagacaccaccataacaaacagcaacagtaatgtccagcaattattaagcatgtactcaacacaaaatggacccgagttcaaacactggatttcacccttctatccaggtcatgaccatacttaactgtattaagatgaaccatattactgcatataataatgtcaaggcctcagcagtagtttccttaatagatagcttatatcctcatgaacatctcaatattctgatttcactaacatgcctactaataggtatattgtttcctgtgactgctgtaacaaactgatgacttaaaacatattctctcacagttctggaagccagaaatgcaatccacctgttggctctaaggcagaatctcttctttgcctcttccagcttgtgggggctgcattactccaaactttttttttttttttttttttctgagatggagtcttgctctgtcaccgggctggagtgcagtagcacgatctctgctcactgcaacctccgcctcccgggttcaagcgattctcctgcctcagcctcccgagtagctaggattacaggcatgtgccaccacacctggctaattttttatatttttagtagagacaggttttcaccatgctggctaggctggtcttgaacacctgacctcaagtgatctgcccacctaggcctcccaaagtgctgggattacaggtgtgagccaccatgcccggccccaacctgcttttaggtcctaatacctcctccttttctgtctgaaatctccctctgcctttctaaggagacttttcactggatttagggtccatccaaataatgcaggatgatctccttatctccatatccttaattatacctgtaaagacccctttgctgaataaggcaacattcacaggttccaggaattaggacatggacctatcttcggagggatcactgttcgacccactacagcagattctgaataagctataaatgtgaaaaagatagtgttttcaattgagtaaaaagtcatactggaaagaaatataccatggcattatagacagcagaaaataaaaaaccaaaccctttaaaacacatatatttaatgtacagaattggaaaaaggacttcttgataataaacatatttcatgtaaacacaagctttcaatatctatgaatatttcattgcaaatacaccctaagttacttcttctctacataaaggagaaactccaagttctgctctttaggaagacatggagggcaagcaataccttaggaacaaccattgctatttctcccctttccttgggtgacctaacattttacagggactaacgacataaagaaatattagattccattgagtttaaacacaaatttcccactgagggcattaaatatttgatgcttatgagtgtgaataaataaatattaggtataaggcagattccaaaaccaactgaagtatgaaaacaaattggcatagatacctaacagtcagtaaaattaaatttcactactgagtatatgctacatgcttccttttctactccagtgggttctgctttttttgtctaaggtcttctgctggactctaagacagtcaattgcttaacatcaccaggttttttgtcaggggatttattttggaaataaaccaacttcttttttattaaagatcaaggttgtcttttttgctacatgcttctttccactacatattgactccctcatgaaagaaaattcacaggacgagagcaagtactctatgttggctgttccgcagtgtaatgactggttaataaaagagccactcagcctggacaatatagtgaggcctcgtttctgcaaaaaaattagccaagcatggtgacacgcacctgtggtcctagctacttgggaggctgaggcaggaggatcacttgagcccaggacacagaggttgcagtgagccaagattgtgccactgaaatctactctaacctgggtgacagaaagggaccttgtctcaaaaacaataataataatattaaaggagccacccgtttaatccttttcttgtctggtctcatccaaagagtaagccaaaataatcaaggtcacaaaggacttatgaccaaggtgtaactctgcaaatatctttaactggtcatggcttctttgttggatcccttcccacttattagaagactcagatgcttcagcctagttcaaagtagtacacttcatacctcagcaaagtggaccaaaaaagaggaaaacacagaatacaagaaagagttgacaaagcaaatctaataaaaagtatggttggtttgaacagtcactggtatgatttgaacagtccttatggtttgaacagtccttatgattctactttttgacaggctcctccttttgactactgagcaattaagatattttcagtcgtttcgattccttttccacattgtctctaatgttctgtagttttctggagttctgaaccagggatactaaactctccctaaaatcactagtcccatgatctctgccaacattatgaagctcatcaaagaaagtcaacgtctgtttgagtttggcctgaacaattttttgctcttctaattctgcaagaagggcctgcttagtacataattcagtcttgtacttctcctgtaactgttcaatttctttctggagatgctgaaaatcttcctcactataaggtgtctccttacatttatcttcaggaagcaagatgtttgagggaatacgtaaaatcagctgcaaaaacagttgctccattttgctaaaaaggttatcaaaatgtcctttcatgaagcaaagaaacttctctgtgcatttgcgaatctgcactgggctaatgtcacagtctgggatgccatccagcttcttcagaataacctgttcaacggcctgcatcacttcaaataggtagtcttgaaatgcaatgtagatccgaagcatgcacgtttgtggcgtgaagccaaagaactgggcctcgtaggtcattggatccacagacatcttggcttattttgctatgttgttttcagtcgtgaaaaacctgcaaatgtaaaaaggaaataattcatttggaaaaaaaaaatcttctgcaggaagtaaccaatcacattacagatagcaaacaaagaagcaaatcaataaaaaataaggagtttgtgttcctttatacctgatgccactcccacaacaggatataaactcttgcctctctgaggctccttccatcagcctataccctcccttttcccctcctcgttgttcacttcccttacctgtgactttggcacagatcagtcttctgaattatcatcctagacaactttgaagtctagacagatgacttaaccaatgccctagagactcagtttcttgagcttcaatgacctatagctccaccttttagccacctggctcttgatatttgtaactactcttccaaactgcttctactttttgactactgcctcctacacaattcttccaattcttacccatatactcatattataccctaatcttcaagatttacagcccctccaccctctctttctgttctcagcctctgccacttctcttctttccttattcattttaggcctcatgatctatcattttgatcactccgttgccaatgtcctcaatttgcttgtcctccagccaagccatctgaaaaaaacccaattagaagatgagtaagtcccttgtcagctttataaccctgacatgttttttcaagggtctgcgagtaattcctctcaaatataaacatctaggaaaataaaacccctatctccttgtcattgtgggaattcaacctaggcatctttttctgagatgaaatgatattgcttgtcatagaaataagagaaattttattattccttcagataaaggcaattagctaaaacaaactgctacttcaattatcaggtgaatttaggacgcactttatgaaataatttgcaataagcagtacagtcaaatcttatgggaagataagatgcagccaatcttaagaatttatgtttgtaggctgagcacgatagctcatgcctgtaatctcagcactttaggaggccggatggacgaatcacctgaggtcaggagttcgagaccagcctggccaacatggcgaaaccctatctctcctagaaatacaaaaattacccaggcgtgatggtggatacttgcaatcccagctactcgggaggctgaggcaggagaatcactggaacccgagaggcgaaggttgcggtgagccgagattgtgccactgcaccccagcctgggcaacagagcgagactctgtctcaaaaaataaaataaaataaaaatttacgtttgtaatggttaaatatggagtggttataactgtttggctgtatatgtaaggtaggatttctttctgtttttctttttttcttttgagacatgttgtcgctctgtcgcccaggctggaatgcagtggcacgatcacagatcactgcagcctcaacctcccgcgcccaagcaatcctcccacctcagtctcccaagtagccgggacaacaggtgcaggccaccatgcctggctaattttcttgttgttgttgttgtttgagacaaagtgtcactctttcgcccaggctggagtacagtggtatgatctcggctcgctacaacctctgcctcctaagttcaagtgatcctcttagctcagcctcccaagtagctgggattacaggtgggcgccatctcaaacaacaacaaaaaaatacacttccttgattaactcctttcttcgaattcccattaggacctctcttcgggcactgactgatgaacttctaccgcctcatcttctctgctagacttagagttcctgagagcagaataaatgcggcttgatcagtatttgccgattcaacgcagaggtgcccaggtcatctcggcgagttgagctgtctaagaccccgcgatcgcgcaggacaggacscagaagccagagcgcaggaactgcttccggccggctcccggcttccgtcgggcccygcgcccgcgctgcatgctgggaycttcaggtcggaggccggggtgaggccgacccacaggccgccttgctccctcgcgaagacgcttawgccagtctcgcccgtccccgctcctcctcagagaaaatgctgccccgcagcacttaccggagcgaccatgagggtgacgatttgaagcacacacaggcttcccgccacctcctttaaaccgccgctggcttgccagggacagacggcgcggttggctccccaaaattccgactratacgcgcctcggcgagcgaaagcaaacgcgggatactctcgcgttcctgattggctggttgtggacacctcaattatgacagaaaggggccgggcgggaaagttagctgtggccggcggggattggcagaaggaacctgtacttactcgtttttcccggacgttggctggtggagaagagagggtggggagatggggcgctggggggggggcggtggcgacgcaactcgtgattggcggatgtgckttccttaggtctctacggattgcggttgcttggcgttgattgggcagtcgygggaaaactaaagtgggcggggggcctttgggcccgccccgccgccggggcctgctggcggaaggggaaatggggtgggtggggggtggggcaggcgacggtggggaagatggcgtaccagagcttgcggctggagtacctgcagatcccaccggtcagccgcgcctacaccactgcctgcgtcctcaccaccgccgccgtggtgagcagctgcagtgccaccttctcattatctgggctggatatgactgggtcttcaggaaactggggtttgggcctcggggaggcccagaggggctggtcccggggatgggtggaggcgtacagggattactctggggttcgagttggcgccaagaatgcttatccagtgacgcgagaagggagtgctgcttcatggggggtcaggtcagtttctaagagatgagcgccggacctatagcgggttagggttgcgggagcctcccacccaagaartgtgtccgagagctctgccaatggccaggtggtaccatggtgactagtgagaggaaggtccgtttagtgaagaaacaggaatggggaaagcaagctggaaactgtcgagaggggaatggcttataataaaaagggtctctggatctaaataaggggctagctggaggtacccagccctaacggtggcagggtctccagtctccgttatttcaagtgagttttgttgtttcatacagctgtttcaggtggtgcccatgtggtgggtagattcatagcagctgtttttatttgtcctgtgtctaaaatatcaccacctgtctgcctcatttcttcatgtcagcctcaactattgcaacataaaacagacttttttgtgttaggtattgaggatacaaagaattctaccaatcctagagaattctttaccaacctcttcctctggcctaagaagaaaggcttaaaggaaatcacgtctaagtgaccgagagttggaaattgctagacctactaattctttgttgtaaatgatgaaattttgtttcttggttgatttgctttaagaagctctttttctatttcagcagttggaattgatcacaccttttcagttgtacttcaatcctgaattaatctttaaacactttcaagtaagtggttcatcacaatagtgattaatgcttcagtttcttctttttcttactgtttagtagcaaatcctgttatacactatcctaaaaaagaacccagtggggacctttgattataagttgccttgtcaggatataaagcagtgattctgcagcctggttggacttgagaatcccttagggaactttgaagagattctcaagctcctcaacaagtaccaaatcagaatttgcaagggtaggaattaaaatctgtgttttatttttaaagttccctgcatcgttttgatgtgtccagttcctgtatttggaaatcactggtttagacttaacgttktcctatgagaggaggctgactagctagctgcttaggggttgtctcacagggatggccttattttgtccattcagcacctaggcacacccaccaccttggtgttatcaccatggtccagaaactcaattctgttagtgcttttaaattgtgatctgtcttccagggatcagatcatactaaccaaattccaaacatctaaagctatatggtggtttattagattacaatgggagatggtcctttccagtgattaaaatgccaaaagaggctgggcacagtggctcacgcctgtaatcccagcactttgggaggctgaggcaggcagatcacctgaggtcaggagttcaagaccagcctggccaacatggtaaagccctgtctcttactaaaaatacaaaaattagccaggcgtgatggcacatgcctgtaatcctagctactggcgaggctgaggcaggagaatcacttgaacccgggaggcggaggttgcagtgagccgagattgtgccattgcactccagcctgggagacaagagcgaaaccctgtctcaaaataaaatgctaaaagagagatggatttttctgttccaggatgatcttaccatagttggagtaggggagagacccaaaagccaataactgtgcctctacacatgctgttctgtctgtctcaaatgtgtttcattcactttatatccattgaactctagcttgcctttcaaaacgcagcttttgtgtaacctttatgtactcatcctcctttgttttagaacatctctcacttttactttgcagttatgcgtatgcttgtctcctcactaggatgaggactctaaaatctggataattaatatgtagaactgaattgtttcaactttaatagttaacaattctcaagaatttagtggtctgtaaagcagtcctgtcatctcttgtcactgtgttcgcacaatactcacatggcgctgtagttccatccaagtaagtcttgcttcctacttggctttactctgcctggggttaaactcttgatgacactgtgcatttggagttaggagttctagatttgccatcagagtttccatctactcctgcgggtccttggtcaggacatttaaaagttcaacttttagctgaataactagtattcagctagtcagtcaacttttagtctcctatctgtgaattgggggtagcttgcttgtctgtggatcacaagagatagtagacattttaaaacgttaagyactctacaattgagagtggttactgtgggtgtggagatgttgggtagggaagggtctatcagggtttccaacaagaaaataagtgtttggcagggtgcagtggctcacgcctgtaatcccagcactttgggaggctgaggtggatgatcccctgaggccaggagtttgagtcagcctggacaacatagtgagaacctatctctttttttttttttttaagttttagtttaaaaaaaaagaattttcctttcttttagatgtttctgactgcctaatgtaaacatttctcagcaatttatattagaccctgaagtttttctctgatatgtcagttctatttattrtatgatgatactacatatgaaagcactgttttctgttctgccgattaacstagtctttccagcaaactttctccatacgacgatcacaatttaaaattttctttcctattattataaatgtcacagtcccaatgatgtctttcagactttgaactaaaagcagcaaaaaaaatctaacatcagattatatgcccccgtttttgtttcagaacagagtatcactctgtccaaggcttctcaaccaccgcagtcataggatgtttcttttgtattaatatggaactgtttcctggtaatttattttacttaatacatctttctcttgatttttttttaacagatatggagattaatcaccaacttcttattttttgggccagttggattcaattttttatttaacatgatttttctgtatcctttattaaatggggtcagcatcaaaactttttcttaggaagtaaaaaattaagttgaaacttttcatcctgttacttgtttttggtaccatcttagcyatgatttctgggtcagtggtacataaagtagttgcttaggtagtaatgttttgaaaatgtctgtaggtcactttgttcaaatgggaggttttaaccataaaaagatagcacttctgctcttttgttacttacaaatctgatcaagggaggggagaattgatttaactgaggcatacctccacagtaaccaacaggttcgaagccgtaaaacaacctgaatgcaatggtaattcagcagaatttgggcataagttttggaatgggttcatgaggagtgggaacctgagatctccttgggtcctggttgctggaactactggctgaaagacagtggttgtgtctgctgggcttgtcaagttccggtttgttgaaaggaaaaccccagctctgatccaatggtaattggggccacagagcagggcattcctcttccacccctgccctctgtattaagagggasttacagttcaactcatctgcagctgcattccttcctgaggatggcaggaatccattttatatcctatgtaggatatcattctgataagtttccattaaagttttttctcatcgtaattcatctttattgactgaggtgctcaacctgccaggctggaaaagtagttkagcacacaaggcttcttgctgcggatttcttccaagttaggatgtgggaaagcaaagatggtgcatattaaggtgtggctgagcacaggaaagacaatacaratttttaaaggtttaataggggactggagrgccgggtgtggtggctcacacctgtaatcccagcacttggggaggccaaggcagtggatcacgaggtcaggagtttgagaccagcctggccaacatggtgaaacctgctctctactaaaaatacaaaaaatagcctggcatggtggcacacaactgtaatcccagctactcaggagaatgaggcaggagaatcgcttgaatctgagaggcggagcttgcagtgagccgatatggcaccattgcactccatcctaggtgacagagcgagactctgtctcaaaagaaaaaaaaaaaagaataggggactgaaagcatgtctgtgtgtcatctggattagttcccagccagggacagtttgtaaaaaatgatgctggtcttgaccttttctcaaatgcttggtaaaaaagtaatcacattaccactcaaacattcttatacaaatgaagacttgactaattacaaataatatggaatccaagtgtacttacaagataacattaaatttttactttgttcatattcgtgtgcttaatattttcttaacttggaacttaagatatcgttactgtcgaatgctagaagaaggctctttccgaggtcggacagcagactttgtatttatgttcctttttggtggattcttaatgaccgtatccttcaacaaacaacacgggaaaatgttgaagaacaccctggctcttcctaargcttgtcatctgtctcccacagttctctagatcttagcttcagggcactatcatttattttacagcacattttctgtgacaagtttccaaacctagcagtcggacaggatgagcaagtcaaaggaacttttaacccaggtgggttactgttaagcaactcagttatatcattactgcttggcgtacttcacttttaaactaagttggtaagacatttacttggtggctaccaaaaccaataaattattttttcagaaaaagaattttcatctatacaatagacttagatatggtacggtctgacaagatggttttgttccagctagctttattcatctctgtaaaggtgctaatcgtgagcaagctttaatataattattgactgaagaattaacacattttccaaagaggcaagaacttcacgaaagcagagtatttgtttgaagtagctgtaaatctcgataatttagcctaagcagatttttgcctgattgctctgggtaattattttctgggtgtttctccttctattctaaagatgtaacaacttgacttttccaattcaaacttctgttagaacacaatctttagttctcctgctcagtctttcctattaaacttttaatgttgatattttccttaatgccatctgctagctttttggtctgtttgtgagcttagttttcttgggccaggcctttacaataatgctcgtctatgtgtggagccgaaggaacccctatgtccgcatgaacttcttcggccttctcaacttccaggccccctttctgccctgggtgctcatgggattttccttgttgttggggaactcaatcattgtggaccttttgggtaaggctcttctcactattttttaaattattttacctgtaaaagtattttgttactatttttcatgtttattctgtttggccttcacgtattacctattgtaaaataccacaatattagttcattaatttttaataattatgttgacattcatcctaaatataggcaatttgtgttggtaggtctacctgcaatctaaattttaattctctccctcatcctttatttctgcttgactctaggtattgcagttggacacatatattttttcttggaagatgtatttcccaatcaacctggtggaataagaattctgaaaacaccatctattttgtgagtatttaacaccaggttacatactcttacaggcaaaccaggacaggggcatgatctgtgttttctttggctcccctagctcctagtacacatagctcaggtcagtaaccatttgcagaytgagcattctgrctrcagttgaagagcacttggactgggtaggagcagacagtgccagggttgtggcaagaccaacgtcaacaggctcaagatatcttgggagtaacctggtaattgttagagatgaccactagaacttctattctggtaggagcctgctggttttatgaaagctgctgtccacgtttagtgaagtaaggtagcaaaatgggcaaaactgatgaaagtttctgatggtggactttgtggcctgccaagcaggtggttgagataagcagtgaagcagagtggaaatagctttggactggaaaccaggtgtagctgtcccactgaccagccatagagcaagtcctttcttttttgcacttcagtttcctgagatagaactttgatttctttctttcttttttttttttttttttttttttttttttacatggagtctcactctgttacctaggctggagtgcagtagaactttgatttatgagacctctttctactytggaatttggtatccttgggagatgccatattaaaaagggctcaattgagaagtaaaatgtgagtttttgttataaaatgtttgttgtagaatagtaagcaaaaaagaagaaagtgaaattgtccactatcccgacacttgggtatagcagtggccaccattgttaacttttcaatgtgtattcttcagtctttgtgtactttttaaaaaacgctgagccaggcaaggctgcatacactatgattgcgcctgtgaacagccactgctcttcttgggctaggcctttaacatagccactgcattccagcctggacaacataacacattcctgtaatcccagcactttgagaggtgaaggcagacggatcacttgaactcaggagtttgacaccagcctgggcaacatggcaaaaccccatctctacaaaaaatcccaaaatcagctgcatatggtggcatgtacttgtaatcccagctactcgagaggttgaggtggaaggattgcttgagcccagagggttgagactgcagtgagccgagatcrcaccactgcacttcgggctgggggacagagtggcaccctgtctcaaaaaacaatttttgtaaccttgtaaacttagtatgccataattgttttttccaccctgaagtgttataaaattataacaggtgatattccatggtatggatatggtgtaattatactaatcccttrttgatggacattgacgttagtgcttggttttctcttctgtaattggagtggtgaatgtccttgtagctaaatctctgcacacatccatgattattttcaaaagataattcctagaagtagaattcctattttgttgccaaacgccttccagaatggatgttcargtttacatttcaactagcatttataactgttcatttccccacatcctaatcaaacaaggaaggcattttatttaccctttcctagttgaatagttgtaggatgatgtctcattgtttatgatttttaaaaaatgttttgaaacaatttcagtcctacaagaaattacatatgcagtacaggtctcactccattgcccaggctggagtgcagtggtatgatcatagcacactgttaactcaagcccctgggctcaagtgatcctcccacctcagcctcctgagtagctgggactacaggtgcacaccaccaagctctgcttattttctttcttaaatgtttttttttgtggagacaaggtctctctatgttgcccaggctagtctcgaactccagtcctcaggtgatcctcttgtctcttggcctcccaaagcactgagattacaggtgtgagccactacaccccactttttatttttttatttttttgcaattgttttctggcacaacaagatataccaggctcatcctgtgctctccttgatccagtcctagaatcagctgtttcttcaaggagccctggttcctttaaagtggagaatggtatttagaagccaagatctgggtgctagatgtgctcattgctattggagtgttgctattcccagatcctctcagtgaacagagcaatggaattatatgtatgtatgtatgataatgtatacatgtgtatatttttagatctatgtattttttaaaacatgggtttatactatactcccatttctagtactacctcatggttcattctagcttttttcctattggtttcctccaatattttattatgaaaattaacaaacttataggaaatcagaaaaaaattggagtgagcttcatgtagccaccacatagattctgtaattaatagttccctattcttattgcacacctatccctacatctagctttccaatccaaaatgtatgtgccattatatgtatacttaattccttgtatacttgagtgtgcatatcagtaactagagtttagtatttatgtgcaacaaaatacacaaatcttgagtgtgtcaactgagtttttataaatgcacacatctgtgtatctatcaagacagaaaattaccatcaaccagaaagttccctgatgtccttccctgtcaatcattgtacctgtcccccaagaagcaattgctattctggttttgttcctctgtagattagtttttcatgttctacaacttcatgagtagaattgtacagtatgcatgtactctttggtataaggcttctttcattcaacataatgtttttgagactcatctgtgttcttgtatttattggtaatttgttcctttttattgctgaatattatttggttgtatgaatgtaccactcctttccatctgccctttccatctgtcctaacctgattcttattatgattaatgttttacctacctaattacccctcatatgtaaccagtctttcgggatagtctccacctctcccatatggatgccttgcttatctcactcaccctcagattccccagaccaggctgccctcttacagggatgcctccccatcctactcgggctaacatctcgtcaggccacctccatgtgtgcatggtctgatggggctcttgactccctataccaggctgtgcccccacccccatcctgctaatgtttgggcagtagaagggatctcagttttgtttttgttgtcgttgctgttttttgaaacggattcttgctctgtcacccaggcttgagtgcagtggctcaatctcggctcactgcaacctccgcctcctgggttcaagcgattctcctgcgtcagcctccctagtagctgggatcataggcatgcgccaccacacccggctaattttgtatttttagtagagatagggttttgccatgttggtcaggctggtcttgaactcctgacctcaggtgatccaccctcctcggcctcccaaagtgctgggattacaggcatgagccaccacacctgccgggatctcagtttctaatatactttcctttgattattgtgagagcaaacattctcacgtttattgaccacatggatttcctttttgaattgcatattcagccctttgcccattttttctgttggtatgtttgtttttattgttaatttgtaagaattttaaaaactcattttgaattatactattttctgactccagtataaatcagaagttttcagatacatttctaattttatcaactgtggaggattacaagtagaaatataagtgcaaattgaggatgctgctttaatggttccttctttagtgaggttttgaattactacatcatagtacttagggagtcttttggacatttactatcccctcctatgttctgcagtaatttttcttgggataccttgttaattttttaaaaattttgtggtaaaataatacctaacataaaattcaccatcttaactcattttaaatgttcagtggcattaagtatattcatactgttttgctgccatcaccaccatccatagaactctcttcatcctacagaactacaactctgtactcattaaacaactccccaccccagccatcaccattctattttctttctctgaatttgactactctgtacctaagtggaatcatacaatatttgtccttttttgtctggcttatttcttatttcatttagcgtaaagtcctcaaggttcatccatgttgtaccatgtgcctgaatttccttccttttttttgagacagtcttgctctgtcgcccaggctggagtgcaatggagcagtctcagctcactgtaacctgtgcctcccaggttcaagtgattcttctgcctcagccgcctgagtagtagctgggattacaggcatgcgccaccacgccaggctaatttttgtatttttggtggagacagggtttcaccatgttgactaggtgcagtggctcatgcctgtaatcccagcattttgggaagccgaggcaggcagatcacctgagttcaggagttcgagaccagtctggccaacatgatgaaaaccttccctcctaaaaatacaaaaatcagccgggcgtggtggcgggcgcctgtaatcccagctactcgggaggctgaggcaggagaattgcttgaatccgggaggcggaggttgcagtgagccgagatcgcaccatggcactccagcctgggcgacagagtgagactcccgtctcaaaaaaaaaaaaaaaaaattctattatatgtgtgtaccgtattttgtttattcacctgttgatgcacacttgggtgataccttggttatggggaaacattaatgataaatatgtgaaagtcaggttacaaaacatgtagtgtgatctaacttttgtaaaatgacataatgtaaaaattcccaaagaataactaaaacattgacaatagttacctctggaaattgaggatattttgctcatctctatttcctccttctctgtaattattatgatttggattgcttttgtagtaaaaatcagtaaaagataaaagctaatgtaaatgttaataattatagatgctcttacaatatgttaactgtttaattggcaggcaggtgtaatgcttacctattggtggaaaccctatggggcctgaactgaccttgtagtactttggacctgagatgactctgggaccaaattatatctgttgcttgtcttttaggaaagctatttttgatacaccagatgaggatccaaattacaatccactacctgaggaacggccaggaggcttcgcctggggtgagggccagcggcttggaggttaaagcagcagtgccaataatgagacccagctgggaaggactcggtgatacccactgggatcttttatcctttgttgcaaaagtgtggacacttttgacagcttggcagattttaactycagaagcactttatgaaatggtacactgactaatccagaagacatttccaacagtttgccagtggttcctcactacactggtactgaaagtgtaatttcttagagccaraaaactggagaaacaaatatcctgccacctctaacaagtacaygagtacttgatttttatggtataaggcagagccttttcttcctcttcttgatagatgaggccayggtgtaaatggaagtttcagagaggacaaaataaaacggaattccatttttctctcactgtattaaagcttttgtgtgtgatcttttaaattctgataatgtattgtagccctcctgcgtagatctgagctcagaacagtttacacagctgttcttcctgtgtcttcacaacttttaactggatttcatttcaggattggaaatacgtggctgtcatgctgtggttgtgtacatcttactaactcagaatgcaagattcagcaggaagatgatttatttctgtcatctggataggttgttttgcatctgggttttgccaaactttgtcagacaacatgaaaaaaaaggagggaggatggttcttgtagcagtaggaattcagctataggaaagtcagctgtaagctaatgtggcatcttatttgctttacttacatttctccattaagaagtatccagggaaagattggtaagggccacatttttgtaaaactaggaagattttcattagactttttttttcttttatttttaaaaaagttttaattaaaaatttttttttaaatacagatggggtctcactgtgttgcccaggctggtcttgaactcctggactcaagcaatcctcccacctcagcctcccaaagtgctaggatgacaggcatgagccaccatgcccagccattttttttttttttgccttttttgttttgttttgttttttgtttttttaattaaaaaaaaaaaatagagacagggtctcagattttcattagatttggaaaccaagttagaatgttgactttggagccagacgaacagataccagttagctaggcatatgttcttccagggtctttggctagttaacattagtcatttgcttcgtgaaaattcaagaaccttttcagagccaagtacctggattaccttcccaatcaggtagaaattagacagggtccacagaagtagacacttaatgctgtggttcaataaatacttcccctaaatattaagtcttccctgagtctcagcaggtttgcattcacactgcttaagtaacttccagaacctggaagagtcgaaagagcacccctaggaaagagatgattccaaacagctttcattaacggcatgtaggcacaggtccctttcccaaaagtggattgttagtagtagttcattcaacctttgttaaggggtagctttccagartgtgacattgtcctcagaaagatagacataggcttaaacataatggacatcctaaataggaattttcagattgtttttgaagtgaaaagtgttttaatgtctttaaatggaattgcataactaatggtatttaagtrttttacatgttgctaataactttgaatatgattgttgcaattttatggaacctgggtctatgggactgctttttaagcagtttaaaaaaggttttcaaagtttaaaagccaatcttagcatgtataatccttatgggattcttaagttttatcctatcttgtttttgctcaagaacgctttatcagtgacgtttgttagaattttgttttttgttttttttttttaaattgtttttgggctagaaatgagtttctctagttttatttgttctccctgagttggagttatgcaatgaatggcatttttgtggtaaaatactaatcctaaaatctgttaactcactgttcatttaagtagggaatatctgtatacattaatgactaggtaaaacaggaaatacattttgaatatacagcctaaaggcaggcagttacagggtttttgatttctccgattttatagggtgcaagttcccagtggcaggatgccctgctgtgtgactgactacactgtgtcctgagcagtggtaatttcaatcacctctcatcagtttggccagccctayaaccaccattcctagccctgtgttgcttgacaggatacctgtgcttgaatggacataaggaaaagtccttactttctccccaatttacctctcaatcttagttcttccagaacacacttccctttcacaatgcaaataaactgaaagtgagatttgatacatggaattttgagaccaaccaactaaccttacacataatttgagggattcctggattcttctagtgatactgaaaagcacacttgactaaagcatagtgttttttgtttgttatggaaatacggtatacgttcatttaaaartaaatggacatacaaattgcatctccttaggagatacattttatatacatttcggtgcgtttttttccagtatggatttctatttgtttctctcttcctcttgttttttctgtgtcactcttgtatgtcctcatatctttcatacctcttgtgtagtctctagaagcagaacacctaagtcctgggtctggataatgaaaccctcagtctctggggcctctgaaaataaggaagcattggagctattgccatgttgagtartgggcttcctagaactattgtcatctatcctgccagtgttttatgttgtagctgtttttctttgacaggtgagttccagctatgttgttagtcatgatcctgccattattttctgtgttctgtaggatgtctccaggctacttaaacatattttatgagtttgcaataaaattgttgaatcttgtatgatcaagtcactcctctgctcagaaatccacagtgacttcttagtaagcccctacattatatgcatacttgtttttttcttaactttactcccacttctacctaacagggacctcaacttaagtctcttcagttcttcaaggcctggccttgttcctgattcctcaaaaaatcttgactctaaggcctattttattgtctgtctctgaatccctataaagcttcaagtctgtatgacattcttaacgccarattatatattgtcttgtactgttcctagctggtacatgtatattagtcttgtctccctcatgagaatgtaagctccttaagggcagggaccatgtcttaatttttgtatccaccacagtgcctagcacagtgcttggcacatgggtgctgaataaatacctttgtttattgatcagcaaagtattatctggtatttttaattatagagggattaaagtgtatgcatgcaagcttgagcctagttgctgaagcttgtggttgtctctgaaagtgggatagagggaaactgaacatgatcaagggcagtaatttggtggtcggaaaagcaaaggtgaccaccagctgttatggtcgtgatcagaccagttaagtccacagaccatcccagacaagttaaaaatgaaatgtgtctgacacttcgtcgtttgaaggaagaaccaggatattctctgaatagttattagcttgtcagtatctacatatgaaagctggtgaaccccaagagacttcttcaggagaaacagcagatttcagtctaccaatgggagaaatgtgagcagcatggcttgatgcatatataggacttaatttttccactctttggtcctcttagctttgaggctatagaatagctggatcattaggccagagattatggatgagttacctacagatttgttacctacctatgtgctttgttttgacagtactttttttttttttaagtttaaacctgtatttaacattgacagataaaaatcttcacttttggcttttcttgagaaaattggaagatctggcaataataggtctacatgacagccattgcctagaaatgattaggggctgcatgtagaggtggaatgtgctccatcaagaaataagtccacccatttacattacctaaattattgtaatcatttggaacatcggactcctaccttaagttactctggaaagcacactgggaaaaaggactgggatgtctttactcaaagtccataatttgagagttaacatttattatcccttgtagttttgggttgcctttctaaatatttcagggtaggaagtgaaaatttgtcagtttattcttaaacacaaatctgctgctggttcaacgtgcacattttcagtaatgcctggtcaccaaactgtcagcaactagaggaaaattatctccgacctggagcaaaggggaggttttttgtttttagactagctctctcacgaatcacgggaagggagatatttaacagggcgagtttcatggaaacgagcttcagaagatacccttcacatgagctgaagcttacggtgtattctctggaaatcacatttcctgtaagagcaaacagctacttggcattctccgtggtaaattagcaaatcatctaagaacttttaggagggtaaggaagaactagttataatcctacttttttctgctgcagttctgaatcttcactgaagtgtctgtgatggggttgcacagccatgtagagaacttgagagtctggctggaatggttgggggaaaggaaagataaaagacaattttaatttcattgaactccctcctttctctgcttgtattactggaggcgaccacatccgttggaggagtcattttctgagttaaattcatgtatatcagaattggttttcctttctgtaacacaagatgatcacaaaattatgatttggggacatctgaatgactaagatgactcaatttcttaatctgtaaattagagataatctaataaccagtatataccacataacttataagttgtttagaggattagacaatgcacgtttgcgcttctcattgattttacagaattaagtactttccttgaagagtgactgttatttggacagagaaggggaaaacgcgggtttactgaaaagaagtaatgctactagaacaaaacaatgggcggggcgcggtggctcacgcctataatcccagcactttgggaggccgaggcaggcggatcacctgaggtcgggagttcaagaccagcctgaccaacatggagaaaccctgtctctactaaaaatacaaaattagacgggccccggtggcgcacgcctgtaaccccagctacttgggaggctgaggcaggagaatcgcttgaacccaggaggcggaggttgcagtgtgagccgagatcgcgccattgcactccagcctgggcaacaagagcgaaactccatctcaaaaaaaaaaaataaaacaatgagaaaaacctcgttaaccaagactacagtcccacggaaccttacatcctgtgtttcccggttgtagctccgggccttttcctggttgtacctcaggccctgcttttcccacccccaggaagtgaaagccttcccaagcccccaaggcatgctgggagatgcagtccctttttctaaagactggggcggccgtgaggtcatcggtggtcgccgggagccgccagcacgtggcggcgaggaaggggcggtgtgctcctgttgtctgcacctgagagggggcaggagctctcggcgcttgcgcctcccgccgcggtgccctcccgacatgccggaggaggcgggcttcccgccggccaagagattccggccaggctctggacctccgagccgcgctgggtccttccctcccgggaggcaagtggtgatgctgctgactgcgggcagcggcggcagaggaggaggaggaggccggaggcagcagccgcccctggcccagccctcggccagtccctaccctgaagctgtggagctgcagcgccggagtctgcccatcttccaagcgcgggggcaactgttggcccagctccgaaacctggacaacgcggtcctcatcggtgagtggccgcgccggcgggctcttccttgcacttcgtccgtggcttagctagagcagtttttcttacatgcctctcaatccctttcgttcgtggcttcaacaaacctgaataccttttctgggccagacctggagaggggcctcgaagaagagtccggcagccctgccctggaggcgctggacagcccggtgagagtgaccaacgtgtgtaggcaaagactcaccttccgcgtaaaagggtagagaaacgtaccgggggcttgcggatcttagaagagtggatctgacccggtttgtgaggaggcggctggggaggtcgtgtgggagggagggcattctaggcaggggggaaagcccgtttgagagatgggaacctgaacacattccggtcgaaagggaaggtgtagtttctggtgcatgaaaagaggcagagttgtggggcagggactgatttcatggggcttatgatccccaacgtgttagaggagatactgaaggacggaaaggatgagcagccaaagagaggaaggagacccatgagtgctgctagtcaaaggaatagagagtgagcagatgcagcagtcaagtccggttatactggacttggatgtgatgcccactggatttggatgtgagctatttgtaagagttaaagaaaaaggaaagaaacacgaaacgcggctggcagttaaagacagcttttctttagttaaaacctgagaggcgctcctggccgatttcggtcaggagccctttctcttacagactaagagtatatattggtgttagggtgagggggcttatcacaagcttggaatgtttatatgtgtggagaagtttttggcagggttggactctttgggagcaggggatgttatcttggggcagacatttttccggcccgagggggtttatctcccggctggcatattcccggctggcatattcccggccagagtggggttatcccttaacatgtctctggtcggggaggagtttggaatgtttctggctggagatgttatttgtggtttatggtcgtgctgaccttagccattaggctgataccttttggatttaggcggttttttattaaggtgaacttttgaatgaggggcttgtccaagatggtgatgttcctgctttgtcaatccagaccctatagttataaaaaggaggagggacggcatgttctttctggctacttcctgcaacgaggggatggagagtttcctggtctcgggttgactaggagcaatgccgtctgtagatgtttttgggtagttgtttgtgaaattgccatgatcctgtcagttaaaaatctttgaaaaagattaattaggcagggtaagaacattagttccaggcatattattaggagagggcccaggaatgggatgacccatgctatgattttgttttcaaaccaagagtccatttggtggttttggtactcccttagctttttagccttttctttacgttttttagcagcgctttttactaggcccgattggttgatatagaaagaggcgtgagccaccgcacctggccccctcaaaacaattatttaaccttttaacgtaggtaaaaatgtgcattcttatccctcctgataatctttttaccgaaagtgtactttactttccttacacaccttgcacataaagtgtctcttcaatagttttaaatacatgttacactgttaacttttagcaacctttacctttgttgaaaaccttggtaagttcgggattttaattatgtgctaggtgtacagcctaggacttagacagaagtgcagttaaggtctggcttatttcagcatttagctccatgtgtcctaggttttacctagctgcaaagcaggcaagttctacagctaagagttatggtgacattttataaagcattcaggaggcctaatcacttttaaattgtaaaacatttcttgcatacatttcctctcataaaatttttcatgactttcacagactatctctgacactattgatcgtggatccatcccatcgagagctatttcaacaaagctgtgtgggtaacagctgatttgtcattgagctgagggctgaaagcagggggaagaggcttctgttttgaggaaaaaggagggaagctgagagaaactttatggatgctgctcgatttaggatggggttatgtgtggatgaatccacccatcctcataagttgaaaatatcctaagttggaaatgcatttaatatgcccagcctactttcagtgtgctcggaacatgtacattagcctatggttgggtgatattatctaacatgaaacctattttataataaagtcttgaatatttcatgcaatttattgaataccatactgaaagtgacagttgtgtgggtactcaaaagtacagtttctactgtacgattttgacttttgctccatcctgaagtcaaacagttctaagacagggaccatctgtattcagaggttgaggggaagaactcagtagggagggaggcagaagatagaatcgagctaacagagcaaagatcaggaggcatgggggacgggggaacttggccacaagggctagatgcagggctggtctggaagaggaggaaggctaagaggctgcagggctagagaacggatgtaaggatggtgcactgcagaagggcttctaggggcagttagggagagaccacattttagaaccccacttctgtgagacaggttcaggagccctgctcagaatgggagtcactgggcttcaagtgggcccttggggaggatggagacgagacaggctgcaaaaacaagaaaaaagatcgatggcagtagtggtgcctaggtgcatttcggctacactataaactcaggtttgcttctgcacagccagattataggtggaacatcccaaatttgaaaatccgaagtcaagaatgggctccaaggagcatttcctttgagtgtcatatcagatgctcaaaaagttttggatttgggagcatttaggacttcagattttcacatttaaaatgctcagccagtaagtataatgcaaatattacaaaacttgaaagaatccaaagttcaaaacacttctggttccaagcattttgtattttactttagcaacgctctgttgccctggtataggagcatgaaagatagagacatggatcaaagtttggggttttgcctagtggattcagcaggaagattgcagaataatcaaatcctttgtctgattcttatctgggtcaggaaggatgagcagtcagagggggctgacagactgacagggaaaaaaacccacaa

SEQ ID NO: 97993 - DNA, 14143 bp, Homo sapiens
aacttcctccttcgcaacatttcccctacactcatcttcctctactctcagttgttctacctggttgaggacttcttcctcctccacccgactggcggattctttgctaacagtctgcaaacgtcgtccaggctgatagatctgcaggtcgggtttctttgttcttttgataatttttagactacgatcctcttgtccagcagtcctaggaaaggattcttgtccccgattattttctgggtctataggaccattctgctcttggttgttcagttccttgcagacatctttaacgggctgtgtaccattttcaacagcagagcaatctcggtcattaacaatttcatctttgaattcctcactcccagggggttccttgattttgggcttgttccttagccgagaaaggccaggcttatagatttccagatctggacgcctgttatctttgcgcggcctggcctcctttaattccttcatgttttctgttatgtcggggaaagagtttgggagggaaaggtagaagataagaataaagaaggaagataggggaaagactgtcattctggttaagtaacaaaaaaagtcgagcaagaattacatatccaaatgctaatactggtaggcaaagaaggacatttctgtagaagcagaaattctgggtttacaacacttgttcaacaattcacaaggctaaggacctaactgtgttggggctacctacacttgggtaagtgaaatgggggaaacccatctccttatgtgtcatccaagtcatattcagaaatccaagatcccaaactacctcattattgtcagaacaaaagacctctctaaccttttcagcactacactgttctctatctatagagcctgtgaatccacctcagccttttcttccgcctctaactttttcctgggtggctaagttcttttaacataacagcaggaggaagaagtaaaaaaggagaaaaaggagggagggtattataacaattatcagtcctggacatctctggagaaaaaaaatgcaactttagtctttaaacttgaccaggatgattctcttcttcaagataccaattaccaaataacatacctgctggtgaattaaacagcaagcagttcttttcccattcttcaacttcacccatcctcaccaactcactaacagtagctcacagagttaccaaaatactgctcagactatcatactagaatactgacactaactgctactgtgatgatggaattattagaaaaaagttccataagggaactttccctggatgctgatggaaagattgtgacatactctcaaaatgccaacaactgggaactcaagaattaagaataatacaggactttagaaaccactctcggccgggcgcggtgggtcacgcctgtaatcccagcactttgggaggccgtggtgggtggatcacgaggtcaggagatcgagaccatcctggctaacacggtgaaaccccgtctcaacaaaaaatacaaaaaattagccgggcgtggtggtgggcgcctgtagtcccagctactcgggaagctgaggcaggagaatagcgtgaacccaggaggcggagcttgcagtacgcggagatcgcgccagtgcactccagcccagcggacagatacttacttaagtatctggttttttaaaaaagtatctgttaccgttatcaaaagtaaccactaaacattacaatggaaaagtgacagaattcgggagaatattatcaagtacacaaatggaatgctatataaaatcctagcataggccaggtgcagtagctcacgcctataatcccagcactttgggaggctgaggcgggaggactgcttgaggccaggagttcgagatcagcctgggcaacatggcaacaccctgtctctataacgtatacaaaaaatagccaggtgtggtggtgcaggtctgtaattccagctactcggaaggctgaggtgggaggatcacttgagcacaggagggggaggctacagtgagctgagatccctccactgcactccagcctggaagacagagtgagaccctgcctcaaaaaaattggccgggcacggtggctcacgcctgtaatcccagcactttgggaggccaaggcgggcggatcacgaggacaggagtccagaccatcctggccaacacggagaaaccccatcactacaaaaatacaaaaaattagccaggcgtggtggcacacgcctacagtcccagctactggggaggctgaggtaggagaatggcgtgaacccgggaggcggaggttgcagtgagcagagatcgcgccactgcactccagcctgggcgacagagctagactccgtctcaaaaaataataataacaacaataaaaaagtttttaatcctagtattgctctctaaatataaatggaaacaagcccaaaacaggaatcacatgctccagcaagtacatttactgtttgtaggtgtaaggaaaaggggaagaaaagagactgaggttttggatagtgcttcactattttcataagtttaaaaggtaggttcatgaagtatccacaaagataaagcagtttaacccaagaatagctcaccctcggcagtctgtaacttggtggggggcggggggatggggaaagctattcctactactttctagagcagcgggagaaaatagccttaataatccaattatgttaatcaacaaaaaccaatttcacagactggccgcaaacctagagaaggcacctatcacagctaccattctacacaactctattgcctaacgcaggagaggtgagacacttagaatctttcttactttcctgacgtggctggagacttgaaattaacttgcaaattgagcattctctctaataaaaactgctcccacacatgccagggccaaacccgagtagtctgaggtcccggatccctccagtggcgcagctttcggaagcctgtcttgggggggaaaagttcagcaacgaagtcgcaggctcttaaacctttctccccaattccttctctccgacgttaaagcggtggccggggcaggcccgcggagggcggcctggagagcgatacgcccggggcctccaccagaccccactcctttccgcgtctcccgatgcctgggaatccggggcgggtctgagagggctggggcaaaaggaacagtcaccttcgcggcgagaaagagggtggaggcaggaattcgggccaggctctcccggagctggccaggactggccgagcccgaccccgcactaacccgcgagagaggtagggcagcgagggtccgccgcggccccagcgcctactgctgggggaaggggcgggggctccggagccgagggccgagcggggaggaggcagaggaggaggagagggaggcggggcgggcaggcccggcccaggagctgggcggcgcgactcacctctgctcccggcctgcggggccagagtagccaggatcccgcgcagctccgacgcggagatccgcacacgctccagcccttccgccatcttcgcggctgctgctacagccgtagcggctccgccaccgccgcgcgcagccaggaaaccaccacagacgggcggcgcgcgcgctcgcccacctcccggcctttccccgccccctgccgccctccctttccgaacgacggtggccgcgctgggaggaaaagcgcccgccgccggttccagaggggcgggaccggagcgagagcctgggtggggcgggcgggggctgcgcgtgcgcagaggtgcggccggggaggcgcgcggaggctggagctggaggcgcggcgccggtgagctgaggtgaggcgaggccgggccgtgccaggccaggcgggcgtttgcggcggtggctgccgttgctgttgtcgtggacaccaaggacactgctagtctgggactcgggttgacagagacacccctcagcctgggctcctctggacaccttaggccaggctctcccgccacaggcccggcctagcgccgcgggccattacttgggaccttgaagatctgctaagagtagttgttactattcccttttttttttagttggagtctcgctctgttggagactcccgggctggagtgcagtggcgcgatctcggctcactgcaagctccgcctcccgggttcaagcttttctcccgcctcagcctctctactattcccatttctaagattaggaaactgaatcccagagaacggaagtaaattgcccagggtgacaccgtggatgaaaacctatcaaagcctttttcattacagcaagccacatccccaaaccctctttttttttttttttttttttcttaagacggagtctcgctctgtcgcccaggctggagtgcagtggcgcggtctcggctcactgcaacctctgcctcctggattcaagcgattctcctgcctcagcttccctagtagctgggattacaggtgcacgccaccaagcccggctaatttttgtattttttgtagagacggggtttcactaggctggtctcgaactcctgacctcaggtgatccacccgcgtcggcctcccacagtgctgggattacaggcgtgagccaccgcgcccggccgccccctgacttttaaaaactagatacgatatagttggaatcgtgtggaaggaagtacatcaggaggcatataagtccatttgggacctgtaatcccggcgactcggaacgctgagacgggcggatcgcttgaacccgggaggcggagactgcagtgagccgagatcgcgccactgcactccagcccgggagtctccaacagagcgagactccgcctcaaaaaaaaaaaaaagtcaatttgggaatttctgtgtcactatggattcttgaaaaaaattactgctgtggatctcaggttgactttttaatttcccatctttaaaattgaactataccagaaggctggtacttgaatctttttttggagaactgtacagaggtgaagctcccttccccaaggcctcctgcctccacctgttgcccctccacagccccataggcttttaccccacacccatcacagaatagttaccaattattccttagtctgagccgaagggattgccacaacctctgacagaactccttcagttccttttacgtgacactttgtcaccggaaggttaagcataagaagaaagtcagtagatgatgggtgaaaagatccaacagttcagaagaggaaccatttgagtggtcagagcagaagacagcctttgccaccagatttgagagaaataggaagaagcgttaaaaaataatctgtttcatattgaaatttgagaggccattgcatgatttcttttttcagctggaaaaataatggaaaacaagaaaactttcttaggacaaatggcaccacccatttaatgcaacagtgtcagtgaactgcagattagatatgccaaaagttaaaccagttcaagaaaatttaccagaactcagaaggaaaaggtaatagataaaaactgagagacaaagataggagacatggagaaggggtacaaaaaattaataattaaatacgagttccagaaggggataatacagctgactgcagaagagcaataatcaaatagtagaagaaaatttactacgttggtggaaatttttgaattatcagatttaaagaattcatgaaataccaggtaaaaagaaatgacaagaaagacaaccatatttaagtcagtatcacaatgaaagctgctgagattttttgtttttcgttttttttgagacggagtttcactcttgttgcccaggctggagtgcagtggcacaatcttggctcactgcaacctgcctcctggtttcaagcaattctcttgcctcagcctcctgagtagctggtattacaggcgcccaccaccatgcccagctaattttttgtatttttagtagagatggggtttcaccatgttgaccagtctggtctcgaactcctgacctcaggtgatccacccgcctcaacctcctaaagtgctgggattacaggcgtgagccaccgcgcccagccttgaattcagtttctaaaagtaaaaattgtacaagttggccgggcgcggtggctcacgcctgtaatcccagcactttgggaggccgaggtgggcagattgcctgagctcaggagttcccaaccagcttgggcaagatgaaaccccatctctactaaaatacaaaaaaattagctgggtgtggtggcgggcacctgtagtcccagctacttgggacgctcaggcaggagaactgcttgaacctgggaggcagaggttgcagcgagccgagattgctccactgcactccagcctgggcgacagagtgagactccgtcaaaaaaaaaaattgtacaggtcatatttacttagcacaaagtaataaaactagaagtgaatagccacaaatgaagcaaaacattctaaccatttggaatttttttaaaaacaacaattttaggccaggccccgtggctcatgcctgtaatcccagcactttgggaggccaaggtgggcagatcacttgaggtcaggagttcgagaccagcctggccaacatggcgaaaccccgtctytactaaaaatacaaaaactagccgggygtggtggtgggtgcctrtaatcccagctacttgggagactgaggcaggagaatcacttgaaccaaggaggtagaggctgcagtgagccgagatcacgccactgcactccagcctgggtgacagatagagactctgtctcaaaaataaaacaaaacaaacactttccacccatggacaccgccaagtctaagtcagagtctcctaaagagctcgtacagctgaagaagctcttcattggagggctgagctttgaaacaaccaatgagagcctgaggagccattctgagcaatggggaacactcgcggactgtgtggtaatgagagatccaaacaccaagcactccaggggctttggatttgccacatatgccactgaggaggaggtggatgcagccacgaatgcaaggccacacaaggtggatggaagagttgtggaaccaaagagagctgtctcaagagaagattctcaaagaccagatgcccacttaactatggaaaagatatttgttggtggcattaacgaagacactgaagaatatcacctaagtgattattttgaacagtatggaaaaactgaagtgattgaaatcatgactgaccaaggcagtggcaagaaaaggggctttgcctttgtaacctttgatgatcatgactccgtggataagactgtcattcagaaataccatactgtgaatggccacaactgtgaaattaggaaaggcctgtcaaagcaagagatggtgagtgcttcatccagccaaagaggtcaaagtacttctggaaactttggtggtggtcgtggaggtggtttcggtaggaatgacaactttggttgtgaaggaaatttcagtggtcatggtggctttggtggcagctgtggtggtggtggatatcgtgcagtggggatggctataatggatttggtaatgatggaagcaattttggaggtggaagctacaatgattttggcaattacaacaattagtcttcaatttttggacccatgaagggaggaaactttggaggcagaagctctggcccctatggtggtgcaggccaatactttaccaaaccacgaaaccaaggtggctatggcggttccagtagcagcagtagctatggcagtggcggaagattttaattaggcaacaaagcttagcatgagaggagagccagcgaagtgacagggaagctacaggttacaacagatttgtgaactaagccaagcacagtggtggcagggcctagctgctacaaagaagatatgttttagacaaatactcatgtgtatgggcaaaaaactcgaagactgtatttgtgactagttgtataacaggttgttttagtttctgttctgtggaaagtgtaaagcattccaacaaagggttttaatgtattttttttttttgcacccaagctgttgattgctaaatgtaatagtctgatcgtgacactgaataaatgtctttttwaaaaaaaaaaacaacaaaaaaaccaccaattttaaataattcatgggtcaaaaaagaaaacaagactaaaatattggattatttagaaattataataatgaaaatattgcataatggaatccatgatattaaagcacttctcagaggaaaaatcatataagtaaccttatatgctttctttttaaagtgaaaattagtaagctaagcattcaacaaatatagaagacaattaaaggaaaatggcagagtaaacaatcagaaataagggaaaaagagctgtactttaaatagattgaaaagctcattcttcagaaataaagcagatactaatatacacacatttctggcaaaaaataatttttaaaaaagggacatcctcttggatgtttcataaacaattcaaacttagctaatcaaatctgattttcctgtcaaatacttatttcttctcctgttttaaatctcaacaaattgtaccaccatttaagtcaaaacccaggagttactctttttaaagaaaaatttttggctgggcacggtggctcacacctgtaatcccagtactttgggaggccgaggtgggtggatcacaaggtcaagagatcaagactatcctggccaattagctgggcatggtggcacgctcctgtaatctcagctacttgggaggctgaggtaggagaatcacttgaacccaagaggcagaggttgcagtgagccaagatcgcaccactgcactccagcctggtgacagagtgagactccatctcaaaaaaataaaaatattggccgggtgtggtggctcatacctgtaatcccagcactttgggaggctgaggcaggtggatcatctgaggtcaggagttcgagaccagcctgaccaacatggtgaaaccctgtccctactaaatacaaaacattagccaggtgtggtgctacatgcctgtaatcccagctacttgggaggctgaggcaggagaatcgcttgaatccgggaggcggaggttgcagtgagctgagattgccccattgcactccagcctgggcaacaagagcgaaactccatctcaaaataataataataataataatttgtagaggcagggtttccctgtgttgcccaggctggtctcaaactccttgcctctggcaatcttcccaccttggccttccaaagtgttgggattacaggtgtgagccaccaggcctggcccaggatttattcttcacacttctctcccccattcaatccactatcaggatatgtctcttctgttcctataatgaacatgtatggaatcatctccccagcattctcccctttattttcacttggaaaatgccccttactcccactcaaaagtacttttttcttttctttgttttctttcctgtgtcactcctttattttgctattttcccctcaggtgcagagaattgagccagtcatactcgtttattcacactgtcattaacaagccctttctcattttatcttttctcttcattccagttcccactaatgttcctttcctccctccttaggtattcactctaatgtgtttgatatatgtctttgaatatacatgtatctttgaataatatgtaatgttttatgtatgtatgtgttttaaatgtacctaattgatactgtgttacagatctcattctgtttctttttcatgtttatgtaaatacttctgactattgcacactgttatcttcagtgacctcataccctggccactggtcctgggccaagatgggccagagtccttacccagaatttttttaactgaaactgagaaagaaaattccccttcagtgtggaagccataaaatgtaaaacatacgagctgtcagcagccacgtgtcagttggttccatatggaaccaactcgcctgtgtgaaaaagaagccgacgtgcagaaagcagcagaggtgagagactaagagtctgggaagctgtcaaatctctggttccagtagttcctgaagctccatattcctccccttaccatggtttgttcatttcttcatggattccatgagctagtaaatctcaacaccttgtgcctactaaggtagtacaaattgaggttctatcacttgcaactaagaggactaactgtttacaacctccaaaatatatcttatttttgatagtgggttttttgtattctgggttttgttgttgagagacagggtctacatgtaggaatggaatcggtagatcataggatgattctatgttcaattttttgaggaagcaccatactgtttactgtagaattaccactacaggcgcctgccacctgcacggctaatttttgtatttttggtagagatagggtttcaacgtgttgcccaggctggtcttaaattcctgagctcaagcagtccgcccacctaaagtgctgggattacaggtatgagccactgcatcctgccaagggggcataattgacatttattcataaaaatattgagacttcaggcctggcatggttttttgggatttttggttgttgttttttttttgagacagagtctcactctgtcgcccaggctggagtgcagtggaacattctcggcttactgcaacctttgccttccaggttcaagcgatttttctgcctcagcctccctagtagctgggactacaggcaaatgccactactcctggctaatttttttgtttgtttgtttgagacagagtcttgctctgtcacccaggctggagtgcagtggcatgatcttggctcactgcaaactccgcctcccgggttcatgccattctcctgcctcagcctcccgagtagctgggactacaggtgcccgccaccatgcccggctaattttttgtatttttagtagagacagggtttcaccatgttagccaggatggtctcgatctcctgaccttgtgatcttcccacctcagcctcccaaagtgctgggattacaggcgtgacccaccacgcccggccaatttttgtttttttaatggagacgggattttactatgttagtcagtctggtctcaaactcctgaactcctgatctcaagtgatccacttgctttggcctccaaaagtgctgggattacaggcaagagccaccacgcccagccaactattttttgttctcttgtttttttgtttttaagagacagggtcttgctcttgcagtggtacaataactcactgcagccttgaactcctgggtttaagcaatcctcctgccactgtgcccagccgagggggcataattgacattaaaaaatattgagttttcgggcccgtcatggtggctcacgcctgtaatcccagcactttgggaggccaaggtgggtggatcacttgagctcagaaggtcaagaccagcctgggcaacatggcaaaaccttgtctctacaaaaaatacagacgttttttgtatttgtggtggcacagtgcacctgtggtcccagctactcaggaggctgaggtgagaggattgcctgagcctgggaggcagaggttgcagtgagctgagatcatgccaatgcactccagcctggacgacaagagaccccgtctcagtaaataaataatgcctccaattcatttatacatctttacaatggaatttctggcaactttgataaagtaattctagttcacctgaaagaattgatatgtgagaaaagccaatgaattttagagcaatcaagggagaatttattaatacagtatataataggaaaagacattggcagtctggccaatggaacaaaatacaatagccccaaccattcatagaaatttaatttttgataaatagagcatttcagaggaaaaggattctgtcagtaaatggtgtgttaagaaggctgggtgtggtgcctcatgcctgtaatcccagcactttggaaggccaaggcggaaggatcacttgagctcaggggtttgagaccagcctgggcaacacagcaagacttcctctctactaaaataaaaatttaaaaaattagctgggtatggtggtgcacagtcatagtcccaggtacttgggaggctgaggcgggaagatcacttgagctcaagagtttgaagctgcagggagccataattgagccactgtacaccagcctggacaacagagtgagaccttatctaaaaaaaaaaaaaaaagactgagaaaagaacaagtggccaagatacacaaaaaaatgttcaatcactagtaattaatgtaaattaaaactactagacattgccaggcacagtggctcacacctgtaatctcagcactttgggagtctgaggcaggtggatcacgaagtcaggagatcgagaccatcctggctaacacagtgaaaccctgtctctactaaaaatacaaaaaattagcctggcgtggtggcacacaccggtagtcccagctactcgggaggctgaggcaggagaatcacttgaacctgggaggtggaggttgcagtgagccaagatcccaccactgcactccagcctgggcaacagagcaagactccgtctcaaagaaacaacaactactagacataactaaattgacataaaaatgatataggacggatgaaggaaaagaggcatcattccatcaaaactgttgttgggagtacaaattgatgtaatataggacccttctggagatcagtttggcagtgggtatcagatttcttagaaatatgtatgccttttgatacaaaataccatttggtgaaatctaccctaaggactgacggaggtacacaaaaatcttgcaacaaggctattcattacatcattcttacagccaacaacaacaaaaggaaatccaaatgttcatttgagctatgtaaacttaaaattattattttttctttttcaagagatagggtcctgcttacgttgcccaggccacagtacagtggctattcatagacgtgataataacacactcccgggctcaagcaagcctcccgccttagcctcccaagtagccgggactaccagtgtgtgtcactgcccccagctaaattattgtatttttgtaaaagaagtactattaagtcattttaaaagttggataaagccgggcgcagtggctcacgcctgtaatcccagcactttgggaggctgagccaggtggattgcctgaagtcaggagttcgagactagcctggccaacatggtgaaaccctgtctccactaaaaataaaaaaattagctgggtgtggtggcaggcgcctgtaatcccagctactagggaggctagggcaggagaatcgcttgaacctgggaggcagaggttgcagtgagctgagatggcgccaccgcactccagcctggcggcagagcaagactctctcaaaaaaaaaaaaaaagttggataaatgggccgggcgtggtggctcacgcctgtaataccagcactttgggaggccgaggcgggcggatcacctaagatcaggagttcaagaccagcctggccaacatggtgaaaccccgcctctacgaaaaatataaaaattagctgggtgtggtggtgggcgcctgtaatgccagcaactcaggaggttgaggcaggagaattgcttgaacccaggaggcagaggttgcagtgagccacagtcatgccactgcacttcagtctgggtgacagtgaaactccatctcaaaaaaacaacaaaaaaaaaatgttgataaatgtactcacctatgagattcattgatattcataatactgtctgacaaaaaaagaagttaccaaacctaccaaagagttttgtctgcatatgtagttgggcctggaaaggtaaaccactggatagcaactgtctttaggtaggaaggtttcgtggctattttcatgttctttttgtatctctgtattttcagattaactcagttttctaatgaatatagattcttttgtaataaggaaaaatagagaaacttcatatttaactgctacaatagacacagtggaaagtggaagcttaatgtagttat

SEQ ID NO: 97994 - DNA, 55586 bp, Homo sapiens
ttgtttaaagtgtgtagcacctcctgccttgctctcgttactgcgctggccgtgtgacatgacttgctccccctccaccttctgccatgattgtaagtttcttgaggacacccccagaagctgagcagatgccaacaccatgcttcctgtacagtctgcaggaccatgacccaattaaatctcttttctttataaattatgcagtctctggtacttctttatagccatgcgagaatggcctaatacatagccttacctcctaatatccaaaattaattcactggctttagtcactcacctccagaacagatataatcatctacttcttcactcttctacttctgctattctacccaaaccccctaaaatttccaaacattatatacttcaattgagtactggctcctttgggaagaagtatttgctaattaaccttagtatttccccttcattcaagtcctgtaacgtgagtctgcaccacagtctagaacttaattacatatgaccatttcccgtatgtatgtcctgccttcccatattaaatgttagctcttcaggagcagaaaaaatgtgtttttcttcttttgcatcacagtgacacagctctgagccaagtttttaaaaacgtattgactgaatttagatttgttgatagacttgttgactaaccgaattcgagcagccacatcacggggcgtgtccacttcatctggaaacatctcttccagtctttcttgtttatatttctccaacatttttgcctcagcttcttcatctactttcttatcatacagatcatcatgcacagactccccaatagtcatagtttcatattcttcctcttcttcactactctcatcctgtagaataggattacagttttttcagaagaaatccacacctgtctctaccccaaaggccaataagctaagagtaaaataattgtactagatccctattcccaaccaacataaattctaatacagtctaaagtataaaacaaaagcctcattcctggcaactacagagtcattcctaagaaactaaccatacacggccgggtgcggtggctcacgcctgtaatcccagcactttgggaggccaaggcaggcggatcatgaggtcaggagattgagaccatcctggctaacacagtgaaaccccgtctctactaaaaatacaaaaaaattagccaggcatggtggtgggcgcctgtagtcccagctactcaggaggctgaggcaggagaatggcgtgaacccaggagggagagcttgcagtgagcccagatcgcaccactgcactccagcctgagcaacagagcaagactccgtctcataaaaaaaaaataaaaaaaataaaaaaaagaaactaaccacacacacccatcaagatcacacctgcactttgccttacatttggagctagacacagaattggcctaaggcctcatttccttacctgagattcctcctccataaaatcctcatgttccatatcatcatattcatattcatctccttccccaccactttggctgccaccatccaaaatccattcagcttggtaactggatgttcctttggggaccttctttaccaccttagaactttccttcaagaaatctgtaaaagcccaaacaaattaagtaaattacagacttcttttccctatccctctggttattctcacctaggcaaggcaccagatactgctgccaacatgggaaattctggcagacactgtaaatagaactacttccaaatttaattcagctgcctcacaactagcaatacttacacagctaaataagccctgcaatgaatccaaagttgtttatctgttcatgataaaacattaacacaagtaattttgagaaatggaacaagactgtgtataatgtttgtttattgaaaacatacagcatttgagggtgaggagagactttcaactatacccccaccccactctatcctatagggccctcacttggaacagctacagaaaatccacaattccaggtcagatgaattacagacaagtttaccaatactgaccctttgcctcgctcagctcctcctcagtgggccaggtttgctctccctccattggatctgggataacctctgcttgcaaggattcctgtctaccagggtctgccttcattaggactttaagaccttcttccatatcatctacagcatccgtagcacaaatctgaaaaccaaaagcaggtgatagtcaaccatgaaccaaaaatctcctaaatctaacacagtaaccagaaagacccagaaatatcagtcctcatgtataagatgagtgcgacagaatgctaaaacttgtcaaaacttttccaatggctgttttctaatttccagggtattttaagtctctgcttggctcttgaggtctttcttaatctgctcccactcctatccatttattacgtacctcactcccatcaagctgatttcttcaaggttcacataaaccctttgatccaccactgtgcctaggttcattctgtctcttatcttctaggatattcttttatccctcttcaactcataaatcacatttatccttctcaacacctagctcaagtctgatctcttatgtgaagcttgctagtctactttctcaacttccactgctggtccgcactctaaccatatgctatctcaatctttatttcacacatgccattttgttccagcccaattaagtcccttgaggaaagcaaccacatcttgagtgtgttctataaactcagagccaatcacagtgcagactacctagaaagtgctggataaatatgtgatttatcaacctatttataactgactattgccttacttcagactagcagtctcctcattcacctaagtgtacagactatcttctctgaatttaagtttccttcctgtgccaactttcatatgaacatgaattaagaatatcagtcttacctccattgccatgtctgggtccttttggggtttaattcctctaggatttaaagggaaagggtctccgggggcatctatctgtttcatctggaaatcaccatatccaacgatatgcagcaacctattgacattcagagtctgccctcgaacatagcctgaaattttcaaggtgcccaccaagttattctcttcactaggaacaaaatcaacagcatgggcaaataggtaggcccgccgatctcgaaaagcaagatgctgttgcttctggttagccaactgcctaagcagcatccctgcctcctgttgagtgtctaacaagaggagtttgtcatgcggaaagcgcttctccactgctttacttagcttcttcctggtatctatttgtttcttcagtgggaggccagaaatcccctggacagctagtgctgtaagcgaaagagaaaacgcttcatgacctactgcttcattacataaaaatccctctgcagttcacaaacaacctaatagctcagttgcaagcccagagatcactgggaagcccaacactgaactaccctgaaggaatttcacagtgaaatcaaacttcatatccttgtttctctgggcaaaggacagccaaaaacaaaaagacaccctgagtgataatctgtaaacaatggatcaagtttaatccatatgtgtacatcccaccaccagctgaatatgatccatcagttgtattcctgtatcaaataccaggcatagtgcctgacaaattaaaggtgcacaataaatgctaactcacttactataggtcggaaggccctgagcaaagaggcaggaaagacagtaatcaccggtgctgtcccagccttctagtggatcaaggaggaacaggatggtatcagctactttagccatgtctaacacaacgtgcagatcccctgcagatagaagacacagtaagaagaggtggttggcaccagcacattattctaaaaaaaaaaaaaaaaaataccactactcaaacataatacaaaatattggtgtatactctaacctggccttgctgaggtgaaaaaccaccgatgtttcaagcgggggcacagcagcataaagttctgggtgtttcccaattcattcaagtgtactgttccagtgtccctatcttgaagcagctgcatggcctctggcagggaaattctgctgtgcaggggcaccaccagtacctgatgaggagggccatccttgccacccagctgtctcttctctgccagaacctgaaaatagaaagatatccgagaacatctcagtgtctcagtacttcactccagcattgcatttccactcccacagatgctccccctacccaaaaccagcatctctctagtaaaagaccacaggtatgccagcggggtggcaggaattctgaccaaagcaaagaatgctagacctgcacgctcgacacgtgctctagggctatgctctgtccctggaccctcctcccggtctcattttccacttcgaggcattagccacctagaacaccagagaagccgcattctcccaaatcccgctcctctcaccgcctccttcttctgctttcggagctggctggcgcgatgcctctggtcgactctgctgagttcttttctcaccttcttgcttagggttttcagtgccagacggcctgaatggcagattagaaggggctggtgtgatcggccccacaaggtcaagaaaagggactcctctccgcccaccttagaaagggcctttcgcgtggagcccagacgggagacagaagctcagtctgggcatgaggaaaaagagttaataacggccaaatagcccttattccttctacgttatctccttacccttgccgtcccgctgtgcagatccccgaccccgatgccgtccgcctttatgagctttattctgctgcttgagcgggccggggcggtgggccgccatgccgcagcgcgcgtgtacggagtcagcactgcttccgggccaggacaagcgcttccggtcccctccaagggggcgggccctccagggagcgggactccctgcgccctctcgcgaaggtcttttccagcagctcgtgagagcgccgtgttagcgggttcgccaagccgcgctgggaacttttcccacttcgcagtgtgtggttgggggcttgaaggcgccggatgtagactgtcgaggctcgggctgttggtctagcagggctgtttgtaccccttgcattgtcatttttttgcgctataaagctgcatcacgtagaagcatgttgactggaaggctccattcgtgccgaaaaggcctaagcccttcctgtcacctagattcgggcacgttgctcttccgtttgcaacggcatgttctttatcactctgagcaacctttcttctccctcgattccctagcgaggcttgggaatcgcgtggaagacacttctctcaccttgcccggttccgtaccagctcaagcccgtccctgttactccaacctgcgccccgcctcccacggagcggccgggaaggaccttgtgggacgtggcgacccggcaagggggactggccgcgaccctccggccgtcgggctcgggcggctgcgctcccactaatcttcccagaaacttgacaactgcacggcgacggccggacggggattcagaggggtcacggggccaggctgcaccggcttcgccgtgggcaggctcggaccgcaggggaccccatgcccgagccccggccctttccgtcccgtcgggagagggagcaggcagaagtcaggggagcttcagcgggaccgaggctcgctctcagccgcggggccgcgggctccagggccagcgctcacaatgcggcttcgcgccctccatgcgggagcgggtgcgttgccatgacagcgacccccgtggcgcgcgcccgggtctgccgcccctaggcgcgcacggcctctccccgccccgatcccccgtcgctgtgcgcaacccccctccggctgtgggaaggggccgggcctgccgcctgacgtctgtgcggggctcggaagatggctgcggagccgagcaccgggcagtggctgcggcggcggcggcggcggcgggccgggagcgcggcgggcgggggctccgccttgcgcgtggggcgctgagccgagaggcgcggaggcggcgagggcgcgggggctctgaggaccgctcggcgccgcctcctgccacaccatgggcagcgcagaggacgcagtcaaagagaaactgctgtggaacgtgaagaaggaggtaaagtcgagtcaagaaccccggggggctcgcgccctggcccgcgcggcccagggggcagaaaggtccgcgcccaccccccggcgcgggcacccgggccgaacctgggccgggcggggcgggtcctggacgggctgcgcctccttcccctttctcggatgggggagggcagcgcccctctgcccgggggacccggccggcgctcccggcttgtttgcttcgcagccccgcagctccccgcccagtgacggcagcggcgctgggagcccaargccgggggaggggtggcggcgatggcggggatggctggatccggagctgcccattcagtgcccgcgccgccaggggagggggcggggccccgcgcgagctcccgcggcgcaggtgggtgtcgtgcgggccgagcttccccacgtcctaagtgggtgtcgtgcgggctgagctcccccttgtccgacgtccgctgtgcctccagctacggagtgatcgctgccggaggggtgcgccgcacacctcagtttctccctccacgcccacctccttagccagggaccaggggcttgtttggaatggtttttaacactcggaagtttttcccttttgagggaagcccccctacttcagaaagagaagtagtccttccctctactaactccgtttaccttgaccctgcccaaaagcccatttccatttcgggtggggggcagtgaccatgtgaatgactcactcccatatgagagctggagagctccaacccacagcgcagcttagaatacattgggcctccttcccctgcctgcctctgtggctgttgtctgcctggtaagtaaactccaccagggcaggagaccctctgttttgtccactgccttgtatccagtgcctggcatactgtaggcactccgtgactgtttggtaaataaatgtgctgattttggagacttcgaggcctggtgtttggaaagcatacattttggaatagtctggacctarttctgtgtgaccttgagtctctatgccgtctccctaatatatatatatataacctcacgcctgtaatcccagcacgttgggaggcctaggtgggtggatcacctgagctcaggagttcgagatcagcctggccaatatagtgaaaccccgtctctactaaaaataccaaaataagccaggggtggtggtgcgtgcctgtaatcccagctacccgggagactgaggcaggagaatcgctggaacctgggaggtggagattgcagtgagccgatattgtgccactgcactccagcctgggcgacagagtgagactccgtctcaaaaaaaaaaaagtttaccttagctgagccgtaattagagtttcagggttggggaagcgtctggrctctcataacatcctggaaagtggacaggcgcggtggcttacgcctgtaatcccagcactttgggaggctgaggcgggtagatcacgaggtcaggagttccagaccagcctggccaagatggtgaaaccccatctctactgaaaaaaacaaaaaatacaaaaattagccaggcacagtggtgggcacctgtaatcccagctactcgggaggctgtggcaggagaatcgcttgaacccaggaggtgtggttgcagtgagccaagatcgaaccactgcagtctagcctgggcgacagagcaactctccgtctaaaaaagaaagctgggcatggtggctcacgactgtaatcctagcactttgggaggctgggacgggcggatcacgaggtcaggagatcgagaccatcctggctaacacggtgaaacctctctctacaaaaaattagctgggcgtggtggcgggcgaatgtagtcccagctacttgggaggcaggagaatggcatgaacccgggaggcagagcttgcagtgagcccagatcgtgccactgcactccagcctgggcgacagagcaacactccatctcaaaaaaaaaaaaaaaaaaagtcccggaaatctctagatggttctcatgcgttagccatggcctggctactaggccctaatgtttgttcccacccctccccttggtaaagatgtagttgaagccatcagctttcccgcttgtgggagaagcttcattatgtctttgctgtgaagaggcccaaaaaaggatttcttaggccaggggtgtatcaagtcagcatttaagcccaattctgctctccccaatgaaaagagaaatcttgattctcctgcaaaaggaagcagtctagtgacagagacttgaacagtgtaaacaaaatagaaaagtacttgtgtctacacttgaggtggatatgctgggattatagatatggctcaattttggaggttagtcacagataatgggaaatacttttttttttttttggagacggagtcttgctctgtcgccaggctggagtgcagtggtgcgatctcagctcactgcaacctccagctcctgggttcaagcgatttccctgcctcagcctcccaagtagctgggactacaggcacatgccaccacacccagctaattttttgtattttagtagagatggggtttcaccatgttggccaggatagtctygatctcctgacctcgccttggcctcccaaggtgctgggattacaggcatgagccactgcgaccgccaggaaatattttttaagaggatgatgactttttccaccagtgcttagaaactggactatactgctccaaaagtgattcctaagaaaatgtgagaaatgtcagaatatgccacagctacgtatcattcctgacaaaagttgacctgctctgaactcatgtttctcctttcctccttcagtgtttgatttctttttttttttttgagatggagtctcgctctgttgcccaggctggagtgccgtggcgccatctcagctcactgcaagctccgcctcccgggttcacgcctttctcctgcctcagccttctgagtagctgggactacaggcgcctgccaccacgcccggctaattttttgtatttttagtagagacggggtttcaccatgttagccaggatggtctcgatctcctgacctcgtgatccgcccaccttggcctcccaaagtgctgggattatagtcgtgagccaccacgcctggcccagtgtttaatttctacagaaacatcctgtcccttctgcaaggaaaaacaacaggaatattggtagaccaggctggcctttcacaaaggaccactggtataattctaggggtatctgcagatccttcaacccaaaaatcctccccatcagcctgcttcagatgcctccaggtctttagctgtgacattatcctctgttgaatgctaacatccttgggaggtaatctaggaagttttttttgtttgtttgtttgtttttttgagatagagtttcactcttgttgcccaggctggagtgcgatctcagctcactgcaacctctgcctccgggttcaagtgattcttctgcctcagcctcttgagtagctgggattactggcacccaccaccatgcttggctaatttttgtatttttagtagaaatggggtttcaccattttggtcagcctgatcctcccaaagtgctgggattacaggcgtgagccaccatgcccagccgtctaggaagcttttaacagcttagagtgcatttgcattaattgatctgatccccttttacctgagcactaaccattagcagtttccggcagggaggggcctccaggtccttcttcccgcctccccaggcttttgaggttctaccaccctccaaactatacagtcttgactaagggtcttgggaacctggacagcatcagaacattacattcctgtctaaagaatggggaagactagctctacccaaggctcactttatgtgtaacattctgcactaggtaatctctataatctccagtactaggactgcctgctagcaggttctcccaggacatcaacagagtttgggttaaatgttgggaaccaccagaacctcatacatgggagtgtaaagtggtataaccaactttggagaacaatttggcaatatctaataaagtgtgtgcatcagacattccttgcctagaaacataaatcccaaacatttgttcaccagaagacagtcctcaatgttcacagcagcagtatccataacagccccaaactggaaaccacccaaacgccgggtgtttgtacgttcacaccacggagagtgaacarcctacaactgtacacaacgcgcacggagaatgaacaatctacagctatacacaacatgaacaaatttcagaatgacacaggtgagcaaaagaaactagtcacaaaacactacacgctgagtgattccacttataaaaagtataaaaacccaggccgggtgtggtggcggctcacacctgtaatcccagcactttgggaggccaacgcgggtggatcaccgaggtcaggagttcaagaccagcctggccaacatggagaaaccccgtctctactaaaaatacaaaaaaaaaaaaaaaagccaggtgtggtggtgcatgcctgtaatcccggctactgtggaggctgaggcaggagaatctcttgaacccgggagttggaggttgcagtgagctgagaacgcgccacttcactccagcctgggcaaaagagcgaaactccatttcagaaacaaacaaacaaaaaaagtataaaaacccacaaaactgtcgtgttggaatcaggagagtgggtacccttagggggaatagtgactagaagggaaggtgatgaggcgagggtgttggtcacatgttctgtttcttgctctagttgctgatttcacaggagtgttcagtttgtgaaaattcaccacgctgtgtaattgtgatatgttcttttatatgtttactgcacatcagttaaaaagatttctttttaagtgctttcttaaagaaatgactgagcacagtggctcacgcctgtaatcccagcactttgggaggccgggcgggtggatcacctgaggtcaggcgttcaagaccagcctgaccaatatggtgaaaccccatcgttactaaaaatacaaaaattagcagggcgtggtggcatgcacctgttgtcccagctactcgggaggctgaggcaggagaatcgcttgaacccgggaggcagaggctgcagtgagccgagatcacgccactgtactccagcctgggcaacagagcgagactccatctcaaaaaaaaatgactgtttaccttacaaggtatttgggaacttttacatccaggtgggaaccccaaacatcagagttctagaccctagatggaaagaaggctgggcttttgagcatgtagagggtgtccctgaggtatgagacctacccctaaccttggagaatagggagaaaaggaggaggggcaggttgtttatctgcaggctgtaccgagatggtttgtctctaaaggacagtatatctgcccagaagcccttcgtgagctgagaacagatgagcaaacagcatcctattcctgttctccaaggcagggcacttccacctgggctggaacatgcactgattgtttgatgggtttttggcatctctttccctggtttcccctccaaaagactggaatcagactgtgctgaagaaactttgcttccccacacctttcatccctgtcatctctgcaagtgtctgaaagtgcccttcagaccagaagggcggaaccaaactatttatttgcccagaggtctttgataagggaaaataataaaagcagtgatgctgtccatgtgtccgcaggtgaagcaaatcatggaggaggctgtcaccaggaagtttgtgcatgaagacagcagccacatcattgctttatgtggtgagtgagtgactgaaggatgatgggaggtcggtctagagccgaggacactggcctggggccaggaaaagatgagtcctcaggtgcagkagctctcaaatctggctgcaagtccaaatcaacctggaagcttttgaaatcctctttggccccatttgcagacctactaaatcaggttcttcaggggtcaagaatctgcgtattttttgttccccaggatagtaattctcacattttagcatgtatcagagtcacctgaagggcttggtagaacacagatttctgggtcccaaccctggagtttctgattctagtaggtctggggaccccactttgagagccgctgccctaggtcatttgagttcaggaaccagtgctctgactgattttgattttgacttcagggaggggtttgtgcttttcggatgctctgtgccactttccctttgtttcccacccgtgttgctccatgatcctaaccccaagcccttgactggatgcaaaggagcctgagcgtgggctaggagaggtggctaaggcttccagcctcagaagggactctctcatcacctccttctcagtgtggccaagccttccagccccagaaaggagagagtcgcttataaaccatttccgcctcctcagcctgaagacttttgctttgtaggagcaagcctatccctaygcacagactcttcttggatttctaggaatttcagcttcctctcaaccccccatctgaagggacagggaaccattcaccttctctgtgttgtattccttggcctctgagattggtgttggggtttgtggagggaaaataatgaaagaacagataagggaagggatgctttggacggtagtgtggcacagcagatacagctgcccttcccctcatccagcagcagatccccaccaagggctcaccaggtgccagacaccgttcaccgtgcaaggaaatggcagtgacaagatggacagagtctctgccgcaggagcttacattctgttggggagacagacaggaaacaaatgcgcaagtaaatatgtcatccaataacttggcaygtgataagagctaggaagaaaaaacatgtgggagggcagtcggagaggcagcctctgagcagagtctgagtgacagactggggtttgaatcctggcgtcctgccttttaagtcgtcttggacaagtttcttaacttctctcaccctcagtttgctcctctaaaaacagactgatgattcccacctcaaggaactttcgtggggattgagatgatgtgtgtaaatgttcattcgttcgtagcattgtaagcactcaaagaatattcgtctctcctcctttggctgttgaggctgaaggtaggtttgtaggacttgagttcataccatgtccgtttgggaaggtttccccagttctttgagatggtggaataatgattcctaggtttacaagacacagcctgacctcagtttttctcagcagaacctatgctctggaaaaaaaaaaggcatgccagtattatgataagcaactttgaagagtattagaattctcggccgggcacagtggctcacgcctgtaatcccagcactttgggaggtgaggcaggtggatcacctgaggtcaggagttcgagaccagcctggccaacttggtgaaaccccgtctctactaaaaatacaaaaattagcagggcgtggtggcgggcgcctgtaatcccagcactttgggaggtggaggtgggcggatcacgaggtcaggagatcgagaccatcctggctaacacggtgaaaccccgtctctactaaaaatacaaaaaattagccaggcgtggtggcgggcgcctgtagtcccagctactcaggaggctgaggcaggagaatggcgtgaacccgggaggcggagcttgcagtgagccaagatcgcgccactgcactccagcctgggtgacagagcgagactctgtctcaaaaaaaaaaaaaaaaaaaaattcctactttttaaatactgacagctaattcccatttaaaaaaaaattgtgtgggccacacaaaagacatctgccagcctctgccagtgtgcagcctctgttttgggttcggtacagtcacggagaacaggagcaggagaggttccaacagtatcgggctaagtcaggccagggtatctcagggcctacagacagagaaatccttatgctttgtcaaaattggtgctcagtggtgagctaaatcccaatttgggctgaaactgaggctcgttgaaagcattgattatcaacctttttcctctgcctgcaaagcagcttccttgcattgcatggtggaatcacgagagactcttgcgggggacggggagggaagactagcaaggtatggatcaaaaacaccacccctctctgcctttttggagattctgatgtgccagtctccctcagtccctggaaaaatgctctgaaatgcatttttagtctgaagttgatccagacttaaactgtgccttgctactgtcctagccacgtccgaattcagctttgttgtgggagaaatgggagtatagagaacgtgctgagaggtcaagagcagagtgaagtctgtggagactggattaccagcctagcgacaccacggtccctagtttcaagggacccttgtgtactgggcccctcaactccacaccgacccatggttcttggcagaggagggttgggggtgactgaggagagccaggcctaggcaatacaagcttctctgagcttcttagaatgcagacatttaaacagaaaacacagagccttcctggagagccttcctgaagaatcactgtgtcaagacctgaccatgggcaaacccaggaaagtttgcagccagatccccattcctgttacccaacgggaggggcaagactcctaggactggctagaaaattgctttgttgagtgtttgctgtggttgttcctaaacctgtctgtccagaagctggabatgcagtaggcccctgcgagtagaaactttccttgtgtggaagttttcgctggcaaaccagtctggcggcagcaggggggtgggtggggttctctgtgtgctgttcccaggcccgaggatcagaacctatgtaactgccacctccgtgccagtggagggtggcgctaggagaatggactcaaaactaccactatggggccaggcatggtgactcacacctgcaatcccagtgctctgggaggctgaggcgggaggatcccttgagaccagaagcttgagaccagcctgggcaatattacaggatgcagtctctacaaaaaaataaataactcgctgggcatggtggtgcacgcctgtagtcccagctactccagaggctgaggtaggaggatcacttgagcccgggaggttgaggctgcagtgagctatgattgcaccactgccctccagcttgggcaacagagagagagagagaccctgtctcgtttgtttgtttatttatttatttatttagagacggagtctcactctgctgcccaggctggagttctgtggtgctatctcagctcactgcaacctccgcctctcaggttcaagcaattctcctgcctyagcctcctgagtagctgggattacaggtgcctgccaccacacctagctaatttttgtatttttagtagagacaggggtttcaccatgttggccaggctggtctcgaactcctgacctcaggtgatctgcccaccttggcctcccaaagtgctgggattacaggtgtgaaccatcacacccggcctcattttttttttttttttttaaacaaaatccaaaaactaccactgttggggagaggtctttgatatatccttttatcctttttatcttaaaacatcacatcaagtttacatttttctctatcatatggtttttggattttttttcattttaatataaagacttactgttgaattaaagtataggctggtatctcctgtcgccccctcccctggaggggaaggtgcttttgttttttctttttttttttttccagatgaggtcttgctatgttgccaagattggtctcaaactcgtgggctccaggtatgctcctgccttggcatcccaagtaactgggattacaggtgcataccaccgcccgaggtccatagtgttttatttaccctattccgattgggcactgagtttgcattttaacctttggctggtagagcaggtttcagaggctcacagagaggcttctggccaggcagagcaggttctcaggccaatcatatctcccaggacctcagcctccccaccccccagggattggggcagacaccagcctgcctcctcagtcaccagattccctgccctgctgtgtgcaagtgggtcaacatgagggttgcttcagactgaggatgagctgtaattcgagaagggtggaatctgtggagccgggaataacatcaggctttattaaccagctccctgttgctaggcagctttcattagccaggaaggtctgccctgcagtgagctccttcagggaatggcaaggagatgctaataagctgggagagaagccggtgctagggaaggcttgcctctcccctgggatattgcagccagcgatatttcagcacattctgagatttggactccaggcagtcttcagcctgtctcttttcagtaaaagggattcctggaggctgaggtgggaggatcccttgcaggagttcgagaccagcctgagcaaaaaagaccccatcgccacaaaaaggaggagcgggttcctcctccttcccacccacagggaatgaatagctcattctcttgctatctaactcgtgccttccatctagaaatgatctaagaggaaggagggagctctgaaggagctgactcccctcactctatcttggggcattgcggagggcatatggggatgttcatagctgggactttggggtcacacagacctgggttcacatcctggctgtgccacgaagtgtgtagccgtgcttactcatctctgagcctaccccagaaggcagatgtaaggaacagaagagcaatgcaggcaacacacacagcatggatctgagtatgcagaaggtgctcaatcgcattctactttggtttttattttgttttgtttcgttttgtttgagatggagtctcactctgtctcccmgctggagtgcagtggtgtgatcatagctcactcagcctcgaccttctgggttcaggcgatcctctcacttcagcctcctgagtagctgggtctacaggtctacgcgccaccacactcggctacttttttgtatttttgtagagacggggtttcgccatgttgcccaggctggtctcaaactcctgacctcaagtgatctacccgcctcggcctcccaaagtgctgggattacaggcatgagccaccaccccaccccacatctgctttgtttttgaaagggagcataggccgggcacagtggctcacgcctgcaatcccagcactttgggaggctcagctgggtggatcacctgaggtcaggagttcgagaccagcctggccaaaatggcgaagccccatctgtactaaaaatacaaaaattagctgggcatcrtggtgcacgcctgtaatcccagctctttgggaggctgaggcaggagaatcacttgaacctgagagatggaggtttcagtgagcgagattgtgcygctgcactccagcctgggcgacagagcgagacttggtctaaaaaaaaaaaagtgaccttacaacctttcctataaagcctcctcgagccttccccaggattccatctgggaatctgtgtttctggaagtttggagcatctggagaatcagaaatttgaacatcaggaactcaataaggaaatttgataatataaaggaattgttaccaattttgtcagtgtaatagaggtataagtgcatgtttttaagagtcctctttcagagataaatatatatgatgtctaaaatttgcttcagaataatccagtggtaggaaacaatggttgcaggcggaggagctgaagcaagatggtcgtgacttgatcattgttgaagctgggtaatgagtacatgggcagctgttatactgtccccttttccttctgtatatggttggaattttccctagtgaaatgatttttttttttttttttgagatggagtctccctctgtcgcccaggctggagtgcaatggagcggtcttggctcactgcaagctccgcctcccgggttcacaccattctcctgcctcagcctcccaagtagctgggactacaggcgcccaccaccacgctcggctaattttttgtatttttagtagacatggggtttcaccgtgttagccaggatggtctcaatctcctgacctcgtgatccgcccacctcggcctcccaaagtgctgggattacaggcgtaagccaccacgcctggcctaatttttgtattttagtagagatgggatttcaccatgatgcccagactggtctcaaactgctgacctcaggtgatccacctgcctcggtctcccaaagtgctgggattacaggtgtgagccactgcatttggcctagaatgtttatattcacatgggaagtatctaatagggaaaaattgcaggcataaaaaagagaagagaagtttgctggaggagcgtctttgaaaaggtgcaagggaggtggggtgcggtggctcacacctgtaatcgcagcactttgagaggccaaggcaggtggatcacctgaggtcaggagttctagaccagcctggccaatatagtgaaaccctgtctctacaaaaaatacaaaaatgtgccgggtgtggtggcgcacgtctataattccaactrctggggaggctgaggcaggagaatcgcttgaacccaggtggtggaggttgcagtgagccgagaccgtaccactgcaccactgtactccagcctgggcgacagagtgagactctgtctcaaaaaaaacaaaaaaacaagacataagaaatggtgcaggggcagcactccagcctccagcgtgccggtggaaggtgacctcagagacaagtccaactagaccatccctaggaacgagaggaaggcagggactgggcatgaggtgcagggagggaaggcacctgcattcatcagtccccttcggtgtggtaggcaggggccgagaagcctttcacaccttgggatatgctgttacttttcatcacccagcatccattgaggtagaccctgattttctccctaattacatcagaagctcagagaggtttagtgacttgaccaaagtcaaacagccagtaaggagaggagcccgtgggctgggcrtggtggctcacgcctgtaatcccagcactttgggaggctgaggagggtggatcacttgaggtcaggagttcgagaccagcctggccatcatggtaaaaccccytctctactaaaaatacaaaaattagccggccatgatggtgggtgcctgtaatcccagctacttgggaggctgaggcaggagaattgcttgaacctggcaggcggagattgcagtaagccaagatcacgtcactgcactccgacctgggcaatagatcgagactcagtctcaaaaaaaaaaaaaggagaggagctagtgtttgaacccacctctgtcttgctccagactctgtgctgcccagggattggtctgcctgtgaggcctacccaggagtagagactagaggggcggcggcattgaggagttggccctcatgcagacgaagctctggtcattgaactgtgggcttatggtgtccagagacactctaggagactgtggcttccttacccagccagctgagtgtgcccacatcagtgtccactgcatgagaggctggccctggcctggttccctgggtagccgccatgagcactgtgcatgcggaccctgtcttgcatctccagcaggacaaggacaatgggatgtgtagcatggatttcatttccccctccttggttctaggttctgggttcaggcgatctctcacttcagcctcctgagtagctgggtctgcaggtctacgcaccaccacgctcggctacttttttgtatttttgtagagacggggtttcgccatgttgcccaggctggtctcaaactcctgacctcaagtgacctacccgcctcaggacagttctttatcctcccaatcagagtccmgttgcgaatgttgctttcttgttttgggggttgagcagggctgaatgccttccaragttgaagcaaacaaccagtatcaccagtgcaggctgagagaaaatgcaccctagttaccgcagaaacgctcatctgagtaaaggcagccactacaaatccctgggtggaaatagccagggagagaagcggggaagagaggggcaggtcacacttggygatggcccttcgctcctctcaccttgtctgtggcagatgaaacactggctccttccaccggcagttggagtaaagatacttgatgcttcttctccttcagttgttacttgaaagaggcgggtcctcccacccattcctttatctccaggaaggctgctcctctccggcattgttggttccaccatccagggacctgaaccactggcccccaggcaggcattgggcttttgaattctgctctaattagcgtctcccaaagccccaggtccagaatggactacctgaggctggctgccctgcttgcacttcctcgcttgggttctgtgtggcagyggtggctgaactcccctgtcgtgcagatggcagctggtagcaaaaggtgaaaccgggccggaggtggggagcaagccacacctgccaacttgctgtcctcccattcccaactccgggcccagcatctcaggcccagtttcatgttgagttgtgctaactctgtccctgtacctcaagcaaactaggctagtcctctgaaggccactgagtggttcccactgttaccaggctgggcttgtccaggctgctgagtgcagctttcaacgtagatatatatgcacatgagagccaaggcagaatgcaggtgcagagacccagccctgcttctgaggctccctgggmtgactgatgaccctcctaaccactgctgcattttctttttttctttttttttttttttttttgagacggagtcttgctctgtcacccaggctggagtgcagtggcgtgatctgggctcactgcaagctctgcctcccgggttcatgccattctcctgcctcagcctaccgagtagctgggactacaggcgcccgccactgtgcccggctaattttttgtatttttagtagagatggggtttcaccatgttagccaggatggtctggatctcctgacctcgtgatccacccgcctcagcctcccaaagtgctgggattacaggcgtgagccaccgcgcccggcccactgctgcatattctagcagccgagctatagttcatttctgtgagctcctgagacaccttagcttgtctcagccctctggatcgtttctctaatccctgccccgctcaggtcacctgctgctgccctaagcagagcccacatgcgccccctagtggtgggaaaccaaacgattccacagatcctgtttgttgagggaggaggtgaaacgagatgcccacgggcgacccagccttcctgggttttgtgaattctgattcacacctagattggagagactctctggcatcatctcatgatgggaaccctagtgctggtcacccactcaattattataattaattttgcattcataatatatttaactggttcaaaaatcaaaaccatataaaaaggatacagtggggccgggcacattggctcacacctgtaatcccagcaccttggaaggctgagacaggcagattgcttgagctcaggagttcgagaccagcctgggcaacatggtgaaaccctgtctctactaaaaatttttaaaaattagccaggcatggtagtgcacgcctgcagtcccagctactcagcaggctgaggtaggaggatcacttgagcctgggaggcagaggttacggtgaacagagattgtgcccactgcagtccagcctgggtgacagactgagactctgtctttaaaaaaaaaaagcgtgcagtgaaaagtctcactcctttctctgctcttattcacccacttcctgtctatgtacgagtcccacacaggtaaccacttttgtttctcatgcatccttctagaggttttcttatgttggttttttgtttgtttggttgttttttgagacagggtttcattctgtcacccaggctggagtgcaatggtgcaatctcagctcactgcaacctccgtgtgctgggctcaagcaatcctcccacctccacctcctgagtagctagaatacaggctcatgtcaccacacccagctagtttttaaattttttgtagagatggggtctccctgtgttgcctaggctggtctcaaacttctgggctcaagtgatcttcccaccttggcctcccaaactgttgggactatagatgtgagccactgcacctgacctagagtttttttgtttgttttttttgtttgtttgttttttagtagagayggggtttcactatgttacccaggatagtctcaatctcctgacctcgtgacccacccgcctcggcctcccaaagtgctgggattacaggcgtgarccaccgcgcccagccaagttttttatactaataaaaaagattgtattctttgttcacacctccctttttgtaattaaaaggtgtcatgcaattataccattctgcatcttgctgttggcgagctttccattattcattcctagagagcatcctcattctttttcagagttgcatgatattctgctagagatgwaccatatttacttcacctgtcccctattgatgggcatgtggatgrcttccagtcttttgctgttataactaaataatcacgcagttatatctgtaggacggattctcagaagaggggttactggatcagaggttatttgcagcattagtggagagggccatattgcgtctataygggttgcagcatcttgcctacctaccagcaatatatgaatggattcagcagctccccacgtcccttccatctgtgtcttcctggcgtctcctctactctaaattgggtctcttggaatggtgaaatcagtgtgtaagggttggggaagggaccccatatcttagaatggtggaatcggggtgtaagggtcggggaaggggccccatatcttagaatggtggaatcggggtgtaagggtcggggaagggaccccatatcttagaatggtggaatcggggtgtaagggttgggggaagggaccccatatcttagaatggtggaatcggggtgtaagggttggggaagggaccccatatcttagaatggtggaatcggggtgtaagggttggggaagggaccccatatcttagaatggtggaatcggggtgtaagggttggggaagggaccccatatcttagaatggtggaatcggggtgtaagggttggggaagggaccccatatcttagaatggtggaatcggggtgtaagggttggggaagggaccccatatcttagaatggtggaatcggggtgtaagcgttggggaagggaccccatatcttagaatggtggaatcggggtgtaagcgttggggaagggaccccatatcttagaatggtggaatcggggtgtaagggttggggcaggggccccatatcttagaatggtggaatcggggtgtaagagttgggggaagggaccccatatcttagaatggtggaatcggggtgtaagggttggggaagggaccccatatcttagaatggtggaatcggggtgtaagggttgggggaagggaccccatatcttagaatggtagaatcggggtgtaagagttgggggaagggaccccatatcttagaatggtggaatcggggtgtaagggttggggaagggaccccatatcttagaatggtggaatcggggtgtaagagttgggggaagggaccccatatcttagaatggtggaatcggggtgtaagggttggggaagggaccccatatcttagaatggtggaatcggggtgtaagggttgggggaagggaccccatatcttagaatggtggaatcggggtgtaagggttgggggaagggaccccatatcttagaatggtggaatcggggtgtaagggttggggaagggaccccatatcttagaatggtggaatcggggtgtaagggttgggggaagggaccccatatcttagaatggtagaatcggggtgtaagagttgggggaagggaccccatatcttagaatggtggaatcggggtgtaagggttggggaagggaccccatatcttagaatggtggaatcggggtgtaagagttgggggaagggaccccatatcttagaatggtggaatcggggtgtaagggttgggggaagggaccccatatcttagaatggtggaatcggggtgtaagggttggggaagggaccccatatcttagaatggtggaatcggggtgtaagagttgggggaagggaccccatatcttagaatggtggaatcggggtgtaagggttggggcaggggccccatatcttagaatggtggaatcggggtgtaagagttgggggaagggaccccatatcttagaatggtggaatcggggtgtaagggttgggggaagggaccccatatcttagaatggtggaatcggggtgtaagggttgggggcaggggccccatatcttaaaatggtggaatcggggtgtaagggttgggggaagggaccccatatcttaaaatggtggaatcggggtgtaagggttgggggaagggaccccatatcttaaaatggtggaatcggggtgtaagggttgggggaagggaccccatatcttaaaatggtggaatcggggtgtaaggattggggaagggaccccatatcttaaaatggtggaatcggggtgtaagggttgggggaagggaccccatatcttaaaatggtggaatcggggtgtaaggattggggaagggaccccatatcttaaaatggtggaatcggggtgtaagggttgggggaagggaccccatatcttaaaatggtggaatcggggtgtaaggattggggaagggaccccatatcttaaaatggtggaatcggggtgtaaggattggggaagggatcccatatcttagaatggtggaatcggggtgtaagggttgggggaagggaccccatatcttagaatggtggaatyggggtgtaagggttrggraagggaccccatatcttagaatggtggaattggggtgtaagggttggggtgcccataggattccatcagcatctgtggtctccagccgygtgtagcatttgttaggctgcagaacttgatggctttgaggtcacatcggggctggtgaagggagccccagggctagtctgggtctgtagttcctggcctttccctgggaagatggctccagacctttgtaggggtgtccaacagtgtgctggagttaaatgcagttatgctcctgcccactcagagttgcagttccttgagccttgctgtcagcaggatgggatgggctgacagggtagagaatgtacctgggctcagctggcccagactccaaaggccaccagaaaaccagggtgacaaatgcccatcattcaacgagtggataaagaaactgataaatacatacagtggaatactactcagccataaaaaggaatacattcatggcattcgcagcaacctggatgggattggagactattattctttttattttattttcttgagatggagtttttgctcttgtcacccaggctggagtgcaatggcgcgatctcaactcactgcaacctttgcttcccaggttcaagcaattcttctgcctcaacctcccaagtagctgggactacaggtgcccaccacgacacccggctaatttttgtatttttagcagagacggagtttcaccatattggccaggctgatctcgaactcctgacctcaggtgatccgcccacctcgcctcccaaagtgctgggattacaggtgtgagccaccatgcccagccactaaagtcatgtttctctcttctccattttgattcatttgcccaaacctttccatgccaaccagtgttggtttttattaattagtccacattttttctcatatgaaataagccaaataatgtcagggtcatcaccttgtggtggtgcacccagggtggccgtagctggtgctgggacccactggatcaggggtcctgaagccttcacaggtgggagcccagggcccagacagctcagtcagcaggcaggtaggttcagctaacctggtgctttagccctgcaagtatctcctgccaccaccctccaccctgggaggtggggtcacagtggggacctggggaaggaaggagtaaggggagtaaggccctggagttctgcttggtgctctgggcctccagtcagaacgggggataagcttgggccgtcatgtggactctccctggggaagggtccttcaccgtcccgtgtctgtgagacacgtccccggggaaggaggacactgttgctgccggctttgcaggcagttctgagtgtggtattcactagatgcgggatggcatgtgtttatgtctccatgtatgtttcrattagtgacaatgcctgggtttctgctcgactcagaagtctcagagccaggctcagtggctcaagcctgtaatgccggcgctttggaaggctgaggtggaaggatcacttgagccaggcattggagaccagcctaggcaacatagtgagacctcagtctctacaaaaaatttttaaaaattagccaagcttagtgacccaagcctgtagtcccagctgcttgagaggctgaggtgggaggatggcttgaacccaggaggctgagactgcagtgagctgtggttgcaccgttgcacgccagaccaggcaatagagtgagacccggtctcaaaaaaaaacggcttcttaatcttttttgggtcagaagctgagaaccacagacctactatccaggaaaaaaagcactctcctaatcattctagagcacctcaacaatttgcattcaaattgctcccaatatcagggaggggctcttttttgttgttgttgttgtttttgtttttkttttttttttgagacaaagtctcgctgtgttcccccaggctggagtgcagtggcgccatctcggctcactgcaacctctgcctcccaggttcaagtgattctcctacctcagcctcccaggtagctgggacttcaggtgccccctaccacgcccagctaattttttgtatttttagtagagatgggatttcaccgtgttagccaggatggtctcaatctcctgacctcatgatccgcctgcctcggcctcccaaagtgctrggattacaggcgtgagccacggcgcccagacccagggagggagtttttggagccccagaagcccattcacaaagtcctctcggggccatagttctcaagtagtggtgtcactattattattttgtctgcacactgcacgcgataacatattcatcacacgtgcacactctcrgtggggaacaccttgtgggcatggcataggacaagtgcagtgtgaacagttactggccgggagcccacagagctgagtcagtaatgcctggyctaatggcctaactggtcttagcttggaaagtcgatgcatgagagggatttctccttccccagacactgcctggcaccttgcctgggttgcacagaaggaaattagggaccgtggggtaaaggggggactgagcgtgatgcctggcttctctcagtattccttagttgcagtaattgcttaggaatgcctcctctcacccgagagaaccccatggctgtgctcagaggctggccgggaaggtaggcgaggccaccccgatgggagtgctggggccggccactccccagtccccmcggcctggctgcttttgcggtcgcctagggaaggtggggaagcgaatgactcattatcccggcaattaatcacaccactgaggcatgtgatccgtgcaggacatgtgccacctgctgcccctctgtcctgttcagtgctgcttctctccccactctgaatgggaagtgcaaccccaggaaatgatcaccccctttccacaggcacggaattgtagctgcagcagcccaggaccaagagactgggacaaaagggtcattcgcctgtatatcccagggccacacaagacctccagggaccagggggaatgatcatggagaggagcatgtggacgcttaagccaaagatttccccatgtgggccgggcgcggtgcctcacgcctgtaatcccagcactttgagaggccgaggcgggcggatcacttgaggtcaggagttcgagaccagcctggycaacgtggcgaaaccccgtctctactaaaatacaaaaattagctgggcatggtggtgtgtgcctgtagtctcagctactcgggaggctgaggcgggagaatcacctgaaccacagaggtcagctctcagctgctgtgagctgagattccacgattgcactccagcctgggcatcagagtgggtccctgtctcaaaaataaaaataaaaaaaccttgacagacctcaatttccctgtctccacccacttctggggcagccttggatcgtctctccagtgcaccctcttcctgtccctgtcggggagaggtcctgctgaaagccagctcttagaggctagctgtagaactgtatctgaaccaacagggtgaggagtcaggaactgacctagacccagcacctcctgagagccagaccccgcatgggtgatttcacatcctccgtctcatgtgacatctcacactagccctcttcccatttcacagaggatacaactgagtctcagagcaagtgaccgtgccaagctcagactttgttctgtctgactgtctccagcacagctcactgtttccagtccgtgtgaaaaaaccacctccttctcccctcagtgtccctgcccccaaccagacacacctggacgtggcaaaaggggctcgggccgaggcttggagccctgggtcctcatcctggtggctctgccatgttgtgactgtgatcgagtttcttcccctctttgggcctttccctcctcacctgtaaaactgttagtttggcccaatcatgtagaagcttctccgccccacacacatacacactcctgtctttagagtctgtctgggcacagggcagctccctactgtctcctaccaagcccttcttttcttcctgcagggtctgtctgtggaaagtccagacagagactaagcctaaccctaaaccatgaatgaatggagggaagccctcctagcatggaaaagagaaatctctccctcagctgctgggctcatcagtccagcggccactgtcgggtccaagctctgcagtgacttcatcaatattttagctcctgcagagccctgttccttagcaaccgcatcctccgtgccctccagaaaggctcccgagtcgggtgttcctcacatccccgtcctgtaggtgctgtgccttgctgtcaggtttggagccactcatgccaccctgaatggggagctttggtcctcatgacccccaggggtgaggctgcatataggaggtgtgtgcgcaccaggcgagggagagggacagcttggcatgtcaaagctcttcgccccgggcaggagccgagggayggggaggggaattttggaargaagccagggtatctccctggcctgcccttggcttgcccttaccccttgcctcaccacaggtatggggaagaggagcttttcttcctgctcccccgtctttcccaggctcagatgccgtttccctttgtggcctaggtgcagtggaggcttgcctcttgcatcagctgagacgccgtgccgctggcttcctgygcagtgacaagatggcagccctgttcaccaaggtggggaagacgtscccagtggcgggggagatttgccacaaggtacaggagctgcagcaacaagcagagggcaggtgagccctgggccagcccmttcttccctcctttcagctcttcccacttggcaattgctacttcctaggacacccatcggaaagttggcatcctgggcctgttccttgcagggcctctgggtgagggatcagcttgagggaggggattggttccttgtgggcacaaggctctgtacccctccttcacctcccaaccccagtcagttctctgtgctcccatcttggggtaccaagccccactcccaatgccagcattctggggtttacccctagaccactgcactcctggagccctccccgcctttgcaggaaaccctcaggggtcagccaggaggccctgcggagacagggctcagccagcgggaaggccccggccctcagccctcaggccttgaaacacgtatgggtacgcacggcgctcatcgagaaagttctggacaaggtcgtgcaatacctggcggaaaactgcaggtgaccrccccgttccccmaaaactgcaggtgaccrccccgttcccccmaaaactgcaggtgaccgccccgttccccaaaaactgcaggtgaccgccccgttcccccmaaaactgcaggtgaccgccccgttcccaaaaactgcaggtgaccgctccgttccccaaaaactgcaggtgaccgccccgttccccaaaaactgcaggtgaccgccccgttccccaaaaactgcaggtgrccgccccgttccccaaaaactgcaggtgaccgccycgttccccaagcagcccctcccttgacccgtctcccgacgtccctcagccccagccctcaggatgcttgcctgtccgtgacagcctgtaggcaaccctccatctccccgtccccttcggtgccctcaaggcattggccataccaggcacctcacgaagcccagtccctaaggactcactgtttcttgatgactgatctgaatctggtctttgtggggaygtccctacctggtgagcttgactgccctggaatgagccccggagcctcggcagtcacactstctgtctcctggcagcaagtactacgagaaggaggcactgctggcagaccctgtgttcggcccgatcctggcctctcttctaggtgagcctgagagcacaggcacagtgggtacggggcaggtgctgagggagcatcgtctgggctggctgtctctgtctccacagtgggaccctgtgccttggaatacactaagctcaagacagccgatcactactggactgacccctctgctgatgagctggtccagcggcaccgcatccggggtccacctactcgccaggactcccctgcaaagcgcccagccctgggggtaggtgccccctccccaccctttgggctcatctgggctatgcccatgggcctgtagggacgggaaaccggcctctctacgggacaggccttggagatgccccaaggtagcggctgcctcagaagagccttctccgcacaataaaacytaacacaaatgccgggagcccatgctggtccgtggctggagagcagagggtggctgggagtaaaccggggcaggaaggacccctggggtcagctggagagggtcagcatggaagcgtgagggttcccaagccytgaggccagtttcccaaggctggaggctgagccccggccttccacacagatccggaaacggcactcaagcggcagcgcgtcggaggacargctggctgcctgygcccgcgagtgtgtggagtccctgcaccagaactcacggacgcggctgctctatggcaagaaccacgtgctggtgcagccggtaggaaagcttcatcctgccatccctccccgaaggtccccgaacragacsactggaagcctctagccatggctattcctttcctgaggagcttgaccagagacgggggggagaatggccccagcctcccaactccctgtttcacacgactcacgcccagcctttagttggcaggggacaggaatggcagccagcaggcgaggggagtccgcagtgtgggtatggctggcctggaatggacctggcatccaggaggctggcaggagagagtcagtggcaccaggctgaccagggaaactgagtcctgttttcctgtgcttctgccccgtccctagtccaggaccccgtgactagcctagcttggcctcccctcctcccagcrggagctcatttctcataggccatccctgagagcctctcagcccttcatcgtcggtcttccggtgtctcccgctgtagaaggaggatatggaggcggtccctggctacctctccctgcaccagtctgcagagagcctgactctgaagtggacccccaaccagctcatgaatgggactctggggkactccgagctggaaaagaggtgggggctttgggactcaatcccaggagccagggcagggagtgggtttgacctcaggcagagggatggagaaaccccgcttgctccaggaggccaacctcactctttatttggacgccaagaatagcagggagcggctgcctggagtgattcccaagctctctaggacggagccaagcctggccgtgaagaggtttgtctgagccaagctctcagyggctgagacggacagctgtccatgtgccgagcgggcagcacagatctcaggggtcatggctggctgtgtgcacctcttggctatggtcatcctatcttcaggggagtttcgtggggtggtaggaccaggagacaaggaaggaaggaaggatggcaggtctttggacacagtgacagcagtctggttcctttctagcgtttactgggactatgccctcgtggtgcccttcagccaggtcgtgtgcatccactgccaccagcaaagtaagcctgccttgtcctyggctcgggtgggaagggagaggctgccttctgccagctgtgcactgtgcgtggggcctgtaagactcctcgtcctcctcccatccttgttaatggggctcccaggccatgctgtagcccagccatctgcctcctacccagcctgggggcactggccagcaggstgtgatagccgacgagagggcctcagccgcactctccacgttcacccccagagagcggtggcacgcttgtgctggtgagccaggatggcatccagaggccgccgctgcatttcccacagggaggacacctgctgtcctttctgtcctgtctggagaatgggctgctgcctcrgggacagctagagcccccgctgtggacccagcaagggaaggtaactcgggtgggaggctttaggggaagggctgtgtgtgkggttctctgcccgcctcccttccttccccacgtggagttcttaggagcggccttgtgtggaaccctggatgagactctgccctatacagcccgaccacctacccctccttccacaggggaaagtgttccccaagctacggaaacgaagcagcattcgctccgtggatatggaggagatgggcacggggcgggccaccgactatgtgttccggatcatctaccccggccacaggcacgagcacagtgagtgtcccgagcttcatcccgggggaggagaggaagacgctcygggaggcggggagcrcagcgtcacccaggagggcagcaggcagggcccactgaccaggccaggttaacaccagaggctcatcgcctagcctctcagctggaccttttacccacagatattgcctttgaaaaggtgcgtctcttctacccagctcccttccccacttctccacgccaggactcttggctcagcagacctaggcgtcactacacaagactcttagttatcctttcagaccctgtccaggggtaaaacacgtggagaaacgagaagtagaaggtggggaaccctccattgctcttcacctcctgctccccaacccctacaagacagcctgggtatgggaccagcgctactttttttttttttttttttttgagacgacgtctcgctcttttacccaggctrgagtttaatggcgtgatctcagctcactgcaacctctgcccctgggttcaagcgatcctcctacctcagcctcctgagtagctgggattacaggcgcacacctccatgcccggctaatttttgtatttttagtagagatggggtttcaccatattggccaggctggtctcaaactcctgacctygtgatctgcctgcctcagcctcccaaagtgctagggttacaggcgtgaccactgcgcccggcccagcgcttctttttggatggtgaatattgtctgctgactcccctagagccagagccctcctcaaaccaactactgatgagcgttagctgaagtagcaggttgcatcagaggcagactcggggctgcctgggggctttgggcactggcgggtagaaaggcggcttggcccttgtgggtcctgccccaccctggacacacacccctgggcccaagggggtctctctgtctatgtgcatctaccaacaccaaagttccctttctggtcagagtgctgctgctgcccataggcttctctgggcagacttgcttttcttacagataaggtcggggaatttgccagcccagagcgtttattgctaacaagaccacccgctccctaaatttccaacttgtgccaaaaagttgtcaacaagttgtctctgtattagggacyggactgcccagacggcacactcagccacagcacagatagctccaccaggctcagagggcacacggcacagggatgtccccccttcccagatgtacctgacaaagagacgcatctttggccagaatgtatttacacacttggcacttagtctcaggctgttgcttggtttagcttctccagtctctgcctcccctcttcgatctttgccatttcccagtcctggtcacttcacttccaggaccacctcgccaagggcaagccagggcacccagaggctgaaactccaccaagcgactccagctccttgaggacagctctgggaaaaccctttccttttcctgggagggaagaaggtggaatttatagtctgaaaaaggggatttggagtaatcttcagatttggtccagcctgagaggagctagagaacgatcaggacccatctgccagctgtcatgcgcagcctctgtgagggccgatgacctcctgggctgccagcccatcccagacagtcccrgtctttcacatcctcccacctctgttctctctcttctgttcttcctagagaggctgcctccgaagagtgaggttctgcagctgccccagcccctcgcctccttccacactctcccaggaaaatcatccaaagagctttctggtcccctcccttcccctcttctgtgccctgcagattcacgatgaccccggcctccattccactccccttaaggagggagtccgtcctgcccagggatgagggcctcatgcctctgcctctcgctgttctctttgagcagtcactattaactaccaccacctagcggccagccgcgcggcctcggtggacgatgatgaggaagaggaggataaactgcacgcgatgctctcaatgatctgctcgcggaacctcacagctcccaatccgatgaaaggttcttatccctccctctccctgacccacctcatccccaccctccctcccgggcccgcctgccacccaccacaggggytcgaacggcagtgttggcattaggggacttgcacccagggcagttcccttccatcgggggcagatcagggagggcagaaggaggccagacaggtgctggcaagaaaaggggctggcccagggcaggtggctccaggctgtgaggaggaagaggatttgctaataggaaggtctgattatctgattgcctcctgggcaccctgaatggatctctgagcccattcctactccgggggtcaggctggcaaatgccagacagaggtctcttcctttctctctgctgattgggaagaccagcctctgggcctggtgcttctgactcctgacttaacagaaacaggatggaggtaccgggtccttcctggggcaggggcagcagctgtgggtcaggcgaggggttgagggctgccatgcgaagggccccagggctcagtcttcccaggaggcctgagggccccagccggcagggcctggtactttggcatgaaatctagaaatagctgcagcatggtgtccaggaaggggccaggctcagggcctggcaacatgaactcccgccccagatatgcccctggttcactgtgtggttttgagcaagtttctcactatcccggagctccgtctcttcacctgcgccagggatataagacagatgtgttcctgccctcatgagtctcagggtccacgaatggagaggtcacctttgttggaggtgatagcgtagtgccctcagcctctcagggttcctctgcctaccacccatctttcctagcacagagctggcttggtagagagggagcccccctcttttcagcaagcaatcagccaggcgacctgtgagggctgggatgggtgctccagaaaggggtgggtaggaagaggctgaggccagttctcccagagacgaggggagcttccccattcccacccattcccatgctacaaaatcaattgcttctccctttccccgcccctgcagaggatgtcctcagaatatgtcacactccccttaggcttccaaagttctgccgggaagcccagttccttagccggccactgatccagtaactgtctccgggcaggcaggacggcctggtctgtgttagaacacacccagcacaccctctgcacaagctgccagctgccctcctactgccaggcgcctgccctcatgcccaccctccctcccagcccttccaatatgagcccgtaggccaggcctaggtgggaacatcctacttctgatgyttattgcctacacacacccctgccatctggttycttgcaaacctggacttggggctgttgcctatttacagtgaactgactgagcagtgtgggaaggttgagctctgaggggacccacggagctacttcttcccccacgaactggtagtcaggctagaggctggagggtcctagcagagcccttggcagactcggtgataaaaagcctatccctgactagtcttagggctgaggcctccgggatcagagaaasttccagacccacttccaggggtccagaggcctcagggctcatctgtgcatcctctcaaggaactcaggggctaggccaacctagtatagagcttctgggcccctaatacttgggaaaggagaggaggcataagagcagaatcagcaggcggttggggagagggctggggaatgggggccccccacctccactccagtccataatgacaacactgttgagtccgttctgccagctgttgcttttcaggcctgcaacatgcttgacttgtgcatgtgaatcagtggcggggtgtccaaatttcctctccctccctcttcctctccccttccttttcctgctgcctccccacagagcagatgctattcactctaattctgctccaggccaggcacctttcactcggagtcttaggggctgtggggttcgcccaccctgttttcttgctttacactttcctcatgctcagaggagagagtcagagtcaaagctgacccagcagacccccctccccccgtccagcctgtgccctcacccagtcacgccatagccccagctatctgcactgggctcgctcagagacagtgttcgaatgtggctggttcagctccttcctggaggattaaggtgaagagcattggcccaggagaccttggctgggcctcctttctgggcatgagcttggttccctttgcccacccccgccctcacccctgttgccctccctgcctgcccgcctgttgcctgctgcctgcctggctgggcctcttcccaccccggctcctcccgrgactgtcctcttctctcctgcctgctgcaggggcctgagctgggctcctgccccactgcacctgcaccctccccttcttcccagagtctcaggcatggcttgcaacrccctcactcccagagccgcagcccctcctcaccacgcgtgttcccttaatttgcctcctggtggagctgaagggccagatatctgcaaaactcccggccgtgggtctgggaagagagccccggccaaggcagggcaaccgctgagggaaccggaaggggctcagctcagccctcctcaccaaggcacacccagagctggagtccagctcccaccaaagccaggcccacgcctgcggcaggccacagtgggccccggcccaggctgagccagccgagcaaactgctgctgacaggactccctcagcacacacggctctccatccctgttcttccgaactcttctccactctctccctccctcccggcatcaccccccagtgcttccacttcctctctcactttgcttcatstctgtggctccctggacctgccagagtcccccttaagcagtgccctgccccacgtgggccgtggaagctctcgagggtcttgagttctgattcagaccgcctgggctggctgggcaggccctgtcgctggcagcgtagctgtgtctaaggagtcatcttctgaggctgcaactgggcctgttcttctctgtcacattggatagtgggcctctgtgcccagccaccactcccggccccgcagtggcctcgtagtcctgggacctgtgacttccatccagctccctggtgttttcgggaggccaccatgctaactgctgtcaggctaggcagggatggagcagagctcagaaaggggccataggagctgacagcaggggtacctggcctgggcacggggcactgctcatccgtagccactggccaccagatctagactcccccagaagagccaggcctacgggcaggtgactcagattcctcgggggctttgaacagtggggactccctggaggggagcgttcagagttggaagtattccaaagacctccttgagcatctcagagtttgccaagaggaccgagctgaatccgtgaaggctgagctagctggtggctttgaggagctcaggtctttgttccttctctttctttcccttccctctagaaaagcaagtgcttgctggtcgcaggatagagctaggcacaatcatccaagactcagtccaagcattttaccacatgcagaaggacgccttgygcccctctccaggcttgctggaggctaggaagtgtcaggcgccctctctccctaccgtttccatctctgggctctggaccaggcaggccccacctctgtgattttccacccatgggtgacttgatgctgcagctctgggcacagaggtgggcatggtgcagggtgcctgggagagaaggtgtctcaggccctgaccatgccacccttcctgcccgcagacgctggtgacatgatcgagatgcagggctttgggcccagcctgccagcctggcacctggagcccctgtgcagtcagggctcctcctgcctctcctgctcctccagcagctccccacatgcaacccccagccactgtagctgcatccccgaccggtgagtgggcagcgctcggccccagcttcccgttagcgtgtccagccacgtgtgtgtccgtctgtccttaaaggccgtgtcacctgcacgacagggtggcctctagagtgggacagatctgggttcaaatttcacttttgctacccacgtgacttacaagttatggaattaccatgagcctctacgtttctgaacctcagtttcctcatctgtaaaatggggatgatgccacttgctgcctgcagtacttatgaggacagaatgagagagaacccaagtgaaggtccggagttgtgccggcacatcatgggctcagtgcccgtgagctccccttcccgatgtgcacacagaccctgctgacaggccgtccacctgaggacactcagcagccacctgccgtgtgccagggcagtgagtgaatggcttttatgggaggtgttctcttttacctttacttcgtcttccgtttattaatcctgatgatcctccgctgcctctctccatttttcacatgaggaaasgaagattcaygtaggtgaagttcgttgaccaagatccctgggtggttgggggccaggcgggggccccacagcactctgtccaggtggcaggcagggacagggcacccactgacggctgctgggctgcggctcctcctcctcgcaccctccccagtgccttacctgccccccaggacagagcctcctcccttctctctctcctcccaccagaggggccgcagcccctccctgctgagcccggttgttgccacaggttgccgctcaggctactgtgtgagagtatgaagaggcagatcgtgtcccgggccttctayggctgtgagtgtggggcgcgccgggctgtggygggctgggggcgggcggccctgggtcccagcctcctgctgcccaccgctgcccaccgcagggctggcacactgccgccacctgtccacggtgcggacccacctgtcggcgctggtgcaccatagcgttatcccacctgaccggcccccgggggcctcsgcgggcctcaccaaggacgtgtggagcaagtatcagaaggacaaaaaggtgccaaccctggggttccagggccacaggtcgaggggctggggcgggcaggagtgagggcytcagggtaaaatgtgccagtgggtgcggttgacaggccagggccgatgccacggagtgaccagggtcccggcagaatctcttgcagctgggcctggggctgacacgggaagggggctggactgggaagccgtcctgcctccacatcgccctgtgaccctggacaaagctttgcctctctccgggcgccatttcctgccccttaaggaaggagagcagaacgagatctcatcccactgtgakctggggcacgggaggacgtggccaccccaaagcaggccttgcctgggcttcagcartcactacaggccccgccccagcccattctccgtgggatggggctcacccagctgggccacggtgactgtggaggctgcacagtcttgactccccgggtccctcagaactacaaagagctggagctgctgcggcaagtttactacggaggcatagagcacgagatccgcaaggacgtctggccctttctgcttggccactacaagttcggcatgagcaagaaggagatggagcaggtgaggggagcctgttcccatggggctgagrtggggagctgggccaggggacgycagggaggggaccttggaagcctcagccccttcccagccggaaagaagcatggcagggcagctccaccgtccttaccctgaggcccgtcttgagtctgagactcaggacccaaggtccagtgcaggcccagctcctgaaggggagggcctggtgcacgcttcccccatggtcgtggtgtggtctgagtacaggtggacgcagtggtggcagcaaggtaccagcaggtgttggcagagtggaaggcctgcgaggtggtggtgaggcagcgggagcrggaggcccacccagccacacgcaccaagttctcctcaggcagcagcatcgacagccacgtgcagcgcctcatccaccgagactccaccatcagcaacgatgtgagccagacgggacctggagggttgggggtctcgggggccacccgcgttttatgcacagtggtcctgagcaccagcctgacctctgggaactggtggggccctgcgagaaaggcctaaggtgcctgtgtcycattttctccaactggaaatggctaactgtgcctctgctgcctacttctctgggtattgtaggaataaagtgagagagtgcattgtgctcagttttagccaactatagggaaagatggacttactgggatttagggaagccctcctccttgtagaaagacctcaaagctagcaacaggcagcgctgggttctagtcccagatccactactgacaagctgaatgtctctgggcaagcacttcccgtctctgggtctcagtttcccctctccacccatatcctctgactgcagaggcttcctgagatctgtgggcctgagaataggggagcccgtagagcagccccattggtgtcgactggcgagatccttcctccccgcgatgttgcctgtcactgtacagaactgactatggcaggcttgttcggagcacgggagggtagctctttctggcatcactcctgccttttgaacagcaagttctaaactgtgactgcctggcccaaccaacactgataagtttcaattttaaggacgctttattaatttttctttaaaattgcctctttagataatgtgtattcttgttactttactaaatccttaccaacattaacagaaaatgtaagttgaagtaagttaaatataactggctgggtgtgatggctcatgcctgtaattccaacactttgggaggcagaggtgggaggattgcttcagttcaagagttygagaccagcctgggtaacatggcgaaaccctgtctttacaaaaaatgcaaamctttgccgcatgtgttggggtgcgcctgtagtcccagcttctcgggaggctgaggtggggggaccacctgagccatggaggttgaggctgcagtgagccgtgataccaccactgtactctagcctgggccatagagtgagacaccctgcctcagaaataaaataaaaaaaaagaaatagaacaaacaaggcacattgtcatttcccacgtgctttgttcttaatcccctatccaggaacacattctccctctctctggctttgggttttgtaaaaatctgtctgtgccagtgcccagctgctgagctcatggacagcagtagctcctcgctggcgtattagatkgccacagaaccgtggccttacccagcacttcatgcttcctgcccaaagtagaaactacttttagcattgctttccctacgtggtgaaaacagagagagaaaaatcccaaacagtctctgtatgtgtctcttcttttcctcgtgccttgtccatggtggtggactgtatctaggaggcagaatgtttgcttttccttcctacatctccccaccttgcctgagggctaatggaactgactaggtgcttgctacagaacgttcctgtcttgtcctgctgaacactcagtactgaaaataaggcaaaacttgtttttcctaaaacctctagscttctctccacccagccacaccaaaacactaaggccattctcccggtctcatgacttcaggcgtttctagaatgagactgagttcaaactggccattgagcgttcagccccctggctcccctacttcccttcagtagccacaggaagacctggggctgttccttcaagcagggctgaagacgtgtcttcatgtttggccagaggcttgtttctctcygcctggctggctgggtcagaagctggcttggtgcyccgtggccacagtgttggaggctgtggtgggagagggggtktgaagagttttgcattccagctcccttctggcccgaggmggcggtgggctgcgggaaggtgctggagtgcaggtggagccgccctgtgttcaccccccaggtgtttatctcagtggatgatctggaacccccggagccccaggaccctgaagattccagaccaaaacctgagcaggaagcaggaccygggactccgggcaccgccgtggtggagcagcagcattccgtggagttcgactctccagactcaggactgccctcctctcgcaattactccgtggcctcgggcatccagtcaagcctagatgaggggcagagcgtgggcttcgaagaggaggacggcggtggggaggaaggctccagtgggcccggccctgcagctcacactttgagggagccccaggatcccagccaggagaagcctcaggccggagaactggaggccggagaggagcttgyggctgtgtgtgcggctgcctacactgtgcgtacatgctccccaggctgttcccagccgccccagaggccctcctgacatcccagagctggggaagcgctggtggggtggaaggcggggcgccctgactgccctggaagggagttctgagcccatttctcagcatccccacaggactcgctctggtctctgggttccgttttgctgcattycttggggcgtcacctcctgcccccagcctgggaagggctgcccggtctcatgcctgagggccctccactcttccagatagaattactggacactgtggccttaaacctgcaccgcatagacaaggatgtgcagaggtgtgaccgcaactactggtacttcacgccccccaacctcgagaggctcagagacgtcatgtgcaggtgccttgtggggcggggctcagggtgggaggcgggaccctgccgccagttactctgtgaagatgrggtccggaaggtgccctgctcctctctcctgctcctgaatcacacttggctccccctgcctggaacgcttttttcctgcacacccctcccccgcgcctcttcattcttaggggcctaccagacctccacttcagccacacctcttcaggaagctttccctcatccccgcacccccgccccacataccaagcgtgacggccttggctctccctaagtcggagtgccttgggggggacccgtgggttgttccccgttgtctccctgtggggggtgcacagtacatgccttagggtcgtggaaaggctgacttctgggcggcaggtggctctggaggacgtcttcccagggatcccgagggagggaagaatggggcacagccacagtgactctccccctgcctttcagctacgtgtgggagcacctggacgtgggctatgtgcagggcatgtgcgatctgctggcrcctctcctggtcaccctcgacaatggtgagggatggcgggacatgggactgggctgcgtaagctggaraaaggacgagagggtggccaggtctggaggggtgggaatgggagccggctctgtcccctgcgtctcctgccctgccagcttcactcctgtctcccctcagatcagctggcctacagctgcttcagccacctcatgaagaggatgagccagaacttccccaacgggggtgccatggacacccactttgccaacatgcgctccctcatccaggtgaggccggttgccacccatgggcatgggagcaggcagtgctgggctggtccatcgtccacatggctagggagcattccacaaacatacttgacatagaaacttaacttctttcattttaaaagacatggtttcagcagggcaacgtggctcaggcctgtcatcccagcaatttaggaggccgaggcaggcggatcacgaagtcaggagtttgagaccagcctggccaacatcgtgaaaccccatctctactaaaaatacaaaaattagccgggcgtggtggcacacacctgtagtcccagctactcgggaggctgaggcaggagaatcacttgaacccgggaggtggaggttgcagtgagccgagatcacaccactgcactccagcctgggtgacagagcgagactctgtctcaaaaaaaaaaaaaaaaccatggtttcagcgttagaaattgaggaggagtgtgtgtgtgtgtgaatgctcgtgcccatgaaagttctggcgaacagtaggggttgctgatgacatcagacacccagaaaatcctataaccctaaaaataatgcagcycagagagatgggtgatgggaggggcagcaggagcaacccaccctccacaaggagatccgagggggagagagtgcaccgcgcagcacagggcaacagacagacccactgccaggttggggatcgcctgcatccctgggcgtgagcrgacggtgagtggcggccagaggcagcatcggctcagggctcagcctctctcccttttcccacccacataagatcctggactcagagctgtttgagctgatgcatcagaatggagactacacccacttctacttctgttatcgctggttcctgctggattttaagagaggtaagaagtgggttggatcatggggctgaggtcagggacagtgagagatccctcttcccccaagccaacagttctcaatcctaactggaccttggaaccacctggggagctttaaaacctgccagaaccctggccccacccagcccagactcatgaactgtggctgcctgggcctatgggttcttaaatgctcgctgaccagacacagtggctcacgcctgtaaacccagcactttgggaagtcaaggtgagaggatcgcttgcacccaggatcttgagactagcctgggcaacatagcgagaccctgtctttaatttttaaaaaagaaagaaaaaatgaggctgggtgcggtggctcatgcctgtaatcccagcactttgggaggccaaggcaagcaaatcacttgaggtcaggggtttgaggccagcctggccaacatggtgaaactccgtctctactaaaaatacaaaaatcagccgggcatggtggcgggtgcctgtagtggaggcaaggttatggtgagctgagattgtgcyactgcactccagcctgggcaacagagccagactgtgtctcaaaaaaaaaaaaagaaaagaaaagaaaaaattgaaaagaaaacaaaatttccataggtgattccgaagtgccactagggttgacagttacaactctcatagatcatagtttggggaacttttttcaaaccaaagcattcctgagcaccaagatgggaggcctgtgacagctgcccggctgaagtgcaggcagagtctgcaggaacccagtgtgcagaaattacccaagaaaaggatggggccttggtacggggtacagaacccccattcctgagccaggctctgtgtcatggagagaatcccacgactttggcccctgaagctctgatccctcacctggctccatttagaggcctgtgagcagccagtccggccagcatcagccccagccccagcctcagcctcagccycagccccagcctcaatcccagcctcagcctcaatcccagcctcagccccagatatgcggctaggacgggtgagcagcagccgcttactctccgcagaactgctgtatgaggatgtgtttgctgtgtgggaggtgatctgggcagccaggcacatctcatcggagcactttgtcctgttcatcgccctcgccctggtggaggcctaccgagagatyatccgtgacaacaacatggacttcactgacatcatcaagtttttcaatggtacgagctggtccagccatccaggctgccctgagcagaggtgtggaggcccccacctctgccccgcacacagctggagggttctcaggaatcctgggggcccttccccaaaggccgggatgtcaagaatctagcagagcagatggaaacagagcagggtagtcagccacctcctagcctgctgccctttctctgggcctctctacagctcttcacgtttccccccagaacgtgctgagcatcacgatgcccaggagatcctgcggattgcccgggacctcrtccacaaggtgcagatgctcatagagaacaagtgagctggggccaggaggcagcagccgygcagagcctgggctccggcagggagaggtgcaggggagtcaccgcccagacctccccagccaccaaccgaccccacctctgttcctaacaaagcggttgtgagcctggatccgactcccggcagtgctgaccctgcagggcaagtcaggggccaggatgccctcggatcagggccgggatgggaggggtcagcctcagggagcagctgccttgggggacacacctactctgctcccctctcacacatctgggagtagccccactgccacctgcagccgcagcctggactgctgcccacgagtgaacctggggccccacaggattaacaggggctatagcggcctgggccctactcagctggggtggcagagggcgagaggctctgtgctgtgtcccttctgagggtccctttgcagtcccagtatattgtgcgtgcaccagccccagctggagcaaccaaaactgcttctggtttaggcacacgtcacgggtgcgggagacccgggcacgggagacccgggccgccttcaggccgctcccccgagattctggggcagtcggaagatgtgggccctgggtgggagcagcccacttcagcagcactgccactgcctttggccacctgaggtgacccccaggcctccccggccttgtacagtgtacctctgtgtatctgtacagcctcgctcctgccaccccacccttgcgttctgcattaggtacttccctgaaaaccacgtgtaagaagtgatgcttttgccagtggatgatctggaatgcgaccggagcacttgctctgaggaatcccagggtgactctgtcggggaagaatccggtcacagcctcccctcagagacaggcctcagttcgagggcagcccattatctgtcgcagacatctgccatgtccctgagactgcgggaggcaggggatgcatgggtgtccccatctgtccctggtgagaagcaaggctagctctgccttccacatgcttctcaggatgccaagaggcctaggaacccagaaacccccttggaggagctgtgtaygcgggggtgccaggaagggcatagctcctgcccccaggcctaggcatgctgcttgctcggccatccccacttcctcctctaccccaacacwtgcaggctaggccttgccctggaacrtggaggccctgcccggggctggggcctagtccagcagccaccaaagtctggcagactttctgcatttgagaaacatgacaaagggccccgcagcccttytgcacccagcacagcctgcccagcccagccctscccccgggcactgcacagcctgtytgggggccagaccaccccattgtccatccttgttgtccgtgagtccttggcctccaccaagcacgtgtggccattgtgtgcctgccttagtgactccgtggttttgtgaggagcagagtgtgtatgatttttgcctyagaaactatactcttctgtgtaacagaccaataaacaacatttgtcaacactggagcctctgggactggacactgagagaccacgtgccttctttaagctccacagtcggccagccccaaaaggcgaggacggcaaaaaactaaagtttccaagagaggtactccagccgccagtctggagggtgtgggctggtcaggaagtcagggtgatttgatagccaaacctcaagtactcagcgcccttgaggggacctcaccccagagtcatggccccatctcacgatgaccagtggcccctctagcctgtggatgagagaaggtccctgtcccatccctaccccctgcctgccctactgaccaggctgcaatgagaagctggagcttgactatgccactgcagctgatggcaacggagctgcccctgtgggtgtggctctcaccccgagcactgtctgagaggccggaggggagtgtcaggaggagtcagaccctgctgagctatagacaggcccagctgtaacgggtctgcacctctcttcctgcccttccccaacccgagtgctactggtcccatcgtcgatggctccagggagaagacaccagtcacacaacatgtcttctaccctagaggacactggcttcctggacattagggcctgttttccactcactcaaagctgaagaccccagcccatggtcctagcaggctgaacccagctttattatacagagagagagacagacagatagacagacacagagtcttgctatctctcccagaatggagtgcaatggtatgatcatggctcactgcagccttgaactcctaggctcaagcgatcctcccaactcagcctcccaagtagccagggatgcaggcccccatcatggcagtttttctatctttttggtagaggcagaggctcactgttgctcaggctagtcttgaactctggcctcaagcagtccacccacttggcctcccgaagtgctgggattacaggcttgagccactgcatctggccctgaacccagcttttaggaaagagtgcaaactagtggccagagctacccaaagaaaccagttggtgcagagagagctctggggccagggaacttgatgagcccttcaggggaacacccccgacccgccagccgactctgttgcctggaggagtcagaattcctttgctgtgaccacctaaaggaaatttcacctagcctgggagtaacccttcacacacttccgtcctgccctactccccctgactactggactgggatcctgggaccagaggggatcccacagcttttcaaaacgatgggacagctggggcgggaagagcaagcagcacagtgggctctccaaacaccatctcaaggaacctttgcaatctggaaagtcaggtcttcctcttacagagcaggagctggtaaatggaagcacctggattcatactttatcctgaccacaggcccctttcttataagctccagctgagccatgggtgagtgagaactgtgggtgagggggagctttgagtacagcttctgcctaaagatttagtgacagccctcagatgacagccaagttatcactgcctggggagggtcttcatctgtgttcccagtgggcacagggcctggcactgagcatgcacccaggaagggttaaccctcaccctatcccttccctaaagcgtcgcttagtgagctaatggaagtgacccagctcttccaggagctaccagcagagggagcccgcgtctcacaagtaaaaagggcaggctcagtagggagggctggattccgaactttcattttaattaaaaaaattttttttgagacagagtctcgctctgtctcccaggctggagtgcagtggcgcaatctcggctcactgcagcctccaccccccgggttcaagtgattctcctgcctcagcctcctgagtagctgggatcataggcatgcaccaccatgcccggctcatttttgtatttttagtagagaagggtttttgccatgttggccaggctggtctcgaactccagacctcaggtgatctgcccacctaagcctcccgaagtgctgggattacaggcgtgtgccaccgtgcccggcctgaactttttgaagtcaactcttctctttcagaaaacaggacccaagacagcactcccttcctcaaggataacccctacccaccccacctcaggaagagacgcagagtcagtctcccctgtggggactgggagtcagtcaggtactgtcagggtggaaatgagaagctgggcccccttgcccagcctggtctccagcaaggcctagctagtggctccctgacctcacttcccacaccacctcctcccatgacagcctgcccagggagagaagacacagccacagggacaaggggcttccagcccagctgagaacacggctctttgcccctgacctccagcctcttcttccccttgttcctttcccttagaggacagctttatggactccccggctgacctgttgtaactgcacccccagagcagcccctcaggaagctctcaccctctgtgcccaatccctggggcaactcccctgtaccttttttattggatccgagtctaggactggccccaggtgccacaagggtggcagatgctgggtaagaactctgtacccagttcagaggtctgactgcagctccaacgaagtctccagctagccgtgtggcctcaacaagtcactgggccacctcaatcctgtttccttatctgccaaaatggggctaagtctggcttatttacttcacttggctgttgaaagatgaaacaagataatgcttgtaaaatggtctgaggaaatacgaagctttgcaaaagtttcagaccgaccagaactgccattttcagagcggcggaggcaccgggtcagagccgcttgaggactatgctgggcagacagggtcgagacaggtgatctcaccgctcctgccacatgcttccctacaggcctcagcctccttttgcaataaaatgacccagatgctgcaggctggcagctccatctcaggtttcagtgcaggtttatttcagttttatattttattccaggcaagtgcttattacatggatagtattcatgtctcggtaactaaagtcttggagcatgaacagccactagaatacagttcaatagtaaaaatacagtatgtacaaaattagggtttttgtagtttttttttttttccacacagcagatgtatccaaacacataaaaatctctacagtctggggtcgctacagtttatatttcaggaaacagagacacagtggccgagtcctcactgtaaacaagggccacctctgggggttgggggtgggaccctgggatggggggagaagcagctgtttctggagagagaaggggtcatggtggccccccagttaccctccaggcattccctgccttctttggccccccaaggaaccaacctccccctctccccgaggtaaggactcccagccagtgagccactctgaacatcaaaaggtaaaacacgcatgagaggtaagatgtgtgcgtgtgcgtgcgtgtgtgtgtgtgtgtgtgtgtgtgtgtgtgtgtgtcccaggctggaagggctagggagggagggccaggcggtcccacagggtgaggacagatgtggtcccgacagcactctgggggagacgcccaaggaagggctgggtggtgactgcccacttgggcacacagcatcacagcgttcacaaacgacaagaaaaacagcaacacccatcgtcaccaatctggacatagtcattcggcactagatttgcaggcccccgatgctgggggacagggacggggaggggcagcgggtggatgatgaggtatctgtgcaggcccgggggccactggcctcaggatgcagggagaggtgggcaggctgaggggaggggcgagctccacgaggctgctctaactgccccgtgggtcaggcctgccatcgctgtcacaatgggaatagcaaagctggctctcccagagccacggggtctggcggaggtggctgtgctggggtgggtacagggctcagcctctgaggatggtgacctggtttgtaactgtccctttacccacaccaggagagagaaataaggaacagtcccctgggaggtgtccaggaccaggagggaacaggaagggaatttttaggcatctaaggattctttatttccagagaaaatctattcaagacctttgctgacctcctctgtgcctgcagggcactccaggaaatcctcagctctgtcccctccccccggccccctcgccggcccaggcccctgccccagcccatcagtgtgagcttcacatccagggacaccggcttcctcccgctacactgaaaggccactggtgagtgtgtgtccaggtggggagccgagcgtgtctgacacaaagccacttgtaataaacacccacatacaaggaaaggccaaagcaggctgcccagaggcagagaaagccgcatcctaacacagagcccctgactcctcccccttccacgctcagccctgtccttgacccaaccaaggacctcttctcagagaaaggtgctgctgctctgcagctccccgggcagggcccactcaaaagcgtccccgggagaagcagggtgttgaggggatgggaggacagaggcaaaggggctggagcagaagcagcagccctagctctggccctctgttctgtataggtcccagggttggtctggggacaggcttagggcttggctaagccgctgggtttttaccttcctgatgtctcaacgatgtggcttctatgctcctggaaacaagaccagatgctggtccatgtctcccaaactgcaggaggcacccaaacccacaggccgccaggcccacctgtcccttggagcagtgcccagcactcagcagaggtcagagatcaggggctgaacgcaggacagcgcccctctttgctgccttctggaagccaagagccaagcccagggctggggactggggactggggacaggggcccagtggctctcctcccatccagacccaggctgcaggggacggggaaggggaaggacagccaagtccctccttccccacctcagcctgccctcctgaggtccagagcccagtggcagggattggggtgagggcacaggaagcttggcagtggctgggtttggtttattgttggtagagaatcattttaagtagtatctacggtaacgaatcacagtgactgcaaccgggtcagagagccccaggctgaggccccacctgtccgggtgggactccagaccagccacttcctatgatctgtcacctgtgctcagagcaaggccccttatcaccccaatccgcagctttctgggccaagtggcttcagttctgctttccccatttcccctccaaaggcctgggaagagaacatgaggctccggaggaaagccgggggcctgggccacctcaccagacagcaatagcagcagcagcacacgaaggcggggcagggcgggggagaagtcagggagcgtgacgtccacatcgcactgatttccgagggtagggaggggaagcaggagcggcactggagctggcactgggccggacaggtggcacattccatcagagtctcgcattttctcagagtcatcttaccaagtcctagtgcagcagggtggcccttccctcccttggctcagagtctttgcacccccttcccctaggaggcctgggggtgggtgggggggctggcctgggcctggctggaatgtgtggagctggtgggtgagagagtgggggacaggtccccctccctgtccccactgggggcctctgagtggcctcgtcctcaagccagcttgagtgtgctgactgggaaggagggcatggtgaccatggtcacagggttgagcacggtctggcccaccagctgggggtggtgcaccacctgagcccccacggccggctttgccatgacagtagccgggggccccaggccggccgtgccgttgacttg

SEQ ID NO: 97995 - DNA, 34615 bp, Homo sapiens
aggaaccacttctttgcaggccagagagagaaaagctggtccaggtcgtgcattaggaccctccccatatcagaataaggacccctcaaagctggacccaaattacctagggcaagcagagctgcgggaaaaggtaggggtttctggggagccactgcttggctagcggcgccattacctacatgaaaccagcaccgccggtcaccaggacccgcttcgcaaagccgccgggaagaccccacggttcctcccaacacgccgccgacatctcccagctcagcagtgcctagtaccgtaaagagtatggtctgaaaagcgcagggaagttccgccgcgaccttttgcgacgcgcctcgctcgcgggacacgttaacagagcagccagaggcagcttccggagactgctctgtggccagtttctgcccgcccactagcgggctgggcggggccgcgctcaccacgcgcaggcgctgctcctttccgcccttgcctggtccgccaggtgcaattggggtcgcccggatggtaggggtatggaacgtttttcccggaaatgccaccactatggatcagatttatgaatgagtaccttttttcattcttgtactacagccatctctagaggttacctatcagttgagctgagaacggggagttgttgcagatggagatgggaggttgcaatttaaaaatgatttttttttttagtggggcggggacagggtctccctctgttacccaggctggagtgcagtggtgcgatcacggctcactgcagcgtcgaccaatggggctcaagcaatcctcccacctcagcctcctgagtagctaggaatacagtcgtgcgccaccacgcccgcctaatttttggtagagatgggtttcgccctgttgtccaggctggtctcgaactcctgggatctagccaacctcccgcctcagcctcccaaggtcctgggattacaggcgtgagcaccgtgcctggcctgcaaaatgatcttttgctgttgttaatattatttcaggccgggcgccgtggcttacgcctgtaatcccaggactttgggaggccgaggtgggcggatcacctgaggtcaggattcgagaccagcttggccaacatggtgaaaccctgtctctactaaaaatacaaaaattagccgggcgtggtggcgggcgcctgtaatcccagctacttgggaggccgaggcaggagaattgcttgaacccggaaggcagaggttgcagtgagccgagaccgcaccatcgcactccagcctgggcaacaacagcaaaactccgtctcaaaaaataataatattattattacagacagcgcagaaggcttgcaatcatgataaagatattccctaggtcctacgctgatgtcttattctattctctcctttgctcactccgccccagcctccccaccctccttgctcttcattcaatgtgccaggcatgctacttccccgggaccttgattgtctttccccagatgtctgcctagtttttacccttacttccgttttcagcttgaatggcatcctattgaccaccacaattaaaatagcgagctctgcccaaccctgccgaatcatcttatccttctttatttttcttcctagcactcaacatttacattgatgtcactgccctctgtttagtgttccatgaggtcaggggctttgttttgttttctgctgtaatcgcatgtccttagagacttggcacagaataaatgaccattaaatattgtcgaatagataaatatctttttttccccaccataatgtttggcaaagctgaaaacgaatggaaacatccagtacaggtgtatatgtggaagaatcataccacaacctttttacaaggcaaagtggtaaaacatatgaaaatttcaaatgttcatattctatgaccccctcaaattccatgatgtataatatagataattgttcattgctgtattgcttacaataatgaaacactggaaataatctaaatgtgtataatgtcttctaacttttaaaatgcagtaaactgctatatagcctttaaaaagaatataccaacatggaatgaagaccaaaatatattgcagtcgatacgtacagtttttttctgaccagactcctccccccactgtcctttatgatctccccaagttgacccaggcaggccacagaatgaaatctggctgactctaggccaactgaagcctcttcttgggatttagaattcgactaaggtgctagtatagtctggttactctacttgaactctgaggtcctacaaagctggaactttttggtggccatgttctttcaaagtgaggagccagaaagcctgtcttcacagtgagaaaaacaaagttgattgagaagaaagaaaagataggaaaggcctaacattcaaggcctgtgttatgatttctcttcaggaccagttttattcctgtccttggtttacaaataccacatatatttgtggtatttgtaataccacatatatttgtggtatttgtggcttacttgaaaggattgaccctaaactcttaaaataagttacctttagggatgagatatgggcagggaaaggaggaaatggggagtttaatttttactttatatacttttgtttttttgagacagtctcgctctgttgcccagcctggagtgcagtgccacaatcttgactcactgcaacctctgcttcccaggttcaagcgattctcccatctcagcctccaagtagctgggattacaggcgcatgctaccacacctggctagtttttgtatttttagtagagatgagttttcaccatgttggccaggctggtcttgaactcctgacctcaggtgatccacccacctcacttcccaaagtgctgggattacagacgtgagccactgcgcccagcccactttatatacttttgactgtgaatttttttctgagacacatggattacttgcataataaagaatccttgcagttttttttttttttttttttttttttttgagacggagtctcgctctgtcgcccaggccggactgcggactgcagtggcgcaatctcggctcactgcaagctccgcttcccgggttcacgccattctcctgcctcagcctccccagtagctgggactacaggcgcccgccaccgcgcccggctaattttttgtatttttagtagagacggggtttcaccttgttagccaggatggtctcgatctcctgacctcatgatccacccgccttggcctcccaaagtgctgggattacaggcgtgagccaccgcgcccggccgcagttttttttttaaaaatccgaaaatattaatacttccagcatattcctggtcagccagaaatattgaaaatgctgtgtatatggtaggaggtggttcctcaatattttttttttctaaatgatgaggtctgttatgagaacttccttatatgttatagaagcttgttgttaaatgaaaataatttatatacatttattcatgaaataattttgagctcctacttttgttaccagtggagggtcttgactgcaagttgtccagtttcttggcattttgaacaaagaattggacaaaatgcacagcaaagcaaggcaagaatgaagcaacaaaagaatgaagcaacgaaagaacgaaagcagggatttattgaaaatgaaagtacatggccgggcgtgatggctcacacctgtaatcccagcactttgggaggccaaggtgggtggatctcttgaggtcaggagttcgagaccagcctggtcgacatagtgaaaccccgtctctgctaaaaatccaaaattagccaggtgtggtggtgtgcacctgtaattccagctggaagctgaggcaggagaatcacttgaacctgggaggcggaggttgcagtgagccgagattgtgccactgcactccagcctgagtgacagagtgatactctgtctcaaaaaaagaaaatgcaactacacagcgcagaagggcctggacacataatcatcttgggtccaaatactccctagaagtttcccattggccacttggagctcacctcatataaatgaagtggtggcccccaataggtctgattcttggggaaagcaatgaatcagaggctgaagtggagttacaaaggtcacactcctgtgcaaacatctgattggttgcaaaaagcaatgttacagagttacaaagttgcacttctatgcaaacgaagactcagctggcaatcagtctgactgggtagggacagccaatttcttatctgcctcacagaaaaggtggggatttgcaaagggcatagcctctggtccttttgttacttagggtggaaagttagggttttcctttaatagttctagaaagtcggtgtaaaaacgccttaggttccctcaccccaggccctattctcctgcctcactttcattaagacaggtatagccagcaaggtggcttacgcctgtaatcccagcactttgggaggccaaggcgggcagatcacctgaggtcgggagtttgggaccagtctgatcaacatggagaaatcccatctctactaaaaataaaaaattagtcgggcatggtggcgcatgcctgcagtcccagcttctcgggaggctgaggtgggataatcgcttgaatccgggaggcagaggttgaggtgagccgagatcgcgccattgcactccagtctgagcaacaagagtgaaactccgtctcaaaaaaaaaaaaagtgtagtcactgaccagctggagctgacaatagaggcggagatttcagacacatgaatggatacttacagtacagtgcgtgagtgctctggtagggaagtaagggattctggttccaggggcatctactacagacttaggggtttgagaaaggcttcttaaagtgccttgggaaggaggagtaaaggaggaaaaggaaggtgaggaggtccagtgttggaataagcagaagtattccagccagagggatcagggagtgatataggcctagaagggagaacttgggagtgttcaggaaaccaacggcggtaaggatggagatgagaaaaaacagacatttgagagttgaagagccatattctagagtttgggttgtgtgctaaaggcaattgagaacctttcaaggcaagtgcagcaaattgtttcctacagctttctgtggctgtagggtagagatggattgtagccaattagaatgaagactgtagagacggtctttgccataggccaacaaagtgatgaactgagtaggactgtggccgctgcttcccaccctcaccagaagaagggctaatccacacttgttattgaattgattgaattgcgggggggggggggcctacaattcccagcggtctggtctgcgggcgggggtgggggtgggggtaatgtaattcgagaagccagagaacctaggagggaaaaatcggctggagatgccaagagaaggcatgcgttaaattgtggtcatgcggagctaagtgtctttgagacattaaatcggacacgtcctgtaggttatacaggcgccaaggaagaaaatctgcataagaacacagttttttctttgcgggagtttaactctctcggccagaaacagtcctgtcctgcatttcttaagttttttccgaatcccacaagcccttcgaaggccccgcggactcgtgccagcgcgcccgcgcatgctcagtagcaagacgtgctaggcaatgaggagggagatgagttttccgtaacctgaagcaacatccgcctgattcctcattaaagaaaaaggcgggaactagtcaaaagccggggactgatgggacgctaggatctgcgcgtcccgcccatttcggcctctgactggtgaatgtcttcggcttatggcagaggagcccgcctcattggctctcaggctccagagcagcaggtctccggcgcccaccccgcctcccccagctgccgacgtggggcgggcagccgccggcggctgggagccgaggcgtcggtgcagacctggagacgggcatgggggggctgcggctgctggctgtggccctcacgtgctgctggtggccgcagggcagccagggtaagaccctgcggggcagcttcagcagcaccgcggcccaggacgcccagggccagcgcatcggccacttcgagttccatggtaggtctgggggcggggagggggatgaaggcgcgctggcccatcccgccggctgrgtccgccggccgctcctcccggcccctccctgccacgttgggcgaggccggcgacttccccagcctcacctggacctccagcgttgcagcagctgccgcgaatggtgggatgcgttccttgccaaccccgctggtgcggctttccagccccaggcagcggcctctcgccactagtgatcgtgttccgcacctgaaagctggtttccatttccccaacccyccccttggaagccaatgtgcaaaagactggtcggccgcatctttccagatccttcccgcaaagaagcatatttgctccttcctgtctcggccacactgtgacgggagaatttaaccctagaaacttaaatttccttttttttttttttttttttaaagaccaatttcctgagacctacttgcaacagagtggttttggaaaccaagtaaaacacttgataatgtagttgttatattgagcagtttggttacttggctactagggcagtagatttactatgggcagtaaggcctagaattaagctgatgaaaatgcatttaagtagcatcttggaagctccctaatttgtgttctgtgtggctcttctgaaatcagagttgcgtttgatttcagaccttttggtcttcctcaaaaatcagtaattattccttcaataaatgcatttgcaattcattctaattttggtctcatttgcactctcacaatttaagtgtttttcttggtactcttaatttgactagtgctgtatttcaaataattatttgccttgatgacattaggaactttgatttgtacagtctttagcattaaaagatgcaacgatgaacatcagaatattggcctagaaaatattgttaggagaagataatagaaacggaactactttggtgagaaaaggaatttaaagtattgggaaattacagaattgacagaataaagggaagggatcctgattttttttttttttgaagtttttaagatagctaagaaaaggagtttcagtaacccagtttttcaaaatccaatgtggaatatattttgggtgaatgaagaagaaacactagaaacaattttattattttttgtaacattttgagtttctcattcaacggactgtaaccatactttgagtattgacagccactgtcttaaatggcacaatgtggacagtgttggaaaatgtgggatgtatagaagacgtgggttattacttaggaccagcagagagacttggacgacctcatagttcctgatgatcatctggtaaacgtggaggagaaacatgtactaaattcagatttctcaagacagattggggataaggtgtttcaagtgcgttcattctgtttcatatgtgtaaaatcacatatagttattaccaattttcatgaatcccaattcagtaaaataataatacaaaaactatactgaaacaatgaactgtaactcggaatgcaatttacagtgtcaattgggcctcagagtcacttgtaagacttcaaaatatgtaatcaatttatgtaagagacttgcacattctttgatatatatactgtatatttaaatatatttaaaatgtttaatcaaagtggtaattatagtaataaaagcatagaaaaaaaatttccaggagaatagaagatcttaaaatgaaaaacagtctcctgtcttagctctttcacccagaatccctttccctagaggcaataacttactgccatttctgttctgggccttaaatgtagttggtgtgtgcaaccaggttcattctgtattcatcttacaacatatattattctgaaagttctttttttttaaaaaggaagccagactcgttgggtggctcctgcctgtaatcccaccactttgggaggcagaggtgggcagatcacttgaggtcaggagttcaataccaacctggyggctgggcgtggtggctcacacctgtaatcccagcactttgggaggctgaggtgggtggatcacctgaggtcaggagttaaagaccagcctagccatcatggtgaaaccccgtctctataaaaatataaaaattagccaggcatgatggcaggtgcctgtaatcccagctattttgggagggtgaggcaggagaatcgcttgaaccggggaggcggaggttgcagttagctgagatcgtgccattgcactccagcctgggcaatagggcgagaatatgtctcaaaaataaattaaaaaaaaaaaaaaagaccaacctggccaacatggtgaaacgctgtctctactaaaaatacaaaaattagctggatgtggtgatgctgggtgtggaggcgcatgcctgtaatcccagctactcctactcaggaagctgaggcaggagaatcaggagaatcgcttgaacctgggaggtggaggttgcagtgagccgagattgcgccactgcactccagcctgagtgacagagtaacactctgtctcaaaaaaaaaagagttttgctctgtcacccagactggagtgcagtggtgtaatcaaagctgactgcagcctcagactcctaggctaaagccatcctcccatctcagccttctgaatagctgagactacaggctcagccaccaagcccagctaattttttttttttttaaatagcaacaggatctcactttgtttcccaggctggtctcaaactcttgggctgggaatccacccaccttggccttctaaagtgctgggattacgggtgtggccactgtgcccagcccctgaaagttcttttgtaaaagtcgtagataccaaattttgttttaggtataatatgtctaccccagaacacatacatttaaactttcctgctattagctatgtttattttttatattaagagtataattaaatattaacacctatgtcatattaaaaaacagaaactttggtgggacatttctatagattatgaataaaatataaaatgtgaagtggttgtaaagtgaggcaaaaattttaatacagtgaattgttcaaataccccagatattgcggtttattgagtgaaatatcagttatcagctgaatttcaaggaaataccacacgttcatttgaataatctcttgcttctgaatgttgtgttcattatgatgtgatttacctagttaagcgagatttaagaagaattgtgctttttaaatttccattttggtaagtagaggtgttgagttgtcctcatgtctcagtttcatgtaagaccaaactagttgatgatttttgttttaatgtcaaggtgaccatgctcttctgtgtgtcagaatcaacaacatagcagtagctgttggaaaagaagctaaactctacctgttccaagcccaggaatggctaaagctacagcaaagcagtcatggttatagctgtagtgaaaaattatccaaagctcagttgacaagtgagtatatccttttttctttgatcattagatatagtttttttcctcctaatgttgaaatatagtaccatatgtacatatgttatgtttcctgacagcataatcccactgtgatgacactttgtctagtacattttaagctgagttttaacagtgcctttccctttttatcattcatcgtttttgaaaaaaaaatccagataatttatataggagtcctttctttcattgactctttacagtttgcataatttatgccaatatggaaactatattttgacccagtggcagcatggaatgaatggtaacatttgttgaatgctaattatctgccagcactgagctaaatgccaatgtattatcttagttaattgggtaatttagcttgagtgatgctgtttcacaacatgtcatttgaacatgagacttagttatatgrtataaaatatgtcactttgacagccaggtgcagtggctcaggcctgtaatctcagcacttggggaggccaaggtgggtggatcacctgaggttgggagtttgagaccagcctggccaacatggtgaaaccccgtctctactaaaaatacagaaaaaaattagacaggtgtgatggcatgcgcctgtaatcccagctacttggcaggctgaggcatgagaattgcttgaacctgggaggcagaggttgcagtgagccaagatcataccactgtactccagcctgggcgacagagtgagactttgtctcaaaaaagtcactttgagatgtaccaccaccacatcatttgtatacttctggatttgcctctagagaggctgtactttttaaatcctaatctagtggcttaaatccgtgatcccattcattctcatcaacattgtcctgtgcattaggttgctagccatccagagtgagtgaaaatttttttaaatacggaaatgaagaacatgtgccattgtttccattttgcacctcgcaagttaattaggtgtagaagacattagaaatttgaagcatccatgaggaaaaatgggaattattcttccctttttcctcttattattcagggactcatccatatatggaacatggtagtctcttctcttagcctattctagtgaagcattcatttctaaacatcyggcttttatcttatcagctgtctgattccctcataaggcaactagctagatcagtgaaaagagcagaggtccccagtccttgccacccattgtggggatctttaatgtagatttgtgagatgatattgtgagaagatagtatcctaaagatgaatgacaattacatacaattatttactttgaccctgaattcaaaacttatctgggaaatacatgcagattctcttgattggttgtctcttcctttctctgccagtttgctcatctaagtgttgcacatatgtgtaaaaggtcatgtccttcagttcccaattcctctggcgtctaaactgaactcaccatcttccccatccagacctggtcctcttctgatgttccctgttttaagaattggcaccaccatccatccagtaaacagttgagaaaccaaggtgtcttctaatactcccctctttgacctttctaccccctcatacatcagttaagtcttgaggttttacttttaaatatctcttgaattcatcttgcctttgctatttcgacagtctcctacgtggttattttatagccatgctggtcccccttctgtaactagatctttctaaatagcagatttggtcatgttacattcacttctttaccacacccttaaaataaatggtttcccttaacctgaccgggcctccttaacctgaccagcaaagccattgtagactggctgctgcttacctctccgtttcatctcagggcattgccccactcactgcattttatttcagtgctactctgagcctttgcataggctttttcctcttcagcctcccctctggctcctccgtcgattaagttaacacctaagtttttatagcctcttgctttcctgcatagcacttactatagttaccactttacattttatttatttgttataaaatcagtcaatgagagcagtagggctcttctggtgtgttcattcactgagcgcttccactgtttcatgtactgctaggtactgttgatagatcagtgaccaaaatgtccttaaggctggtggaggtgaccagaatgaatcagatgaatgtgaataaatgtaaaattgcaattttgataagtactatgaatgctaattatatggcactatgagaatgagaattgatgataccccggtgcttagttaagtttttactaagtatttgtagaatgaatagtcgtagaccttcatgcttaagggcttgttgtttggctggttgttagctttttgtgtttggcatctcaaagactttttctatctccaacaaaaacttactaggcagtttaaagctttgagctataggaatattgatttgttctcttgtatcacatagtcagtatttatatactttatacacttaaaaacctcattttcgtatgagtcatattcctgtattcccagaacttctgtatacagggagacagtgtggtgcaatgggaagaccataaaactgagtatcactgctagtgatttataacaagaactcgttatctttgaacctcattttacttatctgtacaacaagcaagttggactaggtgtccctaaggttcatgatagttccaaaatgctgccattctcgttataactcttaaggatggagttacttatgtataggactacaacttaacaaaaccttctgctgttgtttctttttctagtttctctttcttttccctgttctgttaagtgcagaggtatattttgaaattgtggaatggaagataacaggtaacaggaattttagaggaatgaaggttgttttgtcaaattttggggcttaaaataaatttaatactgatttctacatatatgtacttcaccaatttttttttccaataacaaaatccaaatcttaagtctctaacttttatatattgtcatatttatggtatgttatttaggagcttaggtacatttaaacaaaaagcatatccttaaattcatgatgtaatagtaacacatatttaagaatagttccttatagcaagtgcttttcttagctattaatgagacttaagagttaacagcctttcacctatttggtaatgaactcagtaactctgcccagctcctacgtaaaaccttgctgctgctgtgtactatgaaaagactagcagattagaaaaatcttagtgttgaatgttgcttgactctcccaaattaatgtttgaaaaattatttttcagtcatctctttgttctgtcataaaaatctgatttaaaaaatactaaaaactattttgtagatttttaaagcaagcaaacaagacatttgaaagcactgaaaatgatgagtttatgtatttctatctaaaacttaacgaggagattcggaggaattttctatcagattacaagagctaaatgtaatattgtatataaaacatttcagtgttgtctttttacatattatgcatatgattccttttgtagtttggtatattttataaatcatttaaaggtgttagtattttattgtgtgttttggttaacagtattcaaatccttttataatatgattggataattagctattcaacaccattctcagcagttcaagttttgttaatatttgaggtactaattacaccagcatagaatatgcatgctgtgttgtagtcttttgtctcagaaacaatgaacacacagttttgtcaagaggcttgtttcccagccttgccgaaaagacagcaagacaaaaactaaaggccggtatcactttatgaagcatacttttatttctgtttgaagtaaatccacataatttaaaatgaaacatcaaaaatatattggtaaargtgtgggttttttttatattttatctaagagaaaaagggcaaatgataaaaatggcaacacagcagagcctttatataatgaggtccggattatataattgcaaattgcacatttaaacagtcttatttgtgaatcatttattgatcatatattaaattcttactaaaagtcttccaatatttaacagaaactagagtctttgctacatttttccagaaactgtatgtgtgtttttttttttttaaaggtagtttaaatgtcagctaacttatagtagccaaaaagcaatgccatggtggtggtaatcagatcctcttgttcaatttaaccaccaatgaacgaaattcccagttgtacagtccaagtcctcaaaattcaaatcctgactacatctgtatctcattcctaaagacaacctataaataacatttttccaactttccactaggaaaatttcccaacatacagaaaggttgaaattatagtacaaccagcatccatatatcctctgcttagactcaataattgttaatattttgttaaatttgctttatgtctatatgtatgtgatttttgttttaattgaaccatgtgaaaataagcagcaggtatcacagtttgccccaccatacctaagcatacatcttctaagagtaaagaaattcatctgtttaactatcatacacctaagaaaatgagtaattctataatgtcctctgaaatctattccatacatacatttctagttacctcaagaaatgtcttttatttattaaaaatgtttttttctacaattgagaaaaagattaagactaatttgtccttaaatattgacatgttttgggtgcaatctagagttgggaattgggtccatcataatactgttttaaaaatactttgtgtagaatcatgctctttccatatacttttcatttgcccctcacaagaactctgcactagcagggcaggtatctttatttgactattgaagaaacaaatttagagagtttgtaaatttatttgctgagtcgcaaggccaagactcgctcttctaactctactctttttgttacacccagaacttgagacactcctctcctaggcagcttcgtgttagtgttagtcagtgcctcttaggtcaggtcagattcagaaaccgcaattacttttgcaccaacctaatagttttaggtccagaaggaatcttagacatcattttgtgtttctcagaagggagtgccgttggcattttagggggaataattctttgcatgaggttcaacacagcccccctccaagtatctaaccagctattgtgacaaaaaactatcccctcacattttcagatgccctggaggaaaggagattaccctggattgagaaccacttactaatataactaccttgttttaaagaaaggaaaagcagaattgacatttagcaactactctgtgacagttaccatgctaggtgactcaaataacttagtgcttatatcagccctttgctgtaggtagtatcttcattttacagatgaagaaagtgagtgtcattgcttatgtaacttacccaaggtcacacaacaggtaagtattgaagccagsattcaaacatacatctgaatgatgccacacaccccccacccctgactgtatcatactacttcatgtggacctgatccagtataataacttctgcattcctgtaatttctattttttctgctttttgtacacctttaaagaacaaccaatcagaaaaagattttggaaaatcttttgaaaatacatagtttttagatataatgattttgtaagttgaatgctccattttaaatttaactcgagtaatcttcaaaaatgtcactgtgattgttgcacagcattgtagatgtgcttaatgccatagactgtacacttaaaaatggttaaaatgatacatttagcattgtgtatattttaccacaataatttttttgaatgtcattaaccaacccggaaactgtgaaaatatcgaaaatcaaaattcaaagtttcagccgccgagaccaagatggtggcgagacttggcactttcctcaagaatgcctgggccagggagccagtgctggttgtgtccttcatcattggtagcctagctgtaattctgtccccactcagcccctacaccaagtacttcatcatgatctacgagaccatgccctacaactacccattgcccgtccgcaatgatgggaacatgaccaatgtgcccggccacccccaggatccccagagctccagcttggagtggctgaagaaactgagcacctccactgacagaggaggcccctcccatcgctcccaatacgaatgtgaaaaccaaaaagaaaaaaaaaaaaaagaattcagagtttcagtgaagccattctacttgtggtgttttatagtcatacttttatagtgattccttggttaaaaacatcatttttatctcctttgcagataaattctgatttattctataaatatctggtttacaagacttattccaaatactacacaaggtcttggatttctgagacaataaaaattaaaagattgtcctaacctcaaattgattatatgactaaaacagtgaaacacatttgagaattttgttacaaaaggtgttttctttctctttaaagtgaccatgaaccagaccgaacataatctgacagtgtcccagattccgtctccacaaacgtggcatgtgttttatgcagacaagtatacatgccaagatgacaaggagaattctcaggtggaagatatcccatttgaaatggtgttactaaacccagatgcygaagggaatccatttgatcattttagtgctggagaatctggtaagaatatgtatttgaatatatcctaaattcaggaaaagatttatgtacaaatatattcatgttgtatttttaaaatcaaaaatgaaagcaacctgtgtttccaaaactagagaaatggttaaattaatcttcttatagcattttgatagccatcatattaatttttaaaagcagagtattacttgagtgtattaaaacctgcaaagaataaaacagaaagaagcacaaaaatattaatagattattttgatactctgggttggtagaattgtatagttttgtttgtttgcttgtttgttttggctccagacaggaaacaacttgtgtagtttatagtttatacattctaaacatttttgtttttatgataaccttgcattatttttataaacagaaaaatggtaacaaattaaacaatttaaattgttaatgattaaatgagattagaaactcagctactttgtatgggtaactctgtactagcttgtttgaacagatttagggattgccttcattgaagcttacaacaatttagggatgatcagagtccataatacttctcagaatcagatgtactcatatgaaatatttcatcaaaatgttaggtaactatgttctgtcctactgaggtaagattccacccccagcagaaatgaatgacttcttatgatcatgatgaacatgctatgaagtataactgatttgtaaattaacatattggagtaaggatttgtaggccatctgtcaaagaaaagcattaagggtttacctcttcatgagttcattggctgtttgaaagagtcaatctgcttaagagaaaaatttaattccattgtatcccattggccatagagtggggtgggtggaggtgaggcaggagtgaggccacattagcttaaactgattgtttagttcaaagtgtaaatttgtcacagctaaaaaagcaacttgagaattgtgacagtaggtcacaaataatgttttaagggataaactttttaaaaatatcctttgtttggaaaaaacatatatctagtgatagaatggtgtgctaattttttttatttttattttttagagacggggtctcgctatgttgcccaggttgtctcaaactactgggttcaagcaatcctcccaccttggcctcccaaggtgttgggattacaggcgtgagccgctgcacttggccctaaatgttttaaagtggttaatttgaagttctttctgtgaaagaaatgaaatagtgtaagctactcaaattgtttctgaatgcagatgaatgtaaaggttaaatttcattaatgatactttcgactagtatagatcattattggaagttaatttagtcctttcatttccttaatctttttaaagatgccaacttttttctgtattttggaaaggcattgatggaacccaggtctactaagagcattgaatggatggttggactaaattgctcctcaggtccttttttttttttttttaattttattttttgagacagaggcttgccctgtcgcccagcctggagtgcaatggtgcagtctcggcccaccgcaacctctgcctcccgggttcaagcaattctccygcctcagcctcctgagtagctgggactacaggcacccaccactacacctggctaatttttgtatttttagtagagacgaggttccaccatgttggccagaactcctgacctcaggtgatctgcctgccttggtctcccaaagtgctgggattacaggcgtgagccaccgcacacagccttcaggtcctttttaactgtaagacttcattatttcatatgacccttatttttaggactggtcaaggctcactaggaagtaatgttctgctgcagttgttgcatgtgcaaaccctgctgcctctagtggagtacagatcaattagcacttcctctcctgccttccaggctgtagtcctttggctcaaaaggtggttttatgtattgagtagatccatgagacttttctggatcctgatatgcttttacttgcctccttatccaggcttccatttttggtctttttcttcatcaccaatttggcatgtaaacttttatcccaggctataaagtgatcacatttgtgccctgtgccatgcttggacctctgaatcccagtcataccttgccttgtcctgaaccttgcctatgtcttccagtgttttcctcaacatcttgagttgtggctagcttttctttatgatgcatactaaccgttatgattcagttcttagttttgtctccttctgacctaccttttcctgatttttgtgactgattttgattttatgcttactcttgtgtctaaaagctgtctttcttatactacaatggggaagttacattgagtatgtcagcaacaatgtttaaacaaggggcaaaacctcactataatcgtatgtattttcattaagcatgacattctatgcaaggcttaccttcggggattaatcattagaaagtgccagaagtatccaaaagcgtccagccttgttatgtggcttcctctaaacatcacatcattttattgattaaaatgcttaaaagcttttgtgaataactctacattgaagtatcaatgagtggttcttaacccatcactgtatgcatctggtttaaggttatgagggttaaaacaaaaattcagatattcacacccagagactcagatagatttggtttggagtggaagccagttaaagctctaaagttgattcttatgtacagaaccgctgatctaaaagtccatatttcacattgttttagtaatgtgttttaaaatacagccttaagagggattcttcctactttgtagcctcaggtatggaatttgtttacagggaaaatgttcarttcattttagaaacttctgctagtttgcctaattatctgctacaagtaggaaaaattgatttgctatgctttttacagaaaattgactattaccacatgtctcagaggtttgaattagagtaacctggtgcagatagttgcaattaatgttacaggttattctggttaaatttcataatttgttttctttcaaaccaattatgtattttatatctaccagactttggttaatcctctattttacagagttggtctagattaaacaaagtcaggcaagtgtgatgccgattgacaaagtactaaataggattataatattttaaggtacaatgaaataaaactgcttctttaaaagattagaatccttgttaactgtatttgtactctaattagagaccaagaagtacccagaatcctgagagtgttattacctaaaggcgcatatagactggttttcactggaataatactacaggctctgccacatctgccatctcactgtttttaaaattctagcagctatgttcattctttagtgttatcccttttttcctccatgtcccaaaagacaatgggttggatcttccatttagcttcagtaatgtgttgctggtaacatgttggaatgtttttggcttaaagtaacagaaaaccctaatgcaagtggtgtagactgtaatgaaatgaattatcttacataacaagaagttttgcggcttctccagggtggtttatttagcatctctctaccctgctatcctcagactatcagtgttgttcttaagctagctgcctcaagttcaaagttagctgtggcagttctgagcatcatgtctagatgattgcaatattcagtatcactttttaggaggaaggaagtctttcccagaagcttcctatcacatttcctttttcagaactgggtcatagcatcataagagaaatgtaagttgacatgaaagaaagaagataaaagtagacaaatatgtcaaaagggttaggtttacctcctactggtaagagtatgggaatttctgattgatttagactaatcaggatatatcttgagacacgtgagtgtgggagaccactggggctctgagacaaggatcatggggaggcgggaatgtctgttccaggtgctgccccagaacccaaggaccctttccccttaggctctcctcctttctcatttaccatcatttagctggggctaaatttattgaagctggcctctaagttttcttgctactttattttgccaatgctgcttcctttaagcttgccttaaaccttacacatttccttacaagtgttcaccacctgttgtatgctcattaagagtatttttcttcttcagtgtatacttttttcatgtgtattattaagtcttaagtataataagatktaacaattagtatccacctgttttaaaattagattttaatttcaaagtgaacaaagtgaacacaaattgagtttaatttcaaagtgaacaaacaatttttgcttgtggcaaaacaaaaaattggtagctgaagagaggaagaaaacagacttttttaaagagatgatttgtttaaaagaacactgagtgcagagctarcattttatcttttaagcattttatgtacagttttaagggaagaatcatctaaaattcagtgaataaagtgtgggacagacccagttcaatttrtttaatatgttatgtcaatgaaataatttttgtgttcgttataatgttagctttttctggaagattattaactttgaataatcctaagacattttttgctggtgacatatatcttattttccagagtcccttccttctatattattctcattcctcagtaaataacctgaggattttcttttcatggtagagttgtaacttcatggagtcagaaactttatcctgtaagtcagaaactttaaagatattctgtaaaatattataaataaataaaactttaaattgaatgccatgtttaattttttaayactaagaaggaaagataaaaactaagattcaaaacacaggatagcataaggaactttactgacccacagttgttataatatatttagcatttttattttctgtcttgttccggtactataataatcccaggattatgttgccattatttctaaggctggaatgcttttctatgtaaggtgtttaaaaagaaaatatgttctttcttttcccttcctgaagtctaaacatgctttttcacctgcactagaaaagttaactgtccacatttatattcatagagcaggagagacacccagtggcagaaatactttttgctgcttttttccccctaacgaggccaaaagcctgattgagctatttattgattcttataatttgtgtcttctgattgcttttacaaaattattttccacataatagaaatattttcttctctgactgttaattggagtttacccgaatgggaaactagagcaggcttggtgttcgctattggaatgaaagttcatccatagactcaattaagacagctctattcacaccactgttagagcagtctggtgttagatagaatgtaaaagccttaatattagggactgtcttgacatgtaagcaagtaaatgttagctgttaaactgaaagctagcctgctgctttattataaaaattttctgaaatttctgaaaaatggagactcagtcaaaagattgcacgtgaacacagaaaaagtgacataataaggttacatgaagactgtactaaaaagctgctagtaggcactagaggctgctctaatgactggttccatttttaatacaaagtctgcacattctttgttctttgccagccrtctgtctttcctcacttgtaatttctactccctcaaaactttggtttttatcatggctcagtttgattcgtctggcctgtcccaacatcagctcctttcaacttcaatttctatggcctctttcctttctgctttatagtttgatctactaagagaagatgattagcctaacttagctttcagaattgttacgttgttggccccttgcattggtagccatttggttaggtgttagacaattttcagccaatcctggcatggagtcgcatgatcagcacaggatttttttttttttttttggcaagagctgcagacagtttatctcagaagatatctctggacatgacagatattttgaaggtttgtccaaatggaaattcaaggtattgggacattccagagctgtggtcctcatgtgttagctatatcagaatcatgcttagggcttactaaagcacagattactgggctctactcagagtttctgattcaatagatcaaaaactggatggcactcaagaatttgcgtttataacaaattccctggtgatgctgctgggcaagagaacacactttgagatgcattgtcagggcatattaaactgttattgactgaggtaatctatttctaaactttttacaaaagaaattcactttgggggtaaaatgtatatctaactgaatgctgaaatcattattttcatttactgttttcaaacaaaactgtgattttatgatgagtctttgggttcccctgaccattatgctttcttacagattgaccttaactagtttggtttaatctgctttcttgtagttaaaattttgccccaaggtacaaaattgtttaagttttaataattttttttctcttacaaaggtgaatgctatgactccagttaaaaaacaagttctagaaatatattgacagggagatttgaaagcagcccaatacgataactggctttgttttactgaagcaaactccctttcttctcttcacagggttacatgagttctttttcctcctagtcctagtgtactttgtgattgcttgcatttatgctcaatcattgtggcaggctattaagaaaggcggacccatgcacatgattttaaaggttctgacaactgcattgctgttacaagctggttcagctttagctaattacattcatttctccaggtaactcaaaaccactaaaactgtgttcatcattacatctaattaatcctaattagtccaccaaaattatgcttgctttgattataaacaatttttttcacatttgtaatttacactactcttcttcaattcctcagttactccaaagatggaataggggtaccatttatgggaagtttggcagaatgtgagtatctttctgagcattttttaaaaagcttttacactcgctatctgcttttttttwatttcttgtcatagtataaattttctgtcgaaaattgtttagaaatcagcttgactgagaacaggattacagtttaagttcccatatgtcttacttagtttcttcttaataataggtaatgtgtacagctcctcgttgtttttttgtttgtttgtttgagacagggttcttactccgtagcccaggctggagtgcagtggcacagtcacggctcactgcagcctcaaactcctaggctcaggtgatcctcctgcctcaggccttcccagtagctgggattacaggcacataccatcatgcctggctgatttttaaatttccttttctgtagatggggtctcactatgttgcccaggctggccttatactcttgggcttragggatccacccaccctggcctcccaaagtcctggaattacaggcatgagtctccacactctgccttttcattgtttttaggtatatttatatacattctctcatcttatcctcaatagaaaaggggtctgcatatccttattttgcagataaaggatctgggctcagtgatgtgaaacatacttccacatgtcagtcagctattgagtggtagagactagactcagacctaaattttcttacctcaaagctgaagtttttcttcctattataattccactctctgttataactgactcttttctatttctgacccaaagcctaaaactcacatcaaaataygctgtgaagaaaagtgataagttttcttaaaaatcattaaatgctacctcataaaataaatatatatatgaaacttgaagcatttatagatttctgttgttttcttgtagtgttaacctggatacaggtggttttgatacatcttttctgtttgaagtagcaggcttcccctgcagtgtaggtgatggccacctggtggcacatcacactaatgcatggagcttctcatttgtcttcaggattctgaaagtaaagccaatgtttggatgttatgggagctatgcatttcattgtattgtttcttgttaatagttttagaaaatactcttcacattatagttcagccatcaaaaaaaattcacccagaaatgaaggtactagtattctccatattgcagaaatcgtatttakaatttgctttaataagcagtgagttatagagaacaggattatgtagttagaaaagctaagaaaaatgggaaacgaaaagagttaaggttggacttaatggacatatggtatgggcatatatatgtatttttaaatagtattgctgctgttttaactattttwataaatatattacaaaatttatggcaatttttaaatctttagaattattacctgcgaatatctcttaatgaatttcgttagcttctctttgaaaatggctttttgtggtttttcttaaaaaaaaaaaaaratgttctcaatgcaaaaagcactaaattttttatattgtgaaaacttggttgacgttggttttcatgtcccattagtttttgacatcgcttcccaaattcagatgttatacttacttttgagtctatgcatgggttggacaatagtcagaatgaagaagtctcaaagcagacctctccagtgggattctacrcctgcatccactggcattgcagtattcattgtcatgacacaggtgggtattgatactcagtgtttctgcttagtaatcctcagaaatgcaaacttgagcatacctcatttcagaattgaaacctgggacccataaggaatttgtgtcattttttttttcttgaaatttctgagcttctacaatttgtgtcatttaaagtatgaatttaaagagtgttagatcaaataatcttaattatctggatgctactatatgtagactgcagaatttaattataatttacctgaatttgagctcctatcagcttatttaagcacagtatgtttaatactaggttagagtcttatttcctacttaataatagctttctttcatatttctctagcacatggtaagtacttaacactgaatgagtgattccatgaatttgagatttatccattgtcaagaatctttaggattggctgctttgtacgtaaaagaattcaggtgattatctaagattaattaaagggcaaaatatagactaaaaaagaatgggatcttgtttttgaaagcaaatgtaaaaacaaaactagtcttttataaaggtcctgcatgcctttttttttattttcctctatattaatagtattgacattctaagatacccatatgcctatgttcaatggatttgtaaaaattaagaagaaaggttataaagaaaaaaatttgtactgagtttttgatgagcattagctatagatgaaaatgaattatatacttaggctctgtagaggacattataatgtaagtttaatgcattaaataaattgaaaaatgtattaatgaaggatggggtcagtgctttattcatctttctatccctagtatttaatatagtaggttttgagtggaataggagtattgaatttacatgaatgatttgagagagaccatatcacaggtggtgatatttagaaaggaggtagtgccaggaaaggggatgatgagaaataattgaattagaagaattgattaaaataaggttgagattctaccaacttaatgtttttgagccaggacttatggagagtagtgtcaatgtcaggttaaattctcactttttatttctttttaaaaatttcatttttattatttcattgtaattttaatttattgtcatagacaaatatgaattgagaactgagataatattacactagagtttatatgaacatttatgaagaatacattaaatatagctctgatcttcaacaagccagacaaggcagatcagacaggcagtcagagactatacaaatacatacktattttatacagatcacatattagcatatgtatatgaaaacagggaagtttgaatatgtaaaaatatgaaccatgggctgtggtagctctgtggtagcacttctgtattgcaaaagtgaagttcagaaatgttggttaagaaatcaggaacctccacctcctgggttcaagtgattctcctacctcagcctcccaagtagctgagattacaggtgcccgccaccacacccagctaattttttgtatttttagtagaggtggggtttcaccatgttggccaggctggtctcgaactcctgacctcaggtgatccacccaccttggcctcccaaagtgctgggattacaggcctgagccactgtgcccggcagcaatagaattttttaaaaatctcttaactgtggtctcacttgataaaaattcattttgtctagcttagggtattagagtgatgaaaagactgtactttattaattaacaacctctatggtctgataggaatgtttatataacatttaaagggatgtttattaaagagttgaaaaaaatattgtaatgaggtatatttttttttcctaaatgtaatattgtttttcttttgcagagtgttttgctactttgggaacagtttgaagatatcagtcatcatagctaccattcacaccacaacttagcagggatcctcctaattgttctaagaatttgcctagcattgtcattaggctgtggactctatcagatcatcacagtggagagaagtacactcaaaagggagttctacatcacatttgccaaagtatgggtttggaaagaaaatsgtttattctgattatccacttggttctggtttctttgggaagttaataaacaactacatgctaacttttattaaacttctgggttgggcacagtggctcactcctataatcccagtgctttggaaggccragacagacagattgcttgagcccccaagttggaaaccagcctgggcaacatagaccccatctctacaaaaaattaaaattagccacgctttgtggcgagcacctgttgtctcagctactcaagaggctgagatgggaggattgcttgagcctgtgcattgaaggcttcagtgagccaagattgggccactgcactccagcctgggtgacagggcgagaccttctttttttcaaaaaaaaaaaaaaaaaacttctgttatgtgacagacactaccataagttctttatgtggttcaactcatttaaccttagcaacttatgtgatgtaggtattatccctattttacaagacctgtgagacagtattttccatatattctttgcgggtcagttttgcctggttcatagtttcatcaatagggattttacatttttttctgtaataccagaattttaaatttttaaaatcaaatatggtttggatttctcaacagttattaattgactataaactgttattctcagagttatgcagtgttttataacagttaggagctatccttcagcataagcagctggagccaggaggctgagtccatgtgtttcagccagcctcaccccatccacatgagatcgtgtcactttattcctcctttcttgaccttcttgtgctagtgagatctaaaagcaaattcagttttttttctatacaggagaagggttagagcagtaacattatagaaccttccctccctagaaggtttcatttttctgtcagattgagagaatccataccccttcattttagccctgcgaaccagcattctgatcagactgattctgttcaggcagcccaccttgtccagagttattggccgttattctgaggcagctatggaaggagagccagattcctgctttattcctagtgttgagcattgcaaagctgctgctgctgcagccctaagaaccaacttcaggcttctgagcgcaagacaagaagatgtcatcctgcctttgagtttttcasagggacagtagtgcttattgtttgataagttaatatgtatttgaggtgtttaggcattaagttttcttattttgcttttttcgttgttgtttttgagacggtgtctcgctctatcgcccaggctggagtgcagtggcgtgatctcggctcactgcaagctccgccttccgggttcatgccattctcctgcctcagcctcccgagtaactcgcgcccacgcccggctaagtttttgtatttttagtagagacggggtttcaccgtgttagccaggatgctctcgacctcctgaccttgtgatatgcccgccttggcctcccaaagtgctgggattacaggcgtgagccaccgcacccagcctttcttttttaagatggagtttcgctcttgtccaggctgtagtgcagtggtgcgatttcggctcactgcaacttccatctcctggggtcaagcgattctcctgtttcagtctctggcatgtgctaccacacctggctaatttctgcattttcagtagagatggggtttctccatgttggtcaggctgttctggaactcccgacctcaggtgatccgcccgcctcggcctcccaaaatgttgggattacaggcatgagccaccgcgcctagcctcttgttttgctttatgcttaaagcagtgcaaaatttaaagtatttcatgttttaatttaactttctaaataggatcaaacatctaaaagtatttaaggagtagcaaaaagttattctcacctcctcacacaattgctattagttcttaatttatccttctggagttttaagtatatatgcctatatatatttcctttcatttttatacaaatagtaacatactaaacatttttctatatcttgtttttttctccctatatctttaatgtaccaaacatttcaacagctatttattaacttattttttatttcaaatttaattttggaaaagagaatacattactaggttcaaggaagaatagaaaaatatttgaaaagtataaacagttacccattcttacctgcccagctccccctcctctgttctaaccctcaaacaggtaacgactattaatgttttttgtgtatttttacaggatttctttgtgtatcagcatgcaaatatgaatgtacattcttttttcttttacaggaatattacacatttgtgccttgcttttgtcacttaataatttgttacttatattaataatttgtagtgtatcaaaatgtgtatgcaacagatttataaacataagattataaatactccaaaaatactcatttggttagaaacaaaatattaatgtcacagcaacagtaaatttatttctacattttattgcaggctgtactctaaaggcctgttgaggttaatcagaacctaaaaatgctagtaacatttttttgtctggtacatgctgaaaaaaagctacacagttctacttatttcactttttcctttgtttcagggctgtatcttgtggtttttatgccatccagttcttgcatgcatttctgtcatttttagcgactaccaaagagacaaggtaagaaatatacatgatcaaagtagttttcttaatgaaaatattgtcttaattgggagaatatttaaataggagggacctatttattttttaagacattttctgggttatttaaaactttgaaacaaaatagtaaaccaataagcagataaatttgaagtttaaaatatttttaaaatatttataagcaaaatggtggaaatagcttttcttgattgtactacaatagataattttaaaatagaaattttgttttataaattagagaatttataatacatcttttaaaaaatgattaaaatttttcttacataatagcaaaaatcaagatttgtaaaaatcagtctagttattgaacagactacaaaccagagtgccatgctcaagtatgatgcattttgattgtgttgatacctaccttcttaggtgaatggctccatcatttcaaaatagaggtctgccaggagccctttacaagcaatgcagtatgtgcctgaatgcacaaatgtttattgagcctgaggtgtttacaaagggtgaatagataggacagtagtctacaaaaatagagaagcaacttgagaatttttgaaagggcttttagagtactctttaaagttcaggtaggagcgtgctttattcctgttcctaaattagctaggaacctgatttttcttatttactgaaacttgtctgtagtgcatacccttaggagagaatggtttagcaagttattcttttgtgccttactttgtcatctacaaaataactgttaaagggatttttatccttaaacaattagagttctgagcattagtcagaaaatttttttgataaaatgtacctatggtaaagatgaaagatagagtattgtatttatataaaaagcatatatagattcataataaattgaatattatttctctatttctgcatgtagtaaaagcattcctttccttttcttttcaggttattacaataggtgttatcctttgccagtctgtttccatggttattctctacagactctttctgtctcacagtctatactgggaagtttcttcactttcttcagtaacactaccactgaccatatcatctggacacaaaagtcgccctcatttctgatacttgatttttgttgagaggaaaagtgaattggttaaaagagtgcaataaggatccaaatacagtgacttttttttcatacatttagtatgaaaacttgaacagcgaaagcagagcatgttatttatataactgcatttaagcagtaccaagactgaaaaaaaaggtaataaatgaaatgttttgaaatatacttaaacaacaaactttgaagaaagtgttgttataaaattattgaagcgatttctatgtggaaataaatgtgaaaaataactatgatattttggtaaaatattcaccacttataatgcctcatcttaatagctaactcaggtttaatagtcttataaaaagtaatcagttaaatgattacttgcttataaatatctaaactagtccagttatgaaatcagtgtaatacattgatttttaaaactgctgctttttatgctttaaggaaaatgtatttcatatttgagtttaaaggaattgaaattacttcaggaaatgaatataaaataggttcacagttaaatgaataagcttttgtttatttgtgggtggagttattctccaattttttctgccatttttggctctagttcaggttttagcttgattagcaaaggtttttgacaaacagtttatgaaaaaataaaacttaaatacattacacgggttgtaaggacaaaggattttaaaatctgagcacttaggtgaagggacaagcaggtttatgtgtttaaacagaaagaagggaaaaggtactatgtgatatggtactgaaattttgatcccaatagaattcatttctcttacgttgaatccccaatcataattaagccgtatacacagattaaattaacagaagcatttcacataaatgttggtttcagtcatcaactacccatgaattcctgcccaaggatacttaatcaggattaaattttctatgaataattgaaaaacaaaacactcactggatttgttataatccgtgttggcactggattctaagtagttgccatcttgaatcctttgtaataaagccatacttttgtgtgtgtgtgtgatgccccagtattgagtatgctagctaaaaaatatcaagtgcctgattaaagaattgctaaatggttgtcaatactcgctgtataaaatgagtattcccattaatagtcactgattggaaattattctgttgctgtttgtcaagctgttcaggccttttcctttttacttctggcttattttaaaaatattttttatctatttactgtgtgtttaagcaagcaacagtgcactgatctggtagttaaattttttaattaaatagttaaaataatgtagtgcaacttaaaaatatctatggctttgtttttgtttttcttttgtacctagtctcattggaaatgactagtattctgcctcattttcagggcagaatatgtgtttgtgacccaaaatgacaaagttaccaagttcaacctgctcattaaatcatctctctattagttctttgtaaatcacttagtacattagagctacaggttaagactagaaagtctgagttatgttttaggtatacatgatcgtctgagtggtcataaccttttcttttatcatgtctcgctaataaccccagctattgtctgttgtgttcagctgagatgcaaaaaagaaattaagcaaaaaagaaaaaggtgaagacttttcatgaattttgtgaacttgccaaaaggggaagggaaaaatctttgtgttacttcactcaaagaacataagtaactgcaattaacatatatgaaatttattactctgcttgcatttatgaaactaaccagttttttaaactttaattcttaaatttatggttggaaatgctgataatttattttgttatttaagagctgttgttaagtggaggaaagtagttgttaataaatgtataaaactgttcttgactagtaatcagggacaaaatttatagttcataagtcatgacacagtattcgctctttttctgaatgtttacatagagattcatcactgcagattacagaaagttaagtgtatactacaaactctaattaaagataaaaatcttttctacttttctttgtcagataatgcttttttatgtgtttttacattttttgaaagaagataaatggttcatccagagctttattaagaagcatttcttttcttcccttaaaaaatagatgcttatttttattgacatgtgtataataagatgggtgcctactgtgatgcattttaccaggcattttaccttcattattactcatctctattgtgataaccaggctcccatttaactgagtataagagagaataaatgatttctctaaggtcatcaaactatttagtttttccactttaccttcatgatttaaggaacatgtattagctgtgttttagtgagaatgaattgctatccatcataatttttgctgttgatttgaacattaaaactggaattgtgctaaaatcagaacatgcgcttgaatatctgtaagacctcagcacacttcagtatttgaacctggcttttaaccagacagtattactagcaggagagttaatctaggcagaagagcttgctttagggtaattatttattatctccagtaaagtcacatctgatgaacataggagatacacaaatctgagatcatctctaaaataatgagactagaacctatctatcaacatgaacatgggctccttcagcatgtttcttctaggagactgcacgttctttggaatttggaaatttggaattatctgtgaaacattttcttaaatagcttctgtggtatcaaatcattgaggttgttttttgtttgttttgagaattgatatgattgttagaagtagccagatacgaagaggtaatactgttttttattccaacatgtatttgtgaattgagactaaaataatgagattggttttcctctgtgatctgaaagtagtgtggtagaagcaccgtagcttgatttcttgcaatagctctctaagtaatattaccatgtccacacttgggcagccttctgcacagctccaggggcatcatatgtgttgtgctgtaggagtgccatgaagcctggaggtgaggaaagaagtgatcctgcccactagggccattctccacagtgtagccaaaacaatctcttaaaaatggaaatcatctggatgatgagcatacagaaattctttgtgctaatcttgtaatttttttgtaagtttgaaattatttcaaaaagtttaaaaatcatataaatcagatcaa

SEQ ID NO: 97996 - DNA, 101046 bp, Homo sapiens
  misc_feature (1)...(101046): n = A,T,C or G
tcagaagtaatcctaaatcaagacaatggggacaaaattcaagaatatcagttatcagtataaatgtgaaataaccaaattctctgcttaaaggagaagacagattggcctgaaaaaccaagggaaaaaaaaaacaaaaacaacaaaccgtccagctataacgtatatgcttaaagcaaaaggaacaaagagaggctgaaaataaagggacaaggtaaaaaatagcaggctagtgcaaacatggaggagagacaacactactatcagccaaggtgggaattaaagtaaaaataagcagaataacagggataacaagctataatgataaaagaaacaatttatagggaagatgtaatattcataagcctgtatattcaaataatcactgtagataaacacataaagcaaggactaggaaaaatacaaacttaaaaaaaaaaattcaagtgagaaactttaatagagttctctgagaaccggacagattcagtaaacacagtatgtgcaaggacagagaagaactgagtaatacaacaaatacatctgatttagcagacatagagaaatttgaatcaataccttaaaaaatgtttgaagtcatgtatctaccataaaaaaaagcctaaacaaaatttgaaaaacatttttacagtcaatgttctcaaataattatctgcttaaattgggtggaaaaagatgaaaagtaactcccagtaatttgttacattactggatatccccaggatcaaggagggtaacaaaagcaaagccataagcaatctctagaaagcaatggaaggaagataaaagcaaaacttaggagataaaacaggaaatcaataaagagaaaaaatgaattatgagggggggaaaaagaagggtaaacaaatccaaaagctggttttctttttgttttttgagatggagttttgctnnnnnnnnnnnnnnnnnnnnnnnnnnnnnnnnnnnnnnnnnnnnnnnnnnnnnnnnnnnnnnnnnnnnnnnnnnnnnnnnnnnnnnnnnnnnnnnnnnnnnnnnnnnnnnnnnnnnnnnnnnnnnnnnnnnnnnnnnnnnnnnnnnnnnnnnnnnnnnnnnnnnnnnnnnnnnnnnnnnnnnnnnnnnnnnnnnnnnnnnnnnnnnnnnnnnnnnnnnnnnnnnnnnnnnnnnnnnnnnnnnnnnnnnnnnnnnnnnnnnnnnnnnnnnnnnnnnnnnnnnnnnnnnnnnnnnnnnnnnnnnnnnnnnnnnnnnnnnnnnnnnnnnnnnnnnnnnnnnnnnnnnnnnnnnnnnnnnnnnnnnnnnnnnnnnnnnnnnnnnnnnnnnnnnnnnnnnnnnnnnnnnnnnnnnnnnnnnnnnnnnnnnnnnnnnnnnnnnnnnnnnnnnnnnnnnnnnnnnnnnnnnnnnnnnnnnnnnnnnnnnnnnnnnnnnnnnnnnnnnnnnnnnnnnnnnnnnnnnnnnnnnnnnnnnnnnnnnnnnnnnnnnnnnnnnnnnnnnnnnnntaaccttggacaagaccaaagtcatttaactattccaagcctctatagagaaaagggaaaacaatttgttttatgaagacagcacagttttaataacaaacccagatggagacataagaaaggaacaaaggaatgaatgaacgccataggccaatctcactcacaaatataaatgcaaaaatcctgaatacaatatttgctagcaattagattccaggaatgtatcaaaagcatctaccaatattaatccaacaacacagtataggggaaaaaaaatcatgcattaatagatgctgatgaggcatatgaaattcagcaaccaatcataatgaaaacagtaagaaaactgctggcagagtgtggtggctcacgcctgtaataccagcactttgggaagctgaggcaggaggagcgcttgagctcaggagttcaagaccagtctggacaacatggtgaaacactgtctctacaaaaaatacaaaaaaattagctgggtgtggtggcgggcacccgtaatcccagctaagtgggagactgaggtgggaggatcccttgagcccaggaggtgaaggctgtagtgagccgagatggtgctgctgcactccagcctgggtgacagagtgagactgtctcaaaaaaagaaaaaaaggaaaactgcttaaatctaattcaggatatttctgaaaaccaaaggcaaatactgttttctaaacaatagaaaattaaatctatttaaattacaaccgataattcggcaggaatgcccttccataattatttttaagcacttacatgaaaacttttacatgaagacctatacaaaaagcaaacaaaacccccatgtgctatccattatccagcttcaacaattagcaactgaaggtcaataatgtttcatctatttccacaatcatcaatgccactgcctggatgattatgaagcagatacgagatgtaacatttcatttatattccactacacatatctaaaaataagggcttcctaaaatgacaaaccttacacatagctagttctttaatgcaatcaaatatccaatcagtattcatattctctattctctcatttttttcatgtgaatcaagatccaagtaagatccagatattgcaatttcaccatgattatttaatactaccttggtgagtttactgaatataatgaaacaagaaaatcaaaagaaaacacttttttgctgattggactgaatacacagaaaatacaaatactcggctgggtgcggtagctcatgcctgtaatcccagcattttgggaggccaagacgggcatatcacgaggtcaaaagattgagaccatcctggccaacatggtgaaaccccgtctctaccaaaaatacaaaaattagccaggtgtggtggcgcctgcctgtaatcccagctacccaggaggctgaggcagaatcacttgaacccgggaggtggagggtgcagtgagctgagatcgcaccactgcactccagcctggcaacagagcaagactttgtctcaaaaaaaaaaaaaaaaagaaaatacaaatactctggttaaaaaaattctagaatacgataatttagtaaggtagctaaatataagatctcaagtaagtcaagtaccagcaacaaatatcaaggaatagaaatgggggcacatcatttacaacagaatttttaaaaatccaaacaagtagggaccaaactagaaaacaggtcctacataaatcaaatcatttttattttccccaaatgagtatgttatttagtccatttctaactggaatccctaatggtgtggcttttttcttaaaggattggataaaatgagctttaagttcacatggaaagattaaatgccaatgctgaggatagaaaagagcaggcacttaccttatcacctattacatgtatctgatttcaaacccacacagtgcaacatagaaataccatagagcacctctcccgcacctccacagaacccctcagcctcactgaaccctgtgcacacatatgggaaaatggagaaactatttgtcttaaactgacatttcaactttgctttgactttaccaagtttctcctgccatcttttttttttcctgtttttttttttctgaaacataacttggatccacaatgttttctctcataatttattaactaatgtgaaatggaaggtgaaagaggaattatgaacctctgaagcacatggttttcagtgagaaagccttgatccagcaacacaaactgccaagcactgtgattaacttaaacactgggtgcaaattggaccaaaaatgtagtcaaatgaaaattttgttccttcagatcgtgtttattccacatgccagaagttgtttaaagttctttaatcttgacccacagcttatttcttccacagaataaccccaatacacataaaaaaccaattttcgcaaaacaaaagatagaagatgaacaacatctggcgatgtagaacccggaaggtccatgatcttattcaaagcatctggattctttggattcggggaaggtccacgttcagtatacccacataacactcctaacagggactggggcagggataagtggcatgtatgactactaacagaacagacaatacaaatggccttacctcacctctgctgccaaatgagttttggtgtccccattcctccagacaaaaaaaaaaaaaaaaatacccacaacttcttcttttacagcagtttctgtatgctggtattggggataaaaaggggccctgaattacatttatgaatgatagagggaaaccctggcccctttccctaggtcaccttgctagtttaagagccagtcagaatgtaaatctgatctaattaaaacgctcttgttctttattcctggctgtggcactggtgagagaaatcaaggtggaagttgaggaaaaaaaatcaggacaacctttatagctaatgagatcaatgccaagattatacataacagtacacatcatgagttaggatgctgggtggtgcaaagaacccattaatgggagctatcaaaaatcactgaaaacaatgaggctcaaatcagaagtatcaagaatcagctttcatgacccctacaccatgatgtttttctttatgacggcagaactattttgaaacattaaatatatcggcaggcactgtgattcaaaaagtatttgagaacctactaggtgctagacaccaaccgaggcaatgagtatgggtgacaacatgtgccctgccctcacagcaccaatagtccactggacaaataccatctggaacatcaggtaaacacctaagcctgtctggaggaaatctaatttgggcggaatcccacaagcacagactaggtaaggagaaggcagttaaggtgggaagtagccagatttaagagtttgggcaatggccaaaggtgcagaagtttgaactacaagaagttcagtgtagttggttcgtgtgtttccgtggagagaggacaaggtctggtggcactgacaagaattagaccgaaaaggtaaaaaagcaagccaggtttgtctgggccagtaggccaggtcacagttgggactccactgagaccacggaagccacaggtttgctcctcatccccgggccaactcggcggcctccaaccctataccctaccccctgctgcctgtccgtgcctcgctggtgcagaccttcgtcgcctctcctcgccgaaggtacccgcagacagggcctagtcgctctcccctcgcttatccacggcatccagccgatgggcttggaggtttgggggctggccagtcctccacgcctcagggaggaaatggcaccgttagaaagacaagatggccacacaagctctaagtgtttgtcgggcctaaacctgtatcctccctccaagcaccaaacctcccgacctcgaccgcactcgacgccccgaggcccagcaccgacgacagtgcagaggaattcccgcagggtcaacaaggggtcaccggaatccccactcccgcgcccgggcctgcccgtgtcggagccactgtcgccggcactaggaccgcccgggacgggggagcccacgataagtgccgaagagcctgggctcggccgcccctcccccacaccgccccgccggcaccccagagccagccgaccaccgcccgagagtatgggacgagcggcgcgtcccccgcagctcctcgggagggccggcccacaacttgtgcggggtacaccggcgagacactcacccgccaaacagcccgagaataggcgccgaccgaccgcgccgcggacccgcccagcgctcgcggtccgctcacagcccgccccagcccgccccgccccgcccagcgcgcaggcggattgcgtcaccgcgtcaccccgcccctttgccaactgcttcctggctcagtgcgacctggccttcttcccctcccccatgcggccggcttccgagtgcgcaagcccagagtcgtccgcgttgtccgcctctgcgcaagcgccgtgctcctcccacggcagttggccatatagaggctgggggtggggggggaggtcaagcgtagcctcttctccttttaccaagnnnnnnnnnnnnnnnnnnnnnnnnnnnnnnnnnnnnnnnnnnnnnnnnnnnnnnnnnnnnnnnnnnnnnnnnnnnnnnnnnnnnnnnnnnnnnnnnnnnnnnnnnnnnnnnnnnnnnnnnnnnnnnnnnnnnnnnnnnnnnnnnnnnnnnnnnnnnnnnnnnnnnnnnnnnnnnnnnnnnnnnnnnnnnnnnnnnnnnnnnnnnnnnnnnnnnnnnnnnnnnnnnnnnnnnnnnnnnnnnnnnnnnnnnnnnnncggtcaagagattctttgccttcggtggtaaccgaatgggggaaagccctttgttaaaaggaaccaagtcccccttaaaaagaaaaagccgtcccggaagggcaattgttgcgggattccggaccattcccggggagggagcccttggcttctcttcctgtcttccaagaagatggcgccagccccgagctggggcgccgagtacgactgggcgggggacggcgagcgcccgcgcgaaactcgtctagcccaccaccgccgccgtctcgatgatcggggggcctctctgggattggctgcgcgcacgtcacgtggggccgacgggccctgcgcagaccatcgagtcgggcgtccctccccggggacgtggccttcctgtgcccgggctggggcccgccgccccgcgggggagggcggagctggcgcggcccctagctttctccttctggtgtggggcccgaggtgagacctggggagtgctccgcgagcccacgagcagcgacgtggctcggggacgggagggtgccgtgcctggctgcggcctgagcgggatgggcgcgggcggctccggcccgcgggttgtgccccggcccggggtgtcctttcctccctcccgcgtggcctggaggcactgcaactgttcgagactcacgtcaaggcttggcgcaaatacccctcgttcaggaagccttcctaggtttcccccgcttagaggaaacacttcctgagttcctaatggctgacccgcatggtgttgggaacctgagcctttctgacaccgtggcatgttgctagggtatttttgtgcgtagctcctttgaaaagtggttaggtgctcaaggctagctgctacatatcctctccattcgacttaaaaaatgagagggtcagacttgacatggtgtttggacgccatgtaaaatcgaaggaagtcgacttgggctttgcttattaaacagtgcctattatggtgaaattaaacgkctgaaggaatgtggatgagtcgtaatcttaaggaacatgacgatttgcccctcagttttgcgttttatgtcctcagattcatagctacctataccctaagccctcaatcaatgacttcacatttatttggtgtctgcttaaggatagtcactttcttagcagctaacttccttaaaaccctattaagataggttaagtcacaattagggttttgtctaaggctcctggtagcggcacattgcataataagcttaatgttcatttagggaagcaaatctgggatgctgaaacactggatgaaacgtagtgcttaggtttatattttgattttttgacatgtaaaagtatccctaggctaaattcattaagtacacatgatattaggatgcttggcaacagtatttaaaaatagttgaaaaggtgtttgggtaagaattatttccatcatttggattaccgaatctctgagtctgaaacatcaacctatcaagttttagacttggggaaaatggagctggagcctactgcctcaagtctcagggacagcgtttgaaaccccattaaataattcatcatgaggattaaactttcctgttactgctattagttttgcttggtgccaagcactgttgaagggacttagctcatcttatcaggagtcaaattaacgtcattcgggtaaaagtgcattgagtgtaaggagagcacctcaaagatatagttgacctatatcacgtccctcagcgccactaggcttacttgaatccctgttacagtgtcctctccagtgggcaaagctaacttctcagtggcctggtgggagaatttcttcttgagtaaatacgtatttttccaggttttgttgttttggccttccagttgtctgacttcagcctcatgacctcacttcttcatttcaattcaaaaaaatatttgctggaaattgctgtgtagggttaagggttctgcagatacaaaggttgagaggatatagtcttttcgaccaggtgcagtggctcacgcttgtaatcccagcactttgggaggtcgaggcgggtggacacttgaggtcaggagttcgagaccagcctgaccaacatggtgaaaccctgtctctactaaaaatacaaaaattagcctggcatggtggygcgcgcctgtaatcccagctgctcaagaggctgaggcatgagaatcgcttgaacccaggaggcggaggttgcagtgagccgagattgtagcactgcactctagcctgggcgacagagtgagactgtgtctcaaaaagccaacaaaaaaagaggatatagacttttcttttcctcaggcagcttgtggtctagtgtgagagacttatttgtagaagagtaattacattatggtgtgataagtgcaatgatagaaatatgtgtaaggtgtggacataggaaataggcwgtggttacctgttggaaagtcttcctacagaatgtggtccttgaactgcggtttaaaagacgagtaagagtttttccaggtggtgctgagtggacaggaagactaggaaagaggaggctgacatttatagttggtggcatacgtgagcaacaggtttagaatttggtatactcttgccatggcaaatggtagagggcttggctcagactgtgtactgaaggacttgatgcccttcagtgagttttatctaagatactctgacctgaacagaatttgagatgattgtgccgggtccactgggatatcttacgatccttcgtgggtcatatggattctccattagtgcgtcccagctgaaacttacagaaagggcttaagcagagaacatgctttttggagtacaaagtgatatttttatttggtatggcccgttcattgtgcatccatcccataggcaaatggtgatacgaaagcttttccctcttttggtaagaagtaaccaagttctgaaagaagcatatcatgcggctttcccaattgccaagttatgatgacacaaagtccaaaatgcgtgtaaaggtttttgaccaagtagaaaagcagagaaccccaaccagtataatgtgtcagaatgctttttctcttcaattgtaaaagcaccacaacgttcaacatctggaaaccaagaaaataatgaaaagaaccttttttcatgtgtataatattttaaaacttggttacatgttattttttggtatttctaaagtcagagacattttagaagtgaaatccctagtaggctattgttttaccaagcacactgaagttcctcgaataccgttgaagatgagctagacatttgttctgagacgtgtctggacatcatgtggttgtgttagtcatcttgttgatacttgttgttaatttggtaagaatacattgactacatactctcccttactactttttattagcattcatattaatcttatttcaaatcaaggttacagcttcatgtmatttgtagagtcagataatcctagaaaggcttgtaagaaagaagtgccaacatccttcccctaatcatgtttcctcccctgcagagtatctacttcagccttagtagatttccttgatctttgcctccaactctaaagagcatatttgcttgacgtctgtatttgtgtcycctacccctgtttcatgtgatgtctcttcgcttgacactgagaataggtaggaagttcctagctttctttcaccctctgccttctcagtgcaaacggatccatggctgcccaaagtgatatatccttaatttggttagttcagtattgattgtttatattatgactacatattgccatttacagctggacgaagtggtataataggattgttttcacttttctggataactttttgttttcctgggttattacaagtcttatttgtttttgtttgcttgctgcttgctcagttttctatattttgtcactacaattcaaccccaaattctgaagcaattatctaaatctttcaagaaattgtccgttttcttttgaagaaaattagtattcctatcattttatcttgaataaatctctcccagcgcctccaatctgctgcaggcttgtctgtgcctgaaatcttcctgtaactctcctcactccctcttgtgttggagcctcacttttctggaacctatgtcattctcttgatttgactgtctcacttcgatggagcacatccttcactagttgcctgagaagtgcatggcagatgaagttttcagaatttgtatgtacgaaagtgcctcgttctgctcttatcctgagtaggaatttggacatcattttgctccgcggtctctaagtttccagtgttgttgaagtcttaagccgttctgattctcttttattgatacgtaacatttttagagcctttgtgtgtgactatgttttcctccatgaaacctgaaggtttttgtttcttttttttcttctttctttcttttgtttttttttgagacacagcgtcttgctctgttgctcaggctgtagtgcggtggcgctgtcatagctcactgcagctgcaatctcctgggcttgagtgatgctcctgcctcggcctcccaagtacctgggactacaggcatgcaccgccacacctggataattttaaaaactttttgtagacatgagctctctatgttgcccaggctgatcttgaactcctggcctcaagtgattctcctgcctcagactcccgaagtgctgggagtgaaggctttgcatctggcctcagaggcttttctttctgtgaaattcagaactcccagaacagtgatgtcccttggagactgttttcatccatcgtcttgcctactctttggtcctgtttatttgcaactcatgttcttcaacgctgggcatttttttgatttattgctttgatttcttcytatttgctttctctctctctctctagaattctactcttggactttctggattggcactcataattttcttaaggtttctttttcccccctctaaaatttttgtttttgtttttatcttttaaattgtaaattgacaaattatacttgtacatatttagggggtacaaagtgatgttacgatttatggatacaataaataataaaatcaagttaacataattcatcacttcaaatactttaagttttttgtggtgaaagcatatgarattacygtcagcacttttgaaatcgacattattatttactatattcaccgtgctgtacaatatatctcataaaagaaaaccacattcctcctgtctaattgatgttttgtaccctttggtttttcattttctttctggaagttattctcaagtttgtcttccagcccttctaccaaggtttttctcatttctaagagctttttcttgttccctctattcctattttataacctattttttgtttcatgaatgtggtatctcctgttaactgttggaagatattgatgaggttttatttttccctgttttctttttccttaagtcactattgaggctgctctggtttgttgtgggtttttggcttttgtcagccttttctgggctatgcagtgatgttcttgtgcctgctcgtgagtcagagggcctctgagcctgtgtctgtggctgactgtggctttcactgcagaggcacctggctgggccatttccttacagcacccttgtcagcttctttgggtttcttcagattccccagagaaatatcttgtagccctttgcctggctgagtggccaagtgaggagagaggcctgggagcacagcagtaaccataaaagagcttacttccctcttttcagaattgtttccctcctctgtaactggtgtccccagtccaaagattctacttccctttgcagacagaaaagygatacctttttgccaggataggagagggactgtgcaggttggctctgtgtggctgtgcagagttgtggggtgcatcttagggatcttcgtgccttttaaacctatcagccaactctgtttttaattcaggtctcctggcttccagtcatattgccagttggccttccccattgccgatacaggattcagcccttttaggtctgtttccagtttctagcctccagtattttaatgttcttatctctattcttattctttgctttcgtgatttgtatcttaaaaaaagaaaaaatcgtttactatcattttagtggtgcttcacgaagtagtgtaaatgtattgatctgacaacggctcgtgctggagacactgttccaggaagtgggacacagtaaggaaaatgcaagtgtgttctcctgcactttcacggaggtcacgttttggtaagcggtgtcaggcagtcagcagaccagcagatatgcagtatgtccaatgtggacaagaagaaaggaggaaaataaagtatcgaggggagtggagtgggggacacagtggcagtttggcatagtggggaggccttgctgattgagcgacagttgattcaaacttgagatgagcaaacaagccatgggcagcgatctggggaagagcgttataagaggaatggacaggaggtgaaaagcacgggggcaggactgtgttgtgcacgttagaggaatgtggaacaccagttattagaccagtgtggagcaggaccagagggtgtaggagacgggcaggtcagggaagaagccggggctcctagcagtcggatcttgatgcctttggagagctggagcagagtgacccagtactggtggtggatcgtggtgaagtgaccatgggccacaccattcacgacatttcttacttttcctgtcacctgtaggaggcaagtattgttgttatcacaggtcgaggtagaccctgaggcaaaggctagagttagtggtttggctccagtttgtgccttcagctacttcactgcttccctaacctggccttgtcagtcagcctcagtctaccatctacccaggtctgcataccccgcaaaacagtatacactttgacgcttttctgcaagcacarttaccttttgggggagcccttctcttaaagcagagtaggttaatgtttgtgaatgaaacggaactttggcaggctgaggtgtctcaggtcatcagcttacgttgtctactgtgtgactaattgaggcaaaagatgtcctttttaatagtattttctcatcacttttgcctgggtgccctttaggaatgttatttttggcatacaacttgagtttcacttaaatttataattctttctgttcattcctactgctctgttgcccagatgtggattttgctttgtctcacaagcgttgctgaaacactggtagaaaggtggacgacggattggttgtgattagtttgatcttcacagtacagaaattcaaaaggtcaataagctcaacaagattgctgtctcactgatgatcagagttgccattaaaatcgtatttcccgcacatcaggctggaaaaaagaataaacatgatcattttagttgtcctcaaaggagaagaggacaggtattctgtaatcaggtgttgtgagtgtaactagttaaactctttgggaggtgggcagttttaccttggcaatatctatcaatgcattgcctgtcatcatataattccatttccaattcaatttatcctgtgggggtagaggcccaagtgagcagaggatgttctttccagcattgtttataatcgcaaaaaaaaaaaaaaattagttcaagggtcctatcagtaggggatttattaaggtatgtttactccactcaacatgtagttgttaacaaatgaggtaaatttgtatttggtactcggaaagatggccatggtgtcttttcaaatgaaaataagtgtagcagatggtgaaagaatgcatgtaagatcctatttttatttaaatcatgtattaaaattataattaaagtataattaaaattacagttttgaagatacagtttagaatatattttttggtaaagcctcatgggggggttgccagtttttacattgttttgttgagttatcttttagaatatttttaaagctaaaaaatcaagttccttggtagaccatcactacagcaagcccactgcagtattaatctattaatactgtcaatgttaattaaaccattattcgtgtagcccctacccatcccattccagtctctcaggaggcttagctgtatcccagagaccccagtgctatgaccgcaggtctctcctggggcaggaagaggtaagaagtggctgatgtcaaagtcaacagtcagcaagtggcgtgagcagtctcgatgaattctttcaaataagcgtttttcagatccactctagggcttgccttttccctctgttgtagtctcagaagttcttgaggtagaccttgtgagacctgcagcagtacttgctgtcttaggtacagaaggcaggatattgattatttctccctgactcaacaaagagttgagatgtttatccaggttaggatgacactgcccccctgtcccccccgccccccaaaaaagaaacaaaaatgaaaggatggtgtctttgactgtactgggagtcaggagacctcacttcaattttgggcttttcctcgttttttttttttttttgaataggttcagagctactccctggacctgttcttatcagccttatgacttggggacttgggatacttttttttttttttttaatttattgagacagagtctctccctgtcacccaggctggagtatgacagcatgatctccgctcactgcaacttccgcctcccgggttcaagcaattctcctgcctcagcctacctgagtagctgggactacaggcatgcacaatagtagagatagggttttgccgtgttggccaggctggtctcgaattcctgacctcaaatgatctgccagcctcggcctcccaatgaagtgctgtgataataggcatgagccactgctcccagcctgacttggggtactttttgacctgtaggatttcagctcctttcttttaaaaataagaaagctgaggccaggcgcagtggctcacgcctgtagtcccagcactttgggaggctgaggcgggcagatcacctgaggtcaggagttcgagactggcctgaccaacatggagaagccccgtctctactaaaaatacaaaactagccgggcgtggtggctcatgcctgtaatcccagctgtgggaggctgaggcaggagaattgcctgaacctgggaggcagaggttgcagtgagccgagatcacgccattgcactccagccagggcaacaagaacaagactccatctcaaaaaaaaaaagctgaatctctgagtgggtttttcatttttcatttttttttttaaacagatgcctcagaacctgggtaactcagtttatcagaaattcagttttcaagtttggaaggataacacttggagctggtagtcactcataaaacatctgattttgtgatcacgtttaagaatccatgaatgatataaaaatcctcacctattaaaactttttggccgggcgcggtgactcacacctgtcatcccagcactttgggaggctgaggtgggtggatcacgaggtcaggagatcgagaccatcctggctaacacggtgagaccccgtctctactaaaaatacaaaaaattagttgagcatggtggcggatgcctgtagtcccagctactcgggaggctgaggcaggagaatggcgtgaacccgggaggcggaactttgcagtgagccgagatcacgccactgcactccagcctgggcgacagagcgagactccatctcaaaaaaaaaaamaaaaacaaataaacaactttgtattcattgcttcctatatactagtcatcacgctatttatttctagcagtggttatcaccagggtgatttttgttacccagggcacatctggcagtgtccagagacctttgtggttgtcgtgacctacaatcatctggtggttgtggccagagatgcttacatcctgtggtacacagggcagcccccgcaacagaagtattcgactcaaaatgtcagcagcgctgaggttgaggagccctgctgtaaagggtcagtccttgaaagggctctagggtatagccatcacaggccccgtttttttggttggaaagagtagagcctggccaggtccggtggttcacgcctgtaatcccagcactttgggaggctgaggcgggtggatcacctgaggtcaggagttcgagaccagcctgtccaacatggtgaaaccccatctctactaaaaatacagaattagccgggtgtagtgacacatgcctgtagtcgcagctactcagcaggctgagacaggaagataactttaacccaggagttggaggctgcagtgagccaagatcgcgccactgcactctagcctgggagagacagagcgagactccgtctcaaaaatgaaaaagtagagcctggtagagtgaagccacttgcaggagtcgtttagttagggctgtgttgccttacagtgctggtgtcctcacagatgataatagtaataaaaaacaccacaccggtttattgtgtgccagctcgggttaagtgctgtctatgtatatgctcatggtaacacaaaaggcattaatatcaactttttataggagargagacaggcccaggaaatcaagatctgtaattatttcttctttttgttatcttggcccttaacttttagaagttcacacatttaaacattccatcttgacagatttacccagcgtttgagtgtctgtggggcttctctaaagctcagggtcaaaggggatatcctgcccacacagcactttctagttcaggagtgggaccaaccaggcctttgcagcaagataggtattcggtgctgaaatacacgctgtaaagttgtcctgtgtttcttgggattttgaatatctttcattgattcaattggcatttatttttcaccaagtacatattcagtaaatgtgttttggaaaaacagtgaacaaatcaaagtcccagccctaaagccatttaggcactcacggcctatctctgcagtaacctgctgcttgttagcactgggaccaagtccatctgtggctgccttcgggggattggcttctagtctagactcttgctgggttagtgtttccatcattctgtcaaggatccagctctaaggctgatagccacttccctgaattcatgtgatggatgcacaagcctcttggactaactcccctcttcattttactgcttccaccccaagcctgggttacacgtgaagccattggtgtgctattaatgtattggtgatgcttttacttggtttggatccctatggcttagcagagtaacttgatcatggcaggtgccatatacgtattttgagggatgaacagatagcatagtgttgattgctaaaaaggtaatgatctggccgggcatggtggcttatgcctgtaatacatacacatgcactttgtaatcccagcattctgggaagctgaggcagggggatcactggagcctaggagtttgagaccagcctrggcaacaaagtgagacccccatctctacaaaatatagaaaaaagttagctggacctggtggtgtgcctttgtggtcccagctactcaggagactgaggtgggaggcacgtttgagcccaggaggtcgaggctgcagtgagctgtagtcacaccactgcactccattctgggtcacagagtgagactccgtctccaaaaaaagaagtaatattctgaacttgtcctttcttgactttttggtgaattataacgggctgccagaatctagatcagctttttaggctctgagagatatgcttcatgtagaaataatccagtctgaaggccaggtctcaaggtgtcacttttgtattcttggatgactgttgaatgtgtggtctcgacgaatggctttgtggagcagctttctccagagacttgcatgtgcttggattaacaaacttgcgatccagggatgctaagcaggtgccttctgtgaccaagctcagtattgagggcgctgctgtccttgaggcagccaagtgttcttgtatacagctgtgttgtgtagcaggttaagtgctgcctctctcctgttgcttgttttctgtaatatgtcacctttcttggcatgattcctttgtccagtcttccagcgtcctgttgtatrgtgtgggtgggctggggactgcataaatgagttggagcagtgatgttcttggccttgctctgtcctgtgagagaggaccctgcaccatctggggctcctggagtggcaccctgcaccagcaggacgcagctcttcctggcccttctgtcggcctctaaacacagtgcaggctgactttcttatcacagctcgtttggctggctggaccaaatgctrcttgtttctttctggagtggggaaataacttcaaccaggtgcagtcagtgtgtattcttatctcagctgcaaaagctgttctaaatgcccttctagggaacttttgcggtgtgaatttagtggttgtgctgcgtgttagtcctgcccaacactaggcccaggcagctagagttaagtcgttgggcattggtagggcactgtgagcaaagactctcttacctcgggccaggcagagaaggacacagtggctgagctcacctgctccttggtcatccttcaaacctctgagtgtgtgtggttccttggggagagaaagcagttttctcgtgggtgccaagacagcagctacctgcatagcaactgctcctggcctagtaggagatttacatgtggagactctggagagagctgcacttctaaaggggttgccacaacagacagccttaggggaaatggggaaactggagaaaagggctcttatcccaaaaggaccagatccattggaacagatagaggtaaggaggcaaagagaaagcaacagtacaagtgtaaaattgggagaaatagtttttaaagggggtcatttatttggcacttttaccaatttgttttgaaacagagtctcagtctgtcgcccaggctggagtgcagtgctgtgatcacaactcattgcagcttctaactcctgagctcaagtaatcctcctgcttctgccgagtagctaggactatagggtgcctggctaatttttattttttttgtcaaaatggaggtttgctatgttgcccaggctggtcttgtactcctggactcaagtccttctgcttcagcctcccaaagtgcaaagtgctgggattacaggtgtgaaccacctaacctggcctctagtttgtttgtttgacacagggtcttgctcagtcactagttggagtacagtgacactatcatagctcactgcagtctcgaactcctgggctcaaatgatccttttgcctccgcctcctgagtagctgggaagcatactacaggcactgtacctggctaattaaattttttttttttttttgtagagatgggagttgtggggggtctcactctgttttgctatattgcccaagctgatcttgaacttccgacctcaagcagtcctcccacctcggcctcccaaagtgttgggattacaggtgtgagccactgtgcctggccctcggcctcttttaccatttttgaaattgaggttttgaaacaagtgacttgctcagaaacagttttaccccttagggcttccttttcaatattataagatgtatggtttctgatttatttattagaataggaaactttttgccttaaatctttttcttgaaaaattaaaaaaaaaaacaaaacgaaaggaaaggatggccctttgggatcttttctgcctgtctgctgtaaccattcgacagttgagaaccatgttgcttggtgtcttgtagcttgtaaatagaagactgaagtgtgtgtgagtagaaccttaaaattcacttttcctttgctttgtcttctttatgttggagtttgcttactcctgagtgtatattattagatgattacaggtgtgtagtattcaccccagtatttgctggctagtgtgaacaaaatgaaatacactgcatcatccgaatgtgttttattttgtagcaatgtgtatattactcttaattttcactcttcttacgtgatatgctttctaattttattaatacctagctcatttgactgtttcaaatgatattactgatttaattatatttactttttaaacatttgctgataagtagacgattaggtggtcttatagcattggtttaaatcagtatgtgtgyggccgggtgcagtggctcatgcctgtaatcccagcactttgggaggcctaggtgggcagatcacgaggtcaggagatcgagaccatcctggctaacacgatgaagccccgtctctactaaaaataccaaaaaaaaaaaaaaaattagccgggcctggtggcgggcgcctgtagtcccagctgctggggaggctgaggcaggagaatggcatgaacccaggaggcggagcttgcagtgagcagagatggcaccactgcactccagcctgggtgacagagtgagactcgtctcaaaataataataataataataataataataataataataatagtatgtgtgcatgaaatcagttcactttgaagaatacaatttttttcttttgaaacaaggcttctattttgatctaattgctcatgcttggagctgcctggccagcccctgagacccaagttctgtgttccctttgtcgtctgcacaacgagctcagcagactgctggctgcgtgttacagggctctggggtgtccccgggttcagccctactgtctcagagagaggaggacctggcctgtgaaggactgaggtggtgatgtgaaggtcttttctccatcaaatcttgcgccagttaccttgtatagtatttagattgttgttatcagttggtcatatggctttattgaaggctggtttagcatatttagaacttatttggcatgcattaggattcttcttcttagagtattttaattccagtatgtacttatgcttgtcttctctacctgcccccagtcttgaagtggtggaaatgtgtgtgtgtgcatgtgtgtgtactttccttaagcccttgctgattgatgcagtcacttgctttcaccctgcttaaatattcctaattctcgctgggcagtgttcctgttacatgtcgtgggttactccgatttgcctagtgtctgagttttgcctcttgttcgtcttttagggcagtgtacgactggggctcagcagtgctagtggctggcccagatggagcaccggggggcgcccgccttctactaggaagaactgggcggggtggggggagttccccatgtggacctcgaagttgtttgggatgtgctgctgtgcatatctaggttgtgctgtggctttcttgatgctttctggtggtttaaaaatctactttctcatgaaagaacgtgaaccagaaaaaaaaaatcttttatgaagtttgagaaaatgattgggtgacagactttagaatcgtgacaatatgctttgctacataaagtttgggtgcaatgtgcattcattttgtagttgaactcgtgattaaacagatatagtcaaaatttgttttttgtttgtttgtttgagacggaatctcgctctgtcccccaggctggagtgcagtggtgggatctcggctcactgcaagctctgcctcctgggttcacgctgttctcctgcctcagcctccccagtagctggaactatgggtgcccgccatcatgtgcggctaattttttgtgtttttagtagagatagggtttcaccgtgttagccaggatgatctcgatctcctgacctcgtgatccacctgcctaggcctcccagagtgctgggattacaggcgtgagccaccgcgccccgcccaaaatttgggttttgactttgaactggaatggtcagtgttatctgccatccctctcctatattgatgtttatttccaaattagggtgtttagttttcctttcyttttttttttttttttttttttttgagacggagccaggctggagtwcagtggtgccatcttggctcactgcaacctctgcctcctgggttcaagtagtgattctcctgcctcagcctcccgagtagctggtactacagatgcacgccaccatgcctggctaatttttgtatttttagtagagacggtttcaccatattggtcaggctggtcttgaactcctgaccttgtgatccacctgcctcggcctcccaaagtgctgggattacaggcgtgagccaccgcgcccggccttagggtgtttagtttttctaatcacagtagtagtacatatcctccattaatttttttaaaaaacgatcctgaatttacagaggaggtacgggtaccgtacagctctttatctgaaccacctgagagtaagttgggactacgaacctcaccctgggatattttggtatgtttacttatagacaagacaccttcctccttaaccgcaatacagccatcaaagtcaggaaatcaacatgaatgcgttgccgccttctgatcaggcagcgcattctcattccactgaaaggatctagttcagaaccacagttcattgtcagatctctttagtctctttcaaactggaatggttcctctgcctgagcttgacacttttaatgattaccagcagttattttgtggggtcccttattgtgggtttgtttggtgtttccttttgattagatctaggttttgcgcctctggctggaacagtacaaggaggaggctgggttcttctctgcatcctaataggtggtgcagaattcagttagtccccttagtggtgatgtgcactttacttgcttgattcaggtgctgccttccagcttctccactgtgaaatctttgtaattgttaagtatatagtagggagatacttttgaaataaaatcaaactttcagttatctcaactatctcaactttaatcagagttcaatttgcttatttatgtcaatattggctcatggtttccccagttaattcggttgattgttacccttttgccatgactttatttgatgttcatcatctcaggtttgcccctgagagcccctcaagctcctgtgtcctttatttatttatctatttatttttttcattattattattttttcagactgagtctcactctgtcgcccaggcaggagtgcaatggcgccatctcggctgactgcaaactccacctcccgggttcaagcgattctcctgcctcagtctcctgagtagctgagattacaggcacgcgccaccacgcccagctaattttctgtatttttagtagagacagggtttcaccacgtggcccaggctggtctcaaactcctgagctcaggcagcctcctgcttctgcctcccaaagtgctaggattacaggcatgagccaccatgcctggcccttttttttttttttttttttttttttttttttttgaaacagggtctcactctgtccaggcctggagtgcagtagcgagctctcggctcactgcaacctctgcctcctgggttcaagtgattctcccgcctcagcctccccggtagctgggactgcagatgtgtgccaccacgcccggctaatttttttatttttagtagagagaaggtttcaccatgttggccggtcttgaactcctgacctcaggtgatccacccgccttggcctcccaaagtgctgggattactgtctgtgtccttctgatatgtcctcattattctctgtctctttctcttctcttctctttctttcttgtaccacaggatattctgggctcttcatgtaccttccctgccccagacctggattctgccttttcttcaagaaggcctgcttcccttttatggcagttggctctcagagaaacagggtctaggcaccagctaggttgctggagtgttactatacccaggccctctcagtcaacagagtatgtgtatacatacatatacaaaacatacctacagctacatgcgtgtgtatttttaacacagtctcattttttaatatctccatgtattgaaaagcatgagtttattccagtacccccatttccaatgtagtagcacagggtttattctagtttctcgctttccaagtggataactccgtttcccaacagtgacaatcttagatcccagtgtctctaatatgtttacttccttgattattcaccctgtatggaacgaggctcctcttgttgaccttcctgctcggatgcccgctgcctcctcatctcactcagctgctgtcatcctgcacctccacccaccatgagcatcttcctcactccacttgggctctgataccctagctatgtagatattctcttatgtggaagcccgtatccccagtttaaaaacaaaaaaagtccaagtcctacacgctctctttttgcagcttgatcattttcatttaatgtacagtagtctgtgctttttccagactgatacgtgagccgttggattcttgttggtaacagcgccttactgtgtggtgtccttgtcccacttagtatgactgccttcgtgctgacgcacactcgtgttcttccagttctttgcctgtggcatgctgttgtgagcctcacctgtcacacctatgcttctgtattcttttgcaggcacttctggagagtagcatttttgaagtgtgattgctgacttagattgtatatttctattttttgttatgtgtttctaaattgccttctaattttatacttcctcaatggttgagtagtcttttttccccctcaccattataaacactgaatgatcacttttgttcatctttgcggatctcataaaggctgcatgaagatgaacatctattcgtgtgtttgtgggcaattttatgttaattttctgtgatttgtgtgttcatatgtcctaacctattcagatgttttccagacattgaaaaactccatttgtatcttgacttctatattagtgttctataaaattcttatgctctgatagggtcaaataaatcaatatcttcctcagtggtttttacagtatatgttgttggagactttttgcagccccaaatcacaggttttcctccttaatcttcagggcttcagggtttgattgtttacatccagatctccaatccagctgaaatttattttagagtatgttgtgaggtagggatcaaactttatatgttttcaaaatggataacaaattggcccaattccttgctgatttgaaatggcacttgtatcaaataataaattcacaggtacacgtgagtctgtttcatgcatcaagtgcctctttcttagccagtaacaccaagtgctaattaccattgctttgtagtatgctttgctaattttagttgaatcccagcttttttttttttttttttgcaaaattttctagcctggttttatgtttaggtgaatttttaggagaatccttgttagagttaaaaaaatatcctactgggatgttgtgttactttcccagggctgccgtaacaaattaccacacatttggtggcttacaacaggaatgtattctctcgcagttttggagactggaaatctgaaatctggcagggccacactccctctgggggataggagagagattgttctttgcttcttcgtcttccagctcctgccccacagtccttggcttgcagctgcatggttcccacccctgcctccctcttcacgtggctttctcgtctgtcacgggtggcatttagaacccacccagataatccaggatcatctcctcatcttagtatctttcacttaatgtcatctgaaaagaccccttttccaagaaaagtaaaacaaatttcagggattgggattccctatctttgggtggccatttttcagcctatcacagatgttatttggagtgtgattgggggtgtagatgaacttggaatagaacagacatcttttgtgatgaatctcctggctaagtcttggcatcatctccatgattcaggcttctcgtgtatatgtgtgtgtgtaaaatttttgttttgccaacttgccaagcttgccttcactgttactagagcttcrttataatagagaggttttctaaacaggtcatctgcagacagtggtatttgtctccttgcttcattctgtctctttagatggcctattggacagtctttgacaatagtaacatcttggtcattctgttgcttattttaatactatactattagctttttagtaaatatgttactttggggaaatattgttcatatagccatttgctgatgttaaactccatagaaagtaaataatacatgctgaatttcatcagttttttgggcatttttgaaatggtcgtcggtcagccacgtatatgtttatttgtcctttttttctttgagacagagttttgctctgtcgcccaggctggagtgcagtggtgcaatctcggctcactgcagcctccgcctcccgggttcaagagattctcctgcctcagcctcccgagtagctgggatcacaggcacccaccaccatgcctggctaatttttagtgtttttagtagagatggggtttcaccatgttgaccaggctggtcttgaactcctgacctcaggtgacccacctgtctcggcctcccaaagtgctgggattacaggtgtgagccactgggtctggcctatttgtcctccttttagccataagtatatattttctaattttaaaactgtatccctagaacagaccattcttagtcatgatgtcttgttctctaaatttagtgatcaattaattaggctcgtgttttgtttaaaattttacatgttttctagcttgggcaatatagcaggacctgtctcttggagaaaaaattagttgggcatggtgtacgcacctgtagtcgcagcgccttaggagtctgaggtggaaaggatggcttgagcccaggagttcaaggctacagtgagctatcttgcatcactgtactgcagcctgggcagcagagcgagactctgtctcaaataaataaataataaaataaaatagaaatttacgtgtctgtagaatagtctataatgattaatctctgcaacatctactcattgttttgggaagacaaaacaatgccgattttcctttggggaacaactctttctaccatgtgtaaaccatgtgttttagatagaatggctcagctgcatgggtggacctggttggctgtggctactagacataacacatgcccttggccccctgattatagttattggtccctaacgagatcagaacccaattaatgccaatgagttacaaaaataattcgtggcacccgtgagacaaagaagctcttatttccttgggagctaccagaagatacaattactgccatttataacacttcttatttcaaaaccaggcaaagataatattgtatcattgtaatctcgggtgtgtgttcttttcttttgtcaggctagagagagttaattgctcttcaattgcttttttcaaagaaactgattttgcttttgattgaccaagtagctatgtttctgtttttgtttttttttttttttgaggcagggtctcgcaccctcacccaggctggattgcagtggtgcaatcacggctcactgcaggctcaacctcctgggctcaggcgatcttcctgccgcagcctcccaagtagctggggactacaggcacgtgccaccatgccaggctaattttttgtatttttggtagagatgaggtttcgctatgttgcccaggctggtcttaaactcctggactcaagcgatctgcctgcctcagcctctcaaagtgctgggattacaggtgtgagtcactgcacttggcctgttttgttttgttttaattttttttgaggcagagtctcgctctgtcacccaggctggagttcagtggtgcaatcatggctcactgcaggctcaacctcctgggctcaggcgatcttcctgccccagccttccaagtagctgggactacaggcacgtgccacccaggctgggagtgcagtagcgtgattataactcactcactgtaaccttgaactcctgggctcaagggatcctcctgcctcagcctctcagtagctgggactacaggtgtgtgccatcatgcatggcttttcttattttattktattgtattttttatttttttgtggagatggggtcttgctttgttgtccaagctggtctcaaactcctgggcttaagtgatcctaaagtgctgagattacaggtttgagacactgcacctggtcttatatttcatcaattcttttgttccttctactttggttttcactttacatcttgacttgaatgcttagttcattcatcttcattaataaagtttacaagtttgattcaccctgtgagtgtagctttagcagtgctctgtagacgttgataagtggtcctctttgctctttcttcttttctgagacggggtctcgctttgttgcccaggccgagtgcagtggcacagctcactgcagccccagcctccccgcactcaagtgatcctcctgcctcagcctccctagtagctagggccacaggtgtacaccgccacacctggctgattttttgttttctatttttatttttgtacaggcagtctcactatattgcccaggtttcttttccttttttaaaccttgttgggaaaacttcaaaatataccacaaaataaaagagaatagaagagaatcatatgcctgtcacccagctttcacagttgtcagcattttactatagccctgcccactcccaatattttatatttttcatttgagtattttaaagcaaatctcagacttttagtcacctctaaatactttagcatgtattttttaggaaacggctttaaaaaacataaccacaataccttcatcatagctaacaccaccaaccacgctcattaatattatctaatatttattctgtgtttggttttctccagatgtcataaaaagcctttttacactttgtttgcttgaattgaaatccaaagaaggtctccacattgcatttggtttaagcctcttagctctttgaaaatctatagcttgcagcttcttttcccttttttagtttttgtttttaatgccatttatttatgaaggcaatagggttgtttgtgctgtggaacgtcccaggtttgggatttggttgactgtgttgtggcactatctaatgtgtttttctaatcctcatacttcctgtagctaggtcaggatgcttaattggtttcaggctgtttgttgttgggggggtggggggcagtggtttcaaggatattccacagactgtgctctgtgttgcacgttgagcagccaggttacatgatgtcgggtgcggtgtcagtaggttgaattatagagttctttatcaaccagttctctactgggtttaacggccatttgcttgttgcttgtacccgttatttagttggtgtattactttcctattgctgctgtaccaaattacaacactgtggctgaaatcagtctcactggtctagagtctgggtatctgggtgccatcaggcagctctggagagtatctgcttcctggccttttccagctcgtggcagccattttttggctatggccccttcctccatcattagagcacatgatctaaaggacacttgtgattgtggttacgtcccacccatataatccaaaatgatctcccatctcaagattcttaattcatctgtaacatatccaaatccagaaattaggacttgaatatctttggaggccattgttcagcctacagctgacaattataaagtgaagatttttctaattctattcttatttaaagaagatttcctgtatcaattttggaggttctgaaatgtggttcctgctggggagaaagaagaaatgaatgatttctttcctttatcagtgtttaggatgcactggaactaatagcttccaaagttgaagttcatttctgtagcatttccccctagtactataaacctggggatgtgattgtgcttcaacccgtggaagccgtattttggtgcttctgttgttctacccaagttggcttgtgtcatctttgggtgtgactccttggtttgtgactgctccctgcctgcctgtcacaggagggtgttgtacctcgtccgtgttctgcttagacctagagtcagtcatgtttctaaggaaccccagtctcttgccgtgagatggtgtttatatatcagtcagttcaatgtgtatcattttcttaggctaaaatcttggttcttaatgatattaactcgcttacctattctaaattttgtgactctgcttttcactgatttgtagtagccgacgatgcttaagcatcttttattccctttctagatggaggcatctttgaaaagtaaagcgcctcgtgtgatacagagcttcccctcctgcagataastctcacaaacacttagcatgtgtctgtccagagtttcctgttaaaacacactttcagaggcgtgtagtgtatgaataagtgccattttcatggcacatatttttcatacaatatattcttacagtaacgatactgacattattaggatatatcccatttggaatatattgtcaaattattgtgttttaaagttaaataattctctgatgcttaggccgccgctctgacattgttagatacatttgtttccattttctaagtagactttttattgaggtataataaacatgcactttttaatgtatatagctcagtgaattttcactaactgaactcactcatataaccagcattgagataaagaagtggaacgttttatttttagagtttagagtctgatttttttttttttcctttgagacagagttttgttcttgttgcccaggctggagtgcaatggcgcgatctcggctcaccacaacctccgcctcttgggttcaagcatttctcctgcctcagcctcccgagtagctgggattacaggcatgtgccgccacgcccggctaattttgtatttttagtagagacggggttcctccatgttggtcaggctggtctcgaactcccgacctcaggtaatccacccaccttggcctttcaaggtgctgggattacaggcgtaaaccactgtacccggcctcttctgatgtttatggttctaaaacagagctgttactcttgttctgctcagatgagcttgatttccatccctgtcccctgtcccttctttccttaccccaacattttcttcttgtttctttctgaaaatataaacagacatacacatttctatttctgactctttcttacagaaaggtagcataccctgcacctgctggcctccgttgctcttttcattaactgtgtaccccgaagactatgcatagtagtgtatggaggctttccttctaccttttatgctatgtgttgcttcactgcatggacacaamgtggtttcttcagcccatctgcatattgaagttgtgttactttccagattttttttttttagctttttatgtctcgctatctctgctgttgcccttctgaagtccattcatcccacacgtgcagtagctggagtttcctttttatctaatacttgagtttcccactgccatactcaccccacgttgatgcctaatgtcttcttgaggtttcctttagagggcactccttacctttggtgccagccattctgctattctgatcctacttcccctcattactgatcttccttctctgccatcctgaccccttcctgtccttggatgcctttggagttgcagagaagctgtctttatcttcctggtgtgatacttgttttctaatagtaggaaatagtgttttcttgttctgcccagttttctctctttatagatgagacatctaagttcctgctccctggatgtatgtcagtttttctcttacatggtaatgttctgatctgagtccggtatctccattgtctaactttgcatagaggaacatacctgtgctttggtggggacgttgtgcttgtattcgtgcagtttaatgttgaattarctctttgtggagacagttatataagtaagcgtttctagggagtctttatatccaaaagtgaggcttaatctctgaagagtagactgataggaagagagtacytggagagatgatgcagtcccaccttctcatgagacaaaggaggaagcaggccaagtgaagagggtgatgtgccaagcagtgtcagcagcagatcgcacattggagtgccacatgctctccacccttgagaggagaaaacctgaagacttgggttttcctgatgtgtgttttcttgtttgtagaaaagtattgtttctatttggataggactgagcccaagattaatctttcagattcttaagtattttccacccatggcgttagctagctttgtatccataacagagttctttataaacatgagctaagctaattctagctcatagaactttcctatgtaaattgtaggaaggaaaaaatcatcaagtgtaaattgttgccctgggtcaaacttcaaattattttgtttcttgtagtttaatgagatttatagtgaggagatggaagggatttttaaattgcaggactaaaggggaatggcccttcctacagccattctgttcccatccccttcccaggaacaccattacagttggggtgggggcctgcgtgggcttcaagccctggtgaggagtatgtgtgtgtgcaggagctgccatgaaacacctttcagcggctcagggtggcagactagtgttaccatggcagttagagacatcagtaaacccatgggtcatacggatgcatttccacctagaagcagtggtttgtttcttcagtgagtcaaagaaacttaagatggaggagaccctaaggagtcatgtaagttaaatgatcacccagtggagagtacacttcacagtgggaataagctctgcccattttttttcctaggtgctaattcaggaaagcatgctcactcttagtgatccttttcttcatgttgagatgaaatgtgtcttcagaattgttcttagttgttcttggttgtgcaggcaactggacagaactcagtccccctttaaatgctctccacatggtaaagacagctcttatgtatcttgttctcagtttccaaggcttgaataggttcatgtaaagtcatcaccacttcctcaaaaggaaattaacaaaaaaaaattttaattcagacgtcttgcagataacgtggcaattgtratgagaatagcacagcagagaaaataaattttgtgactctgtttttcactgatttgtagtacctggtgatacttaagtgtcctcttttccctctccaggtggaggtatttttgttgaaaagtaaagagcctcatataatacagagctttccccttctgctgataactctcacaaacacttagcatatgtccatccatagtttcctattaaaacacactttgggggtatgtggtgtaggaatatgtgccatttttcatggtcttccctcccgtcttcacattctacagcttcacagcagaattgtcttttcaagtccatcttttacccagctgttcatgttgatgcttgttgaggactgggctctggacttcctgtccttttgctattctcaatgacttgagtttccttctagagaggtcttatgcatgtacaaacatgtatatcttttaacacgactggttacatatcaacgtaacacatagctgcaggccaggcgcagtggctcacacctgtaatcccagcactttgggaggccaaggcaggcagatcactgaggccaggagttcaacrccaacctggccaatgtggtaaaatcctgtctctacaaaaaaatatacaaaaattagccaggcatagtggcgcacacctgtagtccagctacttgggaggctgaggtgggagaatcgcttgaacctgggaggcagaggttgcagtgagctgcgattgtgctgctgcactccagcctgggcaacagagtaagaccctgtctcagaaaaaaaaaaaaaaaagaaagaaagaaataggccgggcgcggtggcttatgcctgtaattccagcactttgggagacaggcgggtggatcacggtgtcagragtttgagaccagcctggccaacaatgtgaaaccctgtgtctactaagaatacaaaaatcagccaggtgtggtggcgcacgcctgtagtcccagctactcgggaggctgaggcaagagaatcgcttgaacccaggaggcggaggtttcggtgagccaagatcacgccactgcactccagcctgggcagtagagtgagactctgtctcaaaacaacaacaacaaactgcctcttcttgttcactgacactgggtgtatggttaaagcccccttaactgacctgttttgaggcacagaggtttatttaatcaccagtcatttgatacagggtgaagacctatttgaaatgggactggctggattctacatgttttctttttttttttttttggaaacagggtcttgctgtgttgtccaggctggagtgcagtggtgccatcatggctcactgctcaacccctggggctcaggtgatcctcccacctcagcttccacactgagtaactggcactacaggtgcatactaccatgcctggctaatttttatttttatttttattttttattttttggtagagacagggtttcaccattgtaaacccaggaaatctgacaagtctcagttaatttagaaagcttactttgccaagggtgaggacgcgcacccgtgacccagcctcaggaggtcctgatgacgtgtgcccaaggtgggcagagcacagtctggctttatacattgtagggagacatgagacatcagtcagcatatacaggacgaacattggttcggtctggagaggcaggatggctcgaagcaaaggcaggaagactccaagtggggaggggacttccaagtcacaggcaggtaagagacaaatggttgcattctttggagtttctgatgagcctctccaaaggaggcagtcagatacgcatttatctcagtgaacagaggggagactttgaagagaatgggaagcacgttggccctaagcagttcccagctagacttttccttttaacttagtgatttgggggccccaagatttattttcctttcagactatgttgcctgtgttggttttgaactcctgggctcaagcgatctacccacctcaacctcccaaagtgctgggattacaggcatgagccaccatgcctggccacatactctcttcttatgtaaatgaaattgataatatgtcgtctaggattttcagcattcatttaagtggaacaaaaatttaagaaactcataatcagtgtagattctctgagattttaaaggttttcctccatttgactttttcttttaaacaaacaggtcttgctctttttcccaggctggagtgctgtggcacgattgtaactcactgcagcttcaaattgggttcaaatgatccttctgcctcagtctcctgagtaactaggattacaggcacaggctaattgtttttattttttatttttttaagaaatgagktctcactttgttgcccaggctggtctcaaacttttggcctcaagtgatccttctgccttggcctcccaaagtgctaggattataggcatgagtcaccatgtccagccataatttttttaaggcaacttgtttttcttgaaatttcagtgtggtaaatttaatatccatagataaatttctcttcactctttcattattttgaattatttctaaatgtagttacattaactagtgaaactggcataaacaggtttgagagcaagtaaaactgagtcttactaagcacacatcatcactggtggggatcggtgttcagggcacactagaaggcactctgctcatgacatcaattaatattttactgtgggggtggagacttggtcattcatcaggtcgtttatggaggtcagtgatagtgctttgtgttctgccaccctttgtttacccagtcccggactgaaccaatgcaaatgtttaatcttctgactctacaaaaatgctacagtgcacatcgggcacactgcagagacactgcaggtttgtgataccaccacaagaaagcctgacatcccaataaagcacatcacatgagttttacgtttcccagtgcatataaaagctgtaacatgtttagaaaaacaatggtatatactttaatttaaaataatggttaaggctgggcgcagtggctcaggcctgtaatccagcacattgggaggccaaggtgggtggatcacctgaggtcaggagttcgagaccagcctggccaacatggtgaaaccccgcctctactaaaagtacgaaaattagctgggtgtggcggagcacacctgtaatcccagctacttgggaggctgaggcgggagagtcacttgaacccgggaggtggaggttgcagtaagccaagatcaagactgtgccactgcactccagtctgggcaactgagtgagactccatctcaaaaaataataataaaatattggttaaaaaatgctcatgatcattgagccttcagcaagtcttaatctttttgctgctggaaggtctcgctttgatgttgatggctgctgactgatcagagcagaggttgctacatgttggggtgactggcaattttgtaaaatcagacaacaatgaagtttactgcattgattgactcttccacaaaagatttctctgtagcacgtgatgttgtttgattgcattttcccacaatagaactactttcagaattggactcaatcctctcaaacactgccattgctttatcagctaagtttatgtaatattctaaatcctctgttgtcatttcaacaatgttcacaacatcttcattcagcatctacttcctgagtagattctatcttaggaaaccactttctctgctcatccataagaagcaactcctcatctgttcacgttttatcatgagattgcagcaattcagtcccatcttcaggctccacttttaattctagttctcttgctgtttctaccacacttgcagttgctttctccactgaagtcttgaacccctcaaagtcatggcatccggaatggtgaatcctttacaggaggttttcaatggactttgcccaaatccatgagaggaataactatctatggcagctgtagccttaaaaataatttcttaagtattaagtcttgaaagtcgaaattacttcttgatccatgggctgcagaatggctgttagcaggcatgaaaacaacattcatctccttgtacatctccatcagagctcttgggtgaccagatgctttgccaatcagcagtaatgttttgaaaggaatcttttttttttttctgggcagtagatcttaacggtgagcttaaaatactcagtaaatcgttttaaacagatgtgctgtcatccaggctttgtttcattcatacagcacaggcagagtatatttagtgtaattcttcagacccctaggattttcagaatggtaaatgagcattggctttaacataaagtcactggctgcactagcccctaacaagagagtcagccttttgaagctttgaaggcttctcttagaagcgatctagctattggctgggcgcagtagctcacgcctgtaatcccagcacttcgggaggctgaggtgggcggatcacgaggtcaggagatcgagaccatcctggctaacacggtgaaaccccatctctactaaaaatacaaaaaattagccgggcgtggtggtgggcgcctgtagtcccagctactcgggaggctgaggcaggagaatggtgtgaacctgggaggcagaggttacactgagcagagatcatgccactgcactccagcctgggccatagagcgagactctgtctcaagaaaaaaaaaaaaaaagaagccatctagctatcaaagtccttagatggcatcttcttgcactatgaggctgtctcatttacactgaaaatctgtttagtgcagctactttcatcagtgaccttagctaaatcttcataactcactgcagcttctacatcagcacttgctgcttcaccgtgcactttcatgttagagagatcttaaacttcaagaaccaacctctgctagcttgagacattttttcctgcagcttcctcacctctctcagccttcatggaattaaagagagttagggccttgctctggattaggctttggtttaagggaattttgagactggtttaatcttctagccagaccactcaaactttctccttatcagcgataaggctgtttcgctctcttaccatttrtgtgttcactggagtagcacttttccttcagccttttttctttgcattcacagcttggctatttggtgcaagaggcctagcttttggcgtgtcttagcttttaacaactcttcttcacgtgccttcttaatcatttctagcttttgatttaatatgagagacgtgcagctcttcctttcacttgaacacttagaagcaattgttgggttattaattggtttcccctcaatattgtgtctagggatcgggcggcatgaggagagggagagagatgggagtggccagttggagcagtcagaacacacacagcattgattgattaagttctctgccttgtatgagcgtggtttgtggcactccaaaacaattacagtagtaacatcaaggattacagatcaccataacagatacaatgacaatgaaaacgtttgaaatattgctagaattaccaaaatgtgctgttggaaaagaggcatggaaagacctgcagagttgccaaaaccttcagcctataataaacacaatgtctaaaaaacccaagtaagagaagcactgtaagctgaagtgtgcctctatctttgggcacatgtgtgagaaattcttagaagtaggaagtgttagatcaaagaatattgatgttttaaatctcagtccacaatcaaatatgtacgctctccaaagagaccacaccaattattcctccagccacacctgttttcccacacttttttttgagtcttcagattttatttttgccaaactgaggtgaaatgtagaatcttattctacttttcacttgcattttaaaatacaaattgaataaatgtttcctgcatttccatgaaaggcctgcttgtatcttttgcccattttttaaaaatgggttattaaagagtcctttaggaaatactgtaaacgtaacgtgctcctcttttccccagaaatgtttgagcctgccacgtgtgccatgtttgtgtttgtggtagaggagatgctttcatgattgagaagaagacgcattttatactctttycccctaatgtaaatttattcattaaacacaaaagatttgtaataaaatattttttccttaagattgttatataaagtttactaatgagaaaaactcccttgtcagtttatagtttagctttggtttgaaaatacagacactgtagcactgctgtccaatatgagccacatatatttaaaattttccaacatctgccttaaaaatataaaaataaacaagtgaagttaattttaataatattgtttcacccaatgtaagatactaccattttacatgtaatccatcctaaaactaataataaaatgttttagatagtatttcttgtactaaatcttcaaaatctgatgtatattttagacttacagcacatatcattttaaactagccacgtgtgaaggctgtagtgacatgtggccagtagatgttggccagcacagctcaaaagagtagtctatttctatgaaaatccatcaatttattcttttggacctaacatttgtcctatcctcttttttatttttttgagacagggtctcacttggtcagccaggctggagtgcagtgtcacgatctcaactcattgcaacccccacctcctaggcccaagcaattctcccacctcagcctcccgagtagctgggattacaggcacgtgccaccatgcctggcttatttatttatttatttttaagacggagtttcactcctgttgcacaggctggagtgcaatggcgcgatctcggctcactgcaacctctgcctcccgggttcaagcgattctcccacctcagcctcccgagtagctgggattacaggcatgcacccccaagcccgagtaattttgtgttttagtagagatggggtttctccctgttggtcaggctgatctcgatctctcgacctcaagtgatccgcccacctcggcctcccaaagtgctgggattacaggcgtgagccaccgcgcccagccccccatcttattaagaaaataaattgtatttatctgacacatgttctttaattaggctctaagtaaatattattctttactcagctgtagaaatatgtgctgattgtttctgtatttgtaaaattaatgtagtggcatactccactaaatgtattaatttagtggaaagtagtgagtttagtggtttagtggaattaaatgttagcattcccaaacagtgagatacctattaaagggcaggttcttttagataccattttccttgatctttttaacaacttgcagaaaaggccccaaaacttagaaatgtgaattattaaagttgagagcttaaacaactagccaaggtgacccaaattatatctgagcaagattctgaaagcaggtatcctggcaacaagtttggtgttctttatacaatttgttctcattataggtgcctataatgactcggataaaacacaagttacgtattttcaccttacctagaaatacgtgaatcaaagaaataagccagagaacagtgtcactggagaatatactaagttaccttttctgttacttcctgaaaagtagtgaaactgacagaattagttagtggagaaagaacaaggcaaatttacaggaaaccctggactgcaaggtctttgtttctgtctcatctgaactttcgtgagactttattttagggctgggagtttaatgtaataatatatactgtaatatatattagcagtaaatacatgtgagccaaagaaaagttgttccttattagaatatgctacaagtcaaattaaactgagtataaataagcttaattataaaattagtttgtgctaataaaaatgtaatatgagccacatataattttaaattttcagctttcaaatgggatggaaacatttctttgacctgactttgaccaccacactcagtatgggagtgcaaattgtgctaaacttagctcccatcccatggtgccaataacttcctataagactgcactgctgccaaggaagtggtgggcgcctgtcctccacatctctgctcccacagccttggagatgacccctggtccgctgctcctcctaaccccttcagcatggctccactgcagcgggttcctgtcaggtgataagttaaagcaaagagaggagtaggctgcataaattgtatacctctgtttatccatgttatccactgacaattaggttcttaaaaatttgttgactattactagcagtgcagtgagatgagcattcttgtacatatttccttttgcccaggaaagctttttcctgaagtacgtctccagaagtgggatcgttcgctcgtggagtatttgcttcttaagccttaataggccttgcaaatggtgtcaaataaggacctagtttttccctcctactgtagataaccagttttcccagagccattgattgcatcatccatctccctgctgatccacacgaccacatctgaggcaggcaatgtcagtgtctgtggtgtctgcgttgggcccactctgctgctcccttgttctctgtgtctgtccccggcactagcaccacagcctgaattactgacactggagagagcaagccctcctccacgttgttttcttcagagttatattagctgttcttggtccttgatcttttgtataaattttgttgtgtaaatatgattgtatttgtaactattctaaaaatggtgtatataaatawttttttttacaattcagtgtttgcaatgcaacattataaaaattacatatagaaaacttgtataaataaaaattgtataaaatctggttgtaaaattccatacacacacataccttttgggatttaagttacatttgcattgaatttctagtctaattaggggagaattactatccatgattaagtctttctttagatgaccatggcctgtctccatttattaaggtcatttctgtattttgacaaaggtttttataagttctataaatcacattttttttcttaattagattttaaaaaatttttttagaggggtggagaggggacagagtctcacgctgttgctcacgcggcagtgcagtggcgtgatcttggttcactgcagcatccgcctcctgggttcaagcgattctcgtgtctcagccccccaagtagctgggactacaggcatgcatcaccacacccggcttagatttatttttaatagtttgttgctggtgttttggaaacataattgattgtgtgtattggttttatttccagaaaacttactgaactttttaattagttctaatagtgtgtccatacatcctcctggattttcttccagcacagttatattgtctgtgaatactggcagttttggttcattttcaattctggtaactttcttttcttgccatactgccctggcttatattcctagttgctattaggaatgggttaattagttgagattcttcatttgaatttttttttttttggagatggagtcttgctctgttgcccaggctggagtgcagtggcaccatcttgtttcactgcaacctccacctcccgggttcaagcaatcctcctgcctcagcctcccaagtagctgggagtacaggcatgtgccaccatgcccggctaatgtttgtatgtttagtagagacggagtttcgccatattggccaggctggtctcgaactcttgacctcaggtatctgcctgcctcagcctcccaaagtgctgggattacaggcacgagccaccgtgcccrgcctatttgaatcttttgaaatgatcaaattatctttgcccctcatgctgttaatgtggcgagtaactttactctgtttttctaatattgtacccccccacattactggattaaacttcatcgtgataatatttgtttttctatttctgggtcagtttgcaagattgtttcaggctttggcttttaaatacctaggtgagattcacctactcctttgtctgtgatgagtccaagccccctagctttgtgtgggagataatctctgaaagcttccttacaaaagcatttggagacccgcctttttgttgtattattttgttgttgttgttttttggttttttttgagatggagtttcacttttgtttcccagactggagtgcaatggcgtggtctcggcccacggcaacctccacctcccaggtacaagcgattctcctgcctcggcctcctgagtagctgggattacaggcatgcaccaccacgcccaactaattttgcatttttagtagagatagggtttcatcatgttggtcaggctggtctcgaactcccaacctcaggtgatccgcccgcctcggcctcccaaagtgctgggattataggcgtgagccacctcgcccggccttgttgtaagttttatatttgtttctttgaagattggggaaggttggttattgaaactatatttctaactcagtttgggtaacttatttttctagaatttgcccatttcatctgttttcgagtttttgacactactcttctcaatagaattcttacatgatttttcaaagtctccattttagctgtagtttttgacccccttttaattcttaatattgcctacttatactgtccttttttcaggaatcatttttgccagagattgaacttgtcttttaaaaaatttggatgtaggttttgtttatcctttgtggtatatgtcttttagttcattaatatcttatctttatttccttctacctttcttttgtttattctggtgttttttgttctagtttcagtagtggatgattagcttattttatttttttcctcttcactaataggatggcttaaagttacaaggctttaagcaacaatcttgtttcattccacaaggtgggatatataattgcttaatggcttagttttaaatgttttcagatttcttccttgttccatgagttacttagaagcaagttttaaaacttatatagtctttaaatttttaagttgagttctaattgagtggtggtctgagaatgttactatgatttaattctttactatttgtttaattttttttttttttttagctcctggccaggttttatggttttttaaaaaggtgtcacttttaatcatgtgttcaataaagtagatttattaattgtgtttgcatcctctatacattttccaatcccataacctgtgttaccaagagagttgggtcagtctcaccctttaaccttggatatatcaatttctcctagtaaccttcagtttttactttatatgttttgcagctatgttattagatacatgtaatcagagttactgaatttttaagttcttgaccttctctgttcttaataatgatttttatcctacagtctgtgttatctgaaaataatataaccaactttcatatggttagtatttgctcggagtacttcttccatctctttatttcagcctatatgtctgtatggtttaggactgttgaatggcctatagctgctgttagagttggtcagtttagtctgttaacacgtatttagattactgatgggtttgaattcattcctctcatcagttttgtgttttatttaccttgctttttcattgcttcttttacttttcttgcctcctattcttttttcttgttttctctcttttctttaacaattattaatacagtataatgtaaccagtaataatgtacatcgtaatgaataccgctgaacctaccacctaatccaagatctagaacattgccaataacttccatttgagtaagagtttagtttgaatgttaaaaactctttgtttttcctagattgtctttaaatttttaacattcattctcaacaagggctaaaattagtatctctagcctctccccaaataataagaatcttgaaaccttgcaacttcatatcccccttccaccttatatattattgctgcctaagcattttaattctgtcttttattttattttgtacttgcatattctgcttacgtacctatctataatttaattcccttcaaattttattgttgatattagtatagggtcaccacttgtttcactttatctaggttgctggtttatcagtattccttctttctggtctctctggctttcattttcttgctgaaatatgtcctttagtaggtctgtcagcagggatctattggtagtagttgctttatctttgaatatgtctattctcattcttaaatgaaaaagaattcttaaatccaaattgacagttatttctttcgccataatttatatatagccattatcctctggtatgtattgttttaagtggtctgcctttggtctcatagtattctttatgagtaacctgtcttttctctctagttgcttttaaggtcctgctcttgtctttggtgctctgaggttactctgtagtgtgttttgatttggattagtttaaattatcctgctagacaccttctctgtcttttttgggatgagggaagaatgttgtatcattaaatcttagaattttctcagctattttaaaaaatgtttcttctctgttctttggattttttcttttctctttttgttttggaactccagttatagacatatgttagagtttctcattccatggttcttagctctttcattcgttccatctctcgattttttttctaaaatgtcacctttatgtctcttatgcttttttattgtctcaatcttagttytgtctcccgaagttcttgagtctaatcctacttctaatccatccttccttctttttgagctttgggcttttagcctctctaccatttgtgctgatctgtgggtatcctttttagcctggtatgaggtttattctttcctgaggcggggtgggggggaattgctttctgttttgttaatatctcagtttgggctaggggttcctggacaaatgggcttggttgtagagtactagtccattgtccctacagctcaagagatgcttctgtctgccagctcaggatagtcagagaaggcatcctgtagtcccctctacactagtgggcttttcttcttctttttttgatctacctatcttctggtaagtgtagcccttttggggatcatgactttatggaataggagggtatctcttctcacctcctaccttgagcagacccaaacttctcccccgtccctttgagggctgaaaactcaaatgtcacagacagacgttcacacttcatttggtctgaatattgctagccatggaatttctaaaatttgcttctacgaactatttattagtttcagtgtgctaagcctgctgggaggaaatgctggttgtgagcatcagcacagaagcattctggacggttattagcacaaagttagcatatgattttgtaatctcttctgctaacagtgttttttaaactaactctttacggtgtcctgtgtactaggtactgtgcctgtgctgacttcctagctttattggaagttccttgacagcggaccgaatccctacccgttactctttctccatctccctctgcagtgctgagccctcaaaaacaaaacagcaacaaaaaacacacttgcactagttgctgattggttaatccccacggaaaggttaccaacaaaccacagcagtgacacagaagggaatgcctatttccacatctagggaggcccacctgcccagttccgtgctgctgacttagagcacggctttgctgatgatatccttggctccttctctgcgtcaagccgcaggtgttctctgccttctgtgattctgctcccctccctaggtggtgtcatgaagtgcatggtatttctgctggctcctaggcttttcccctgaccttgcacatacagttgcctgctccacttccccacctgcccagtcagggcatcacacccccttatccatccagtcttccttgaattttacccacctcagtgagggcagctcttcccagtcactcaggccaagaacctgtgtctttcttaacttcttttacacccctcttctggtcaataaggaacttcttggtgcttctttctgaatatataccaaatctggccatttatttcctccattatgcccaccataatgcaagccattgtcatctttagactgaactatagtaggcctcccctgccctcccctcccctgccacttagtgtcagtgttccacgaaaaaaaaaaaaacacgtctgatcctgccttctgctgcttgcagcccccacccagctcccaccatcctcaacagcacccgtggccyggctgcaggctgtgcggacctgaccccattccctgggtaaggctgggtgtgcccctacctcttcccctgtgtgggacggtcttgtccccagatacctgtagttgatcctgtgccctatgcaggattctgttgacctgcgactttgccagaggttcagactgacatctctacagattgctcgactccctttatacccttaaaagaaacagtggcagttatcacttagtaaacacaatggatgcagaagtgacaagtccttcccggagggtggagacccygagagtagggattccgttccgcccagtcctgcgtatccaccgtgggctcagaggccacacaccggttcttttgcgtgtatacatctatgtagagatggagccataagtaatacacgctttaaaggaaggggattttacattttgggggggagattaagttgattgccaaggaatcgggtggggatagtttataaaagtgagggacataaggaataggcacgcaggaatgagggaatgaaagccctggagccgcctgggagcctcactgcgctgtaggacctcgtgccagtgtggccatccgtttacgatgtggtgggcatcctttgaggtttttcttctgattttggggaggtgggcggtactggtgacatctgcttccagagcagccgtccttcctgctccctttctggtcttcggttgtttccactcgggttcttgcggggcgcgctccctctgctttctggaggtgattaatttcccaactcctcggcaccgccttccccacccgaaaaaaggatgcagaaccacgcctgcagttgggtgggcctcccgggtgctgggcggcccggggcggcggggaccccagcggcggggcgggcgggcgctgacgtgtccaggcgggattgggccgccgccctatatagcagccggggcccgggcgccgcgcctcggagcgtcccggcttctcccgcgcggggggcgagtaagccagcggcaggaccagcgggcgggggcccacragtgagcgcgcaacacggggctgggaggcctgggcgggcgggcggacggggcgggcgggctgccgggcgggggggtggggggtggctgctgacgtggaggccgcggagggggaggggcccgggtgccgcggcccccacccgggccccaggctgcggcccccgcccgcgggtgtcctgcttaccgcgcgtggcggttccgggccagacctggggccggctccgagtctcttctgcgcgtggccgtggcgcggaggggcgcgcacaaactttctcaagtccggtggcgccgctgggccgctcttggctgcaagctgggctcccccgcctcctcccggggcttcggtggggcacccctggtgccgtggccgcacggcgcggaggggcggccgacctgagcccaggtcgctgacgttggcggggccggccctcccctcccccgctccggcgggggcgccgtgtgcggccagggtgggggtccctgggaggccagcggggtccttccccccaggtggcggcggggcgggggtctgggcgcagaccgggcggcggggcccccgcagcacctccacctgccgcgcggggcccgcgtcagtctacgtgttcgggggtggggaaagctgctcttcttgggcctggagtgcaacttggacgtgccccagggtcgtggatgaaaaatacattacggaaaagtaccgaatttggatgaaaggcggggaggccgaggggttgctgtccctttaagcctgtccccgcccgcgggccctcgtggcctgtgggagggccgtgctgaggtggcatctgcgaaagttcctccatgcaggatgggtgccgacttccagaacttggtgagaagtgcggagcggagcctgccttctgctcgccagtcgcctgtggtctctcctagatttcgatcttgtgatctctgagtggatcaggattttattttcccattctgaactttggtttgtggtcttgagtaattttagttttggaagaggagaagtctgggtttcagccggaggcttttttggtgccctccatacccggtcctgtctggtgctttaaagcacttgcgggtctcattaactgaggctgaaatgaaattcttcctggagtattactgataattctcttcgaagactgttgccccttgaatatgtagttggcaaaacttatcacaagggaatcaacttaattacttcctcgtttaaaagcaaaaaagtagaacccctcatgtgaagccttttttgttgctgtcagaaacctgttagacttgtgctaaacttgtaagcaccaggtttcccacgcaacacacagctctgtcaggactccacgttttgctctacacgtattagggcggaaaggggtcttggttcctgccctccttcctttagttctagttctgtttgctgaaagttaaattctgagatgtgaccttttttgctttggatgtttgcactctgggaaacaaaattaaaagtccaggttcagtatagtttgaggtttacattaggtggacctggacactgattgatccgagcttcctatgggaaaagtagttgggagagccagaatcacgaagggactggggccatatgggagggactgaaggagacaggagatagggctcacctaccagaaggagccttggaggagagcggacttgttctccatggccagaaaggggaaagaagttgtagattttgtcataacttgaggtggagcgtttacagccatgcaggggtggacccgggccctgagaaggccaygaatttcctgtccctggtggtattaagaaatgggattagattaatatctgaggttcctttcaatcctgatttggacagtactgttagatccagtgagaatctgagatacccgatgttagcctctgttcttgggtatctaggcctgcccaaggtatcctgggaacttcagatagcaagtggagttgcctggcgctgtcctggggttgctgaaagatccacatggaacaggattaaaccctcgtgggtgttgtctgtgaaggcagagccaggagcagggcgtagcagtgcggggtggacatggggctgtagggtcagcttcttaggtgctgctttgttgaaccagaggcaggtggacccctgggctgtgcctcactggattgggagcacagaaggagaatgagactgacttttaagaaaatctcacccagaatttcaggtggggacagggtctgcatttacatgtgggtcatcaaatgcttgcttaaaacgcagtcttcgaaaacaggtttttgagttgtttagaagaaaaacaaaatgttgtttgatgataccagaaccctagatgttaaatgtgtctctagttgtgaaccattcgttacacgctctgacaaactgccacttggaatctggaggctagggacccagtatagcctgtcaaaccagtctggagttttctggaggtctgccttctgccttacctggctgcctgagggtctgtgcacgcctgaggaacatgagaggctctgctccagggtctccctcagacacaggagtaggttcccttatgttgagactcctttcagtatagggtccggctggacttggcttctgaagggtgtgtgagtggtctcagaagagactgacactgggtgcacagtggggattggctcatcacagctccgtgctggagagtcggtgcgggctgacatggacggaactgcattttgcagacttctagtgtggctgtcactgggcactagagacttgcccagaacctagcttgataagggggtgggtgtctgggtttaagaagtgacattggagcccgggacaaccttgagtgagagaccatgccaggtgagagtcagcaagcaagcgtgggagggcggagggtggatgcgggagaccagaggcaagtgtcactggacacctgttggggcaccttagcctggagtgccctgccctgttttgctcccagactggacagacacttggaatctcaaggagctcttgccgagttgtgaatgtgctaatctgacactttggagaaattttcttactttaatctttaaaacttgcaaactagaattttggtgatgcttttaaatggaatactcttgatcagtttgtcccagctttccccttcagtcttggggtacatctgtgtgtctggtgcatctggggccccatagtgtctctggtttgtggcaggttccctgtgtgactcaagccctgtatttagagtttttaaaaaactcatgaccaagattagaatccagaaataccaccagtccacatcctctgctggaaaggcgagaccctttaatccagtctactggatgctcccccattgccatgaaccgccttctcagctccggacccatgtgtcgtaaggrcaagattattgtcacggtacgagtagtcttctccagttgagtggggtgttcctgttactgtcattgcttttcccattttagacacatgcctcactcctgtcagcagttccaccttttcatggttgaggagcacatgtggtcgccagcctcccatctccagagtcccctaaggcaaggtgactcaccctcctacttcacagagttcttggtcctccccagacagcctttgaaggttcctttcaatcctgcgatttcatgacctggtttctagatccccagtggattagaaaggactgaaggacttttacaggctaacagcaagaagaacaaagtaactgcaaaatagacggagaattcttgaagacggtagctcttggtcaccataagcgctgcagagaccccgaggtccacattctgttgtaggtcagagcccagcacaacaacccttcttctggttcagccgcccagcggttatgtggggtacgggaaagatgatccagccatgcaggagagcaccagtggttctgtgaggattttacttcaaaatagttaagtttagaagtttggcacttaaaagatcactccctcaggtccctggaatagttgtcctctgcaagttggagctggttcatgttttgttttaatatgttttgtttcaagctaacgttttttttttcttccaagaaacttgcctgagtattggtgttagtaaccaaagcataaatatcttgaccttttctgattttgaggtaaaaagatctgagttgtaaaatgtagataagtaacttttctctggtttcctctctctcctctcccacttcccatcccataccagcaaaagctggcaggctgacagaggcggcctcaggacggaccttctggctactgaccgttttgctggtaagtttgaccctgtctgaagacttcctgtccctgggctgtgtgtggacctgggggcgcagggatgcgtattttcttagtcctgtgtgtaccttctttctttatatcacaccttcaagtttctcgtggttcgtcagagatgtctccatagcttcacctcccagcaggaaccatctatagacgtgtgtcccttagatgtgtcatctggcttccgtctgtttttaatcttttatttcttaaatgtgaattatgtttattcagtattatctgaattggggtcttgcttctctttaggattgcaggccttaacttttcttcaacttggggagaggtcttaattatgttataaaaattatgcaaaattcactccttattacttggccttgttgtgcgagtaattgatgcgtaattgtgtaaagaaaatgggttcttcctcactgtagtagtttggagctcacctggaactggggagagggaaggagagggaaggagaggaagctaacattcctacctcagaatgctgaatgtaccccatttttcacataagggagctgtggctttcggagcccatatcccgctgagcactgtggctgtgctaatgagaaactcagcgcccttgggccaggtttcccctgctgtgcgagttctgtcccacacctggagggatgggagaataaccagtcagtgtggatcaagggcatttagcgcaatttgtgggtctgttactgttgctacaaagcactgaggctgctttttcctgtcacgcagctaccacttataaccacctggttaagtcgagatttggaggtggtttagtttggggcctggatgcaccttgcagagagagaccgctggctttttgtagcaactgtcatgatgcattttgtaagcattaagaggtgtgtggtgagcaaattgacagaataaccaaggtcrctgttaggagaacgatcctggtgttgatctatgcctggagcctgggtcaggcaggtggcaggttccatggtccccccacccctgcggttaggggtggtgttgactgtgtctctgtggcccctggggtggagaaatggatgcagactgccccaagtggaggatgagctcctccattacaggcaacttttgaggggacagttaaccagctgttctaggacaaacttgtctaacccgaggcccaggacagctttgaacatggcccaacacaaatttcttaaactttcttaaaacatgaggtttttttttgtttgttttgttttgtttttgtttgtttattagctatcattagtttattttatgtgtgtcccaagatcattcttcttgcattgtggcccagggaagacaaaagattggccacccctgttctaggacctcctttacttgcattttcccccctttttatcacttggtgagagtttgggtatcagcttacatcagaggttgtgaggaaaataaaaaggtatagtttgctggtaaaaaagagagtaaaactttgctaaaactcttaggttaacaatctcatagataattgagggttgtactttgacttctgatttattcttctttgctttagtggttttcccggattgtgtgtaggtgtgagatcaaccatgagttccgttgcagttttgacccaagagagttttgctgaacaccgaagtgggctggttccgcaacaaatcaaaggtgacagcccttttatgtgctcttcctggtaatgtctaaggcattgctccctctaaagcctttaccaaatcccatgccctttctagaagtaccttttggccctgtggttgtggggcagggagggtccaacatcttgtgcactgttttcgcattgctgtgcgtgcaggggcgactggccaggcatgaggaaatgaatcaagtacagtgagatttaacatgtgggcagctttctggaaagccagcgaatttgaccattggtaattaatgcagtccttttcaaaactgctttttcctaattgtggtaaactaaaatctgggctctgaagcatcccagagcattgcttaagcctgccttgaggatgaaggctggaccctggcttcggagttctcgaacgccactggctgggattaagagcagtgctgtacagtagaatagactacaagccacgtgtacaatttttaggattctctggtacttattaaaagggaacaggtgaaattaattttgatattttaccccaatatgtctaatacactgtcatttcaacatctctaatgtaaaaaaaagggggggaaccattgatatttgagattatttctcttcgaagtctgatgtgtatttacaacggtgggacatttccttccatttgaatgccagattttcatccaaaatccttgatctgtgtttagatgttataaaatcttcatttgaaagagcagattgttctactccaggttgttcgaaacacacttaaaagttttccaataactaaattgagtattagttcttaaaattaattaaaatataaaattaacttttccttagtcacactagccacatttcagaagctcatttctggtggctgctgtgtcaggtgttggaacccgagaagctgctttgttctgggggcctgggatcctcctcctggagccagcttccctgtgaagtctgtgtttccctttctagagagggaagacggcactgaaagaatgcttccacctgtcctgtcagcgctgtcgggtagatgggcatgcagctgggaagcgatgggcctggacttgggcatgagcctgtctgattccagagatcatccccctgttctctgtcacatccattcatggtgtttttcactgggccttgctattgccaagacrccatgctcagtcctggggatttgggttatccaaaacagtcacacccttgatttcatggagattgtggctaatggcacaaacacatgaacaaatagggcactatggaagatggaagtgatgataatcagggaacctgatttccacaagccttgctgtcctctgccttgggcagggcagggggagatcagcggtgacaattgccactgcagtctttttttttgagacggagttttgctcttgttgcccaggctggagtgcaatggcgcagtcttggctcactgcaacctctgcctcccgggttcaagcgattgttctgcctcagcctcccgagtagctgggattacaggcatgcaccacccacacctggctaatttgtattattagtagagacagggtttctccatgttggtcaggctggtctcgaactcccgacctcaggtgatctgcctgcctcggcctcccaaagtgctgggattacaggtgtgagccaccacgcccggcctccacggcaatcatttttaaccttgtatgttacagtggaaaatcagagtttgcttcaaaggcaattctcacaggtggtgctgggtaggaccattgttttgcaaatgcaggggtctgctctgtgcctggcattgccatagttgtgatttttttaagtgtgttattagactctagaggacttaaaaattgacgtagcaaggcttgctttcaagggactcaccccgttaggggagtggggctcacaatgtctgagctgatgtttaccarggaggccatgtggatgggggtaggttcgctgtcagagactgggagtctctggcctcctctagctctcacactcagggtgctgggcctggtgacctcctggggccttttccyatcactatgaattagaagagaggggtggggggagttgtccttggagcatttgatggttcttgtttgtctgtttttaagcactaaaacccttaaaagtgtttttcatgtaatgctaaaagtagtgcttccttttaatctgtgttggctggtccagttgccactctaaattcagaagaggagagcgaccctccaacctacaaggatgccttccctccacttcctgagaaagctgcttgcctggaaagtgcccaggaacccgctggagcctgggggaacaagatccgacccatcaaggcttctgtcatcactcaggtagaaacaccattctttcttttaaaaattttatcatgtaacatgtctatgtaaatttttaaattttttttcttttttttttttttgagacagagtcccgctctgtcgcccaggctggagtgcagtggtgcgatctcggctcactgcacgctccgcctccygggttcacgccattctcctgcctcagcctcccgagtagctgggactacaggtgcccgccaccacgcccggctaatttttgtatttttagtagagacggggtttcaccatcttaacaaggatggtctccatctcctgacctcgtgatccgccttcctcggcctcccaaagtgctgggattataggcatgagccaccgcgcccggccagttttttaaatttttaaaaattaattgctgttctttcttaacctatccttccaagcgtagaatctgatggaagagtttctgaatgtgcaagattgagaatgctttgagtagctaaagggagaaggccttcaatttaaatcatcccccaccccagagatgtttctgtcgaccacttctctcatgtccaccctgtatgctagcactcagtaggacaggcacgtggtcgttttgcaggcagtgtttgtcagatgaatgggtcctgttttctgttctctrttcattatcctgctttctcgaagaggttaaccagtttcctggttttctttggcttcagtagcccttctctctgctacctgaatttgagatgttagtgagtttcaaaacttttatataaattcatatcatctggtcatggtggaaaattactatctcgctgccagtgtcttccctgaattttaggctcataaacagttgcatcccaatccttccattttcacctgtctgctatcttgttaatggttttgttaaatgtaccactgtctacttggtgactgtggtctcacaccagggtagttgatccctcttgcttccaccttgtccctcctcagttcttctccataaagcaacgggagggaccctgcaccatcaagcagaatgcctcctgctgaaaagcctgtgttgacttttactacrgggtgggatgggtgatcctcttcactgtccccctctggtgtgtgcaccaggctccgcccccatccacctcctccgctttcctgcctgtacacccttagttccctcacctcttaacatggatagctgcctcgtgcttcaggacggtgtttcctggccgtccccagggtccacctcccactttctctcaaactctcttgcccctgttgatttcatcacagcacttgctagctgcctcattcatttgtgcagctgatgtggttctctccttaggatgtcagcctcttgaccttggccctttctccttgtctttcggctgctttatcccagggcttcgagcagtgcctgtgggcagggtggggctgctttgtgagtggatggtgatgaacacatgttctttactccctatctgttggccttcttttaatctcttaacctttccttttttgatcttttttgagcaggtgttccatgtacccctggaggagagaaaatacaaggatatgaaccagtttggagaaggtgaacaagcaaaaatctgccttgagatcatgcagagaactggtgctcacttggagctgtctttggccaaagaccaaggcctctccatcatggtgtcaggaaagctggatgctgtcatgaaagctcggaaggacattgttgctagactgcagactcaggtgggtagcctgaggcctacttctccccagtgactgtgtacccgttccattacccggctcctgatgcaggctagaacgtcactggacccttcctaccagtgggacagttccgtcttttggaggtaggacagcaacattcagagtcctctggcatttttagtggaaaaactcactaaactaataatagaactgggacacttaccatttttgctctttgagtgaatgaacttgaaagtaataataattttttttttaagagacagagtctcaccttgttgtctaggctcttgtgcagtggctattcacaagtgtggttatagtacactgtggcctcaaactcctgggctcaggcaatccacctagcctcccagttagctgggattacaggcacaccaccacatctggccaaactgaaaattagaagcttgtcccagagtttgagacacttaaaagaagctgggcttgctgaatggtaaagatgggtggttcccattgctttgctagtatgttcactaactacacatttccaggccccaaattgaggagattacaagttcaaattctgttttaagccagtttcctcgtctttggcagtctgatgccagtacttggactttatttaagaacatttgtaataagcaaatctctgatgcatttctccctaagtggtagcacttaaagaccaagaaaaatgtaaagaatcttactaaagtgttgcgtgactgctgttgtactagataggcttatttaggaatgggggttcttcccatctgctactgagtctccttgatcttgtgggagctggatctggagcaccctggagcatggtgattggacgatggggatttgatgggagagggcctgaggggtaggagtgcagggtgtagccaggaggcgaggcagaggagtgccacctaatgcaggtccagctgtgccacttaaccacatgggggcatcgggacagtccccaaccccagctggcttcatggagttaaaccattaagtgttaggaaggtgaaagtgttgcttataattgtccagcatggtggccagtgcataataggctctgaaagttttccaggtgtctgctagtcagtggatatttgagcttctgttttgtaatcaacactgtaggggaaagggccacttcactgaatatatggatcagaatgaagacattgacccctgacactctcctactcctcarttatcttcagacaaatcccagatacattattgtgccttagttcagatcttcccgttttcatgtatacatatatatagtcattgtgctcctaactcatgtaatcatattgatagtggtttcttaatattatacctttttaacccagtctctgtttggactttcctcatcatctccaagatgtttctttcagttggtcttttcaagtcagtgtccaaacaaggtcacaatgttgcatttgattatagagtcctgtctctcattctttaacagtgcttactccctcctacccccttttttttttttttttttgagacaggatctcactttgttgcccaggctggagtgcagtggtgcagacacagctcatggcagccttgacctcctgggctcaagtgatcctcctgactcagcccttcaagtagttgagactgcaggcatgcaccatcaggcccggctttttttttgtttgttttttggcagatgcgggttttcaccatgttgcccactctggtctcaaacccctaggctcaaatgatccactcatttcagcctaccaaagtgttggaattacaggygtgagccaccacgcccagccaatcctccccttttttaatgccattgattagtggggaccgtaggtttttggttctgctattgactgattatttttggtgaactggtgttagatctctaggggcttggttacttccacagtcagcttgttgggcaagaagaccctgtaggtggtgctgagtctgtgctgtgatagctggttgttctgctttgaactgattttgagattgatcattaggctcaggtctgggtcttcccttgtaaagttccctatcagtgctttgtgtaatcattttactatcaattggtgattgcccaaattcgttaagggttgcaaattatgcttttctaattctctccctgctcatacattagttgataattcttgtaaagaagaatttttcttcatcagcagttgggtgggaagtaccagataaataatcgattctttggcgctccggcgacttcagtgttgatcagtgactctctttagtgtcattatgaactcaggcattgtccatcattcttcatgctggagctgcttcatctttggccagtgggtcccctcctttcagttttgttccctgcagctttctgtcatgacctattaatatcaataccttctggccaggtgcagtggctcacgcctataatcctagcactttgggaggctgaggcgggcagatcacctcaggtcaggagtttgagaccagcctggccagtatggygaaaccccatctctactaaaaatacaaaaaaattagccaggygtggcggtgggtgcttgcaatctcagctacttgggaggctgagrcaggagaatcacttgaacccgggaggcagaggttgcagtgagccaagatcatgccattgcactccagcctgtgcaacaggagcaaaactctgtctcaaaataataaataaataaataaataacttcttaatttctaacacagaaagatgcctcaggctaatcttacatatttccttccacagaccttgagtcagctgtttctctctgaactctgaaccttttgagtaggaaattgcagttggagactccagtctccataggtgcacgtcgcaactaggttgtcagagcttctaggctttttcagaagacagagctaggataattgtacttttaagaaaggaaaagcaggcggtgactctcacgcctgtaatcctagcactttgggaggccgaggtgagcagattgcatgagcacaggaatttgagaccagcctgggcaacatggtcagaccccatctctacaaaaaatagtggtggcgtgctcacctgtaatcccagctacttagaagtctgaggagaaaggattgtttgagcctgggatgtggaggcttctgtgagcagtgtttgcaccaccacagcccagcctgggtgacagagtcccagaaaaggaaaatcatgagttcaaaatcacttgaagtaattccttttttctgagtttttctgtcatcttgatatagttaggtacatttgtttccatttactgtcaatttttaaagtatttcaacatttacatgcttgcaaagtcaacgttatataataaagtactttcagagaaatctcccctgcctgttaccttcaccctgctccctcctcacctttgcaggcggccattcctggtcctggtttatcctttgttgtttgttgtttgagagcagaagcaaaatacagcttgccatacaccctgttctatgccttgctttttttcttttattattttttggaggtgtctgcatatcagtaagtagtgatttttctcatttctttgttcagcagtgtaatattctgtgggcgtactgtaatttacccaggctttcctactgatgggcatttgggtagtttccagactttagctgttacaaattatgttacagtagcaatcgtgtgcatatgctatttcctgttttacccagtgtatcttgggatagattcctagaagtgagatggctgggtcagagggtggctgcatgtggaatcgggccatcggatgctaaatttccttccttaggaattagtgttttgccgtctcatcagcagtatgcaagagccaggctcttcacattcttgggttttagccgatgtgagaggcaaccaaatatactttaaatttgcatttttctgatgagcaagattgagcaccttttcaatatataagggccacttgcattttttattatcttgagtcattgttaggaaagttttttcactatcaggtcataagaaagtttatcttttcttctgctgcttgtaaatgtgttcttacatttcagtttctgatctatttggaatttattgcaaatagggttgaggcactgattgagtttcacttttttccatacggctttcgagttgtcagcactatttttttgtttgttgtaacacagggtctcagcctgccacataagctgaagtgccatggcatgatcacggctcaccggagcctcaacctcctaggctcaggcagttctcctgcctcagccaccccagtagctgggaccacaggcacacgtcaccatggccagctaatttttttttttttttttttttttttttgagacggagtcttgctctgtcgcccaggctggagtgcagtggcgcgatctcggctcactgcaagctccgcctcccgggttcacgccattcgcctgcctcagcctcccgagtagctgggattacaggcgcctgccaccatgctaatttttgtatttttggtgacctcgtgatccacccacctcggcctcccaaagtgctgggattacaggcgtgagccactgcgcctggccttggccagccttatttttaaaatttttgtagaagtcaggtctcaccatgttgcccaggctgatcttggactcctgggctcaaacaatcctctcatctcggcttcccggagtgctgggattacaggcgtgccatcactgtcttgaaaagacgttttgctctagtgaacttgagtggctgcttttatcatgtcctaaatgtttatattaacttagctctgtttctgggttttcagttcagaccagcaggtctttccgtatactggtatttcctgtgttaatgataatggtttcatgtttaatgtctaggaccactgttaacacctccaccctgcactattctttttcagggttttcttgttyatttttgttkgttctgtgttacaacctttataatcaactgtttgaaattgtattaatattttaaagttaattgggatratcgccatctacttaaaccttctgttagctattttaaggagtgttttctaatttygaatgcacatactccaccttgtgttgggcttatgtcttgctattttcttgtccttttttcttttttccttttttctattagaaacacatcttttggccaggcgcagtggctcacacctgcaatcccagcactttgggaggctgaggtgggcggatcacaaggtcaggaattcgagaccatcggggccaacatggtgaaaccctgcctctactaaaaatataaaaattagctgggcatggtggcgcacgcctgtagtcccagctaatcgagaggctgaggcaggagaatcccttgaacccaggaggcagaggttacagtgagccaagatggcaccactgcactccagcctgacgtcagagcgagactccgtctcaaaaaaaaagaaacgcatctctttcattacatcttctaagtagttgttgtttgtggaagttaatgttgttaacttcttgatttcagtcttttctctttgctataaatagaatttcacccagtagttttttcagggtttctggatatgcagtcatgcttcttcctgtccagcttttgtggatgttaactcttgtctccctttgtgggtgtatattccagtggatgttaagtagtggtgcagatacactcgaacttaccctaacctgggagtcagggcaaccttccccaagcatgtgatgtttaagctcatgctgttttaatggatgagttggtgytgctgggcrrgaataagcaaagatggtgtttctgccagaatgtcttggaaaaatatgctccttcagaacctacaaatattcttgttttcttttattctcttcttgctataggcctcagcaactgttgccattcccaaagaacaccatcgctttgttattggcaaaaatggagagaaactgcaagacttggagctaaaaactgcaaccaaaatccagatcccacgcccagatgaccccagcaatcagatcaagatcactggcaccaaagagggcatcgagaaagctcgccatgaagtcttactcatctctgccgagcaggtgaggcctgtgtgagtgcctcgtgcccctgcctacctgcttgtgcagacctcactccctcatgggttgccgtgtccagtgtggacttcaaggcataatgtggtgggggtggaggkcttgactccaactctaaaaagccctgtctgtccccagtttgttttcaaaggcctgttctcatcagatcatcccttcctttccaggacaaacgtgctgtggagaggctagaagtagaaaaggcattccaccccttcatcgctgggccgtataatagactggttggcgagatcatgcaggagacaggcacgcgcatcaacatccccccacccagcgtgaaccggacagagattgtcttcactggagagaaggaacagttggctcaggctgtggctcgcatcaagaagatttatgaggagaaggtacacgatttagaggaggcaaatccccatgggcaggaatagaaatgaggatttgggtctggagattcagttaaggcctggttctgccccttatctttttgtccttgatgaagatgcttattgtctctacacttgagtgacccgggtgagatcggtgcccgcccccccttgctgttgagcatctgcctggcagttgtccttgccgtcctgggcctctgactgtgctgacaggctgccagctgggctgccccgggtcagatgcacatcccggacttgttcacgtcttagattaagctgttagctcagcttagtgaactttgaggtctgaaacgtgttccttaattgagggaaaggattgggtgttttgcagtgttcaaggacgaagttatcagccggcgggtgactagactgaggggaaaaatccagtccttgaacagtgaagtttctggggattggctagtcctgatcacttgttgttcacttcttgggatcagcatctatagtctgggccgctttggcttgctttctgcagcagtggccatgcccacctgcccgcttcccacacctttccctttgactgccccttatggtgctcttatttagaaaaagaagactacaaccattgcagtggaagtgaagaaatcccaacacaagtatgtcattgggcccaagggcaattcattgcaggagatccttgagagaactggagtttccgttgagatcccaccctcagacagcatctctgagactgtaatacttcgaggcgaacctgaaaagttaggtcaggcgttgactgaagtctatgccaaggtaactgcctccgagcatgaagtgtgtctcctttgagtggagtccgcggggccttcatggatgagctctcgatttgtaaatcctggggcctggacacagtgcaggtgcccaggtttggggagagcgtgcctctgagccccaggtgagcagcctggctttcactgtgacacgaccttgagctctgcaaacccatggctgttctcccrttttcttaggccaatagcttcaccgtctcctctgtcgccgccccttcctggcttcaccgtttcatcattggcaagaaagggcagaacctggccaaaatcactcagcagatgccaaaggtaaggacacgtttttcacctgttgtattgaatttgtcttgttttctgtctttctgtttctgatattgctttgttgacctttgtactgtggatgcccttgaaaactggtgtatttttctgaattaactggcckgtttgacatggtcaacttccgtgttagcttaaagaacagcagaataaatgtctgtagatgtctgtaccatccttctggcctttaaccagagaggattgtatgttcttaggtttcataagtatcttaagaaacatgtcatttagtaattatggtgaaataacttcatgatactttggcgggccrggtgcggtggctcatgaggtcaggagatcgagaccatcctggctaacatggtgaaaccccgactctactaaaaatacaaaaaattagccgggcttggtggcgggcacctgtggtcccagctgcttgggaggctgaggcaggagaatggcgtgaacccgggaggtggagcttgcagtgagccgagatggcaccactgcattccagccttggcgacagagcgagactctgtctcaaaaaaaaaaaaaaaatactttgaagagcagaacttgtatacaaattgtattaagtgtgaatttaaagcgttctcagtttaccaaaggagattgtagcccccaggaaacatgaacaaaaaagaaataccagagaatccaaccatcatatttaattcctgttttatttaaactttgtttccaattaatgttacagtcctttttaaaaattaawttttttttattttattccttttttttagtgacaaagcctcactctgtcacccaggctggggtgcagtagcgcagtcatagctcactgcagccttgaactcatgggtcaagtgatccgctcgtctcagcttcccaagtagctggcactacaggcgccccaggctagttttcgtggaggcagagtcttactagttgcccaggttgatctcgaactcgtgggatcaagtagtcctcctacctcagcctcccaaaatattgaggttatgggtgtgagtcactgtgcccagccccttttactttgtatagcttcatataaggaccagtctgccttccttaactccttacctggaggataataaaccaggaactctggcagccttgtctatgtcaagcaarttactttaccaccttggtacagctatacgagttttaaaattccatccgtgctctgtctcattctttatgcaactcaagaggaccaggccttgtaaaagttcagatggtggaggagcatgtcgcatgtcgcatgctttatgttagtggcttctgtggggcaaacggtgtccttagtgagaggcaggattattcggccacagtatttagtttcctgactatggctccctaaccctccctttcaactttgtttgatggctgtggatatgtccctccctccctcacatctatgtgaagcagtttgggatcagaagccgctccgaagagagctcccactgggagctcaggggctgcagctgtgccattctgttttagctatctctttggttttggtgtggtaggttcacatcgagttcacagagggcgaagacaagatcaccctggagggccctacagaggatgtcartgtggcccaggaacagatagaaggcatggtcaaagatttggtaaggtaccccttggaatgttgtgtgtgctggtgacaagggaggctctgagttgggcatgggcggtcatctctcgatgacatcccacatgtccgggcacagacacccagggcatcctagctgggtgagtaataggttctgaaacaaccagargctggtcgaagtcctggaataatcgtgggtggaggaaacttcatcttgaagaaggcatctttcaggggagatgcaggggcagtctccaacaattcctgacagctgagtggtcagaaaaggcaaccgtggagactgctgggttttggttcagctcattggccaagtaaccaggcgcatccatggacctctgtgctcctcctgcagattaaccggatggactatgtggagatcaacatcgaccacaagttccacaggcacctcattgggaagagcggtgccaacagtgagtgaggctgtctgttgcggtggggccagtgtgccctgagacccttgtggggggtgtcagctgtgagaactgtgacgtccgtgcagacagtccaggcccattgctgcctgtaatgggagttacagactttacatcctcctgcctgctggaagaggccacttttccttttccctttggtgcagtggttggattagagctgcttggccagtgggtgaattgtcacttttgraaatccatctaagccctccccaaataacccacagaggccatgttgaaggcatgcccaagggcagcattctctatatttccgtcagacctgctaggttagccaatcagtgttggtagtactcatgccttctgaacgtggaaactgctgatctggaactcaytgaagagtaaaaacattctagatttgtgcccaagtaaaacaacatggggagggatacttttttgagacagggtctcactctgtcacccaggctggagtgcagtggcgtgatctcagctcactacaacctctgcctaccgggctcaagcaattctccagcttcagcctcctgagtagctgggactacaggtgcatgccaccacagccaattaatttttgtatttttagaagagacggggtttcaccatgttggccaggcttgtctcaaattcctgggctcaggtgatctgcycaccttggcctcccaaggtgctgggattaaaagtgtgagccaccacacccagcagggggattctgttgaagaggcagtgatatgtcagccaaggtcgctatatgcctcacctgtgccaggttgtaggtgtagcacagttacaggacactgttggaagtatgtcatgtgggccaaggtcgctgtgtgcctcacctgtgccaggttgcaggtgtagcacagttacaggatgctgttagaagtgtgtcgtgggcattctgctgcaggtccaaggatgttttstgttgtttgtttgttttttgggacggagtctcgctctgtcaccaggctggagtgcagtggcgtgatctcagttcactgcaacgtccacctcccaggttcaagcgattctcctgcctcagcctcccaagtagctgggattacaggcgtgcaccaccacacccagctaatttttttgtatttttagtagagatggaatttcaccatgttgtctaggctggtgtcaaactgctgaccttagttgatctgcccacctcggcctcccaaagtgctgggattacaggcatgagccactgtgcccaaccaagaatgtttttttacacctctttgtttaactgtatggctatackcacacactcgcgtgttctgaaaacaagtgcacacgtcgcgtgtgttacctttgggtggaaggtgagaaggcaagcacgtcctccattcctggatagttcagtggatgaaggagcctttcccaggtagtgggacaccgacctgcataacatgactgacgtccgtgtatccgtttttgttatgagtaaacatagccttggcagctgtgctgtggcctgtgcaatggtgagctctctggtgtcagtcttatgttttgtgggcattttacgtgacagcgacgagagtctgtaggcacaaagtgacctttttgcgcactacttgaaccacacatacaccataaacttgcttttacggttttgttttggttttggttaactgtagcgtttgtttaggcctgacacggtggctcttgcctgtaatcccagcattttgggagaccaaggcaggaggatcacttgagcccaggagttcgagatgagcctgggcaacatagtgagacccctgtctctacaaaaaagaaaaatttagccaggcctgtggtccccgctgctctggaggctgaggcaggaatatcacttgagcccaggaagtcaaggctgcagtgagctgtgattgtatcgtgccactgcattttagcctgggtgacagagcaagaccctrtctcaaaacacatatatatggaagtacagtagtgtaaatctaacattaatttctggtttctgcccccgagaaattgcagaatgtagcttagtcagtcatgtctgttctgttttcttctcatgcagttcctaactcttgtcttctttcgtaatctaaaaaaacctgctgcccagctcccatgtcctctgcttctcttgtcttgtgttgctycacctggcacagctgcatgtccatgttcccccctcagtgcatcgcctcgttgctgcctctgcgtgtgcatgtgtttgggatggacscacaaaaagccctcctcrtggtccttccagcaagctgggcttccctttactgcacagtgggcaagattcctgccttgtttcctgatgatacggcttctccagagtttggggggcctggaactcttaacttgggggtactgggttctatccagagaggttgacagcaggagggtttgcaacagcacttgtcttgcagacacagtgaartgctcagtgtgaatctgagccaacagtagatggggtctctgggcagcagcatgggccccacaaggctcttaggcgtcagtgagtgcttttgtgtggagttaatgtgtgtggtttttttaacttgagaatagtagttcccaaacttactgcacattagaaacacctggaatccttcaactattctgaagccctggccaataccccagacgagctaaatcccagactgagtggccccaaccgtcagttatttgaaggtctcggggcatttccagcttctggtccaggctgagagcctgtcctccagaacccttgtgatccaggtgaagatcataactggcccccattctagacaatggagatttttgtttgggaagctaagcatcgtttttggtgatgggaatcacagataaggttatttagcgctttagcgctgtcctgcccagttatgtcattggcagaatgttgttggtctgtgtcctaaatgtgtttccttttgtgttcctaagtaaacagaatcaaagaycagtacaaggtgtccgtgcgcatccctcctgacagtgagaagagcaatttgatccgcatcgagggggacccacagggcgtgcagcaggccaagcgagagctgctggagcttgcatctcgcatggtaagtgccatggctgggccctctrgaaaggcactggccttgcgtctcttggccccctctaaggagtagcgtgttgtggtgtgcggccttagagaatggaagtcgacaaatcccacgttgcactggaaccggattggactccctggggccacatttcctttatcctccccaggtcacctgcacgtcttgttctccatggctgtgtgctgtgctagaagggcacagagactgtgtggcagcgtcttggccttggccacaccctgggtgcccagatgcctgggtaccatctccagagattgtgacagacatttctggattctcaaaggcatcccaggtggttctcatgtaaggccagactcgaggatcactgcaaacctgaagtgggggctgttgctctctaccacctggcagaagcactgcactgctctgggctccccgacgtttcatacatgcttatgccaagctgtgagcacccttgcttctgtgagtcagatacccacacttgaaagtctctgggtgcctttaagtatccagagaagtcaaatactgcgtgagtgcctgcagcagcactttggcctgactgtgtgaggaacaagccccagggttccctgtcattcgcttaggggattctttgttcacctcaccccagtacccacacgaggaatctcaaattggcagacctcttttatagccctgagctgcattccagggcgtgatgcagcctcccactgcttgtggccttcccggagctcattccccagtctcatattccaggttctcctcttagcctggcctccagcccaggtcccttgtcctggctgctttatgcccttcctgattgctgagcccttacttctctgtcagccaatagccgtttgatccagaatctctcagaattcttggaaatgtttggttggctgttggtgttcttccctgaattccagctctgcttattctgtatttcttctgacattttaatggggcctgtggaggagttgagagccatgtgggttcagtgccctgtgttgaacgttcttagccatgcggggaaagtggtccgagccaccctctgttcagaagggatcactcactgctatgcagaatgccaggcctccaagtagaagagctgggcctcccctgtagtacctgttaaaacagaagtgctcactgaattgctttggtgattactgctatcatgatagcacttttggttgaagggtcctacagcgagttccttaattggactttgttcaggaaagtgacgtgcagcccatgttgcggagtgtagcgatgcttggtgagagcactcattatgcgctgtgcacactcttaacagctggttgctcccggggtgctacgaggtgccacctggagaccacctcacctgctccatgaaggactgtgcccagggctccctggtgtccccttgtgtcagtggggagttgctcgccgtgcttgtgataaatgacatctactttaattgtatttttaggaaaatgagcgtaccaaggatctaatcattgagcaaagatttcatcgcacaatcattgggcagaagggtgaacggatccgtgaaattcgtgacaaattcccagaggtaaagtttcccagagacattctgtaactctayaggagtgatccaagtcacacttcaggaatatttgatatttgggatatatgtccttcctcatacttgaacttagtctccccatgatttgttctaggtcatcattaactttccagacccagcacaaaaaagtgacattgtccagctcagaggacctaagaatgaggtggaaaaatgcacaaaatacatgcagaagatggtggcagatctggtaggggtgtttcacatcctttcttgtatgacagcacctggggtgggtggggcatgcgtcctgtcagaagtcctgacccccacaggacccctgctctggggaaagcacataggccctgggctggccttccatctcagggacttgggacaaagtggtgacggcttctcacttaatacctggatgtttagattggcagtcattgttaagactgcagtgtttgtggaattcaggtggggagatttgccttttctcatgcccagttaccttgtttccttgaggagtcttcagatacttagagaaattgtcccatccagtaagataagaggtataacaggtgacatgaggagtcatatactgatttattatttttctcaaaaactgacgtgggaacaggtttagaaagtgtagtgagtagtggatgagaaggccacaggcagccatgtatttccgtgggcttcaccttagctgatggctgccctgggagaggcgatggtgaaggactccagcactgtgagctgctgtcacatcactgccgtgagtgcagaattgcccagagcgtaggggtccgtgctgtctccatrtgtgttctgagccccttccttaaccagctctgatcctggcatgggacatgaactctctcttagccaaaaagtagacttgcatcgattgmctgtaatttgcaacgtaagttagttgttggacaaatgatctatctcacttaccctcatgacaaacctctgaaggtttgtttgcaaataccagtgctctgtcgtgttcatgctacccttaggggtagaagggatactgtattttactctctagcacaggtggtgaatcgggctgtgttttttgtctttaaggtggaaaatagctattcaatttctgttccgatcttcaaacagtttcacaagaatatcattgggaaaggaggcgcaaacattaaaaaggtgataacttgtccgctgcatcttgcttcttcttgccttgtcctctgtagccctgcaccattttggttttagactaggarggactcttccttacttctagccctgtgctcaactgtgtctcaactctgggagagctctagtcagcttctcatggtgatctctctccctgtagattcgtgaagaaagcaacaccaaaatcgaccttccagcagagaatagcaattcagagaccattatcatcacaggcaagcgagccaactgcgaagctgcccggagcaggattctgtctattcagaaagacctggtaatgggagatgttttctaatggagatcctccagtaaaatctctaacagcctctaagattgagcctggggttgagtcacgcagggtcattgggccagcgcaggctgatgtggaagattgcacctttcaatccaggctactgatgagttggtcagcagttttctgcctttgtctctcacgatacttacttacctggaccctgcagcagtaacatttgacgtgggcacttgtcttattagacattttcttcttgttacctgaaaatcttatctgaaggtatttacggtattttctttcctttaaaaaaaattgacatgcagtaaattgtacatatttacagtgtacaatgtaatagttttgacgtgtgtatacatccatggaatcattcccaccatcaccccaaaaatgtcccatgccattttgtattacagtctccctccatcccacttggcagctcctgaaaaccacactccccccacccccacttctatccccaggcaacccccagtctgctttcggccacagtagatgcttttggattgtctacgcttttgtgtgaatggaatcataacatctactctttattgggcccatctgctttcactttgcaggatattttgacatttgtgtgtgttgtcacctgtattgttggtttgttcttttttatttcaggataatattgcactgtagggatagatcatctgtttctttgtgtgtacttggtaattagtgtctttcaaggggttttctattttctccaaggtgtcaaatgtattaacatgaagttttttagaatagtcctgcattatccttttgctgtcaatactgacgtcacctctctttcacagtatatgtaatctgtgccattataaaatgatgccttttccctggtagtatgcttggctccaaagtctatgttatttttttcccccttatatttaaaatttttttggagatgaggtcttgctgtcgtccaggctggagtgcagtggtgcagtcatggctcactacagccttggctttccagactcaagcagtcctcccaccttagccttccaagtagctgggaccacaggygcatgctaccgcaccaggctaatttttttcttcttttagttagtagagatgaggtcttgttatgttgtccaggctggtctcaaactcctcaagtgatcctctcgccttggccttccaaactgctgggattacaggtgtgagccactgcacccagcctcctttatatgatactaaagtgagtttctttttggcagcttgctttttaaattaaatctatctactaatcccagcactttgggaggctcaggtgggcggatcacttgagctcacaagttcaagaccagcctgggcaaaaccccgtcactactaaaactacaaaaagaattagccagtaatggtgctgcatgcttgtagtctcagccactcaggaggttgaggtgagaggatggcttgagcctgggaggtggaggttgcagtgagctgagattgcgctgctgcactccagcctgggccatagagccagaccttgtctcaaaaaaaaaaaaaagaaaaaagattatgatgtttgcatttaattacagttgtgattrtatatgttatatatcacatatttatatttattacatatgtttaacaaacgcggttaaataacttactgtaatttttttcctcaattgtggtaaaatatacatagcagaatgtatcattttaatcgttttttaatggttaattcaactgagtacattcacaaggttgtgcaaccatcaccctgtccattttcagagcatttccatcatcttacacagaaactacacccattaaacagcaactaccaccatccccacgtgctcagccaccatgatgtcatgattttatatgattggctttcagtccaccatttacattattaacctttaaaaaaaattccattattttttaaagagatttaaataatatgaaaaaatgtatgtatttatccacacagttgccatttctagagctcttcatttcttggcgtgatccttgtcttcattttccttctgtctgaaggaaaccactcaacatctctcgtagtgtgtatccggtaatgacttctttcacattctgtatgtctgcaagtatttttttccttcaytttcgaaaagctgtttctgctgcataaaggtttctaggttggcagtttttttcctttccagacttggcttcattgccgtctcctgttgtttctgatgagaaagctgatggtgcccctggctttgttcctctgtccatgacaaaccttctccctctggctgctgttagggttttaccaccgtctctgagcaagttaggatgtgtctctgtgtagttttcttcatgtctcttagcttggtgtttattgagcttcttgaatatatgtgttcagaatttcatcaaatgtggacaatttttggtcactatgagcattttgttgtgttagccccttgctgtctccccgtcagggactctggtgaccagggtatttagttgtcttctacttgtgctctgtttatttgagttgaggggaggagcgatattggttttctccatgagtttctttaaattcattaattctttgcagtgttctaatctgcctcatttcatctaatatcattttcattttagatgttgttttcttccctagaagttcactctgaattagtatcttctgtattttcagttcttaacatgttcagtctttctgcttttggccatagacaatacagttaaatacctgtttttctgtccttggctggctgattctaacactgtcatttctgggtggttttctrttttcttttcctcgttatgggttttccccctattctttgcatttctggtgtttcttaatgagggtgtttttgtattcctctgaatattattttgtgtttgtgaagtcactctgaaacattttgctccttttaggacttgcttttaacgtttattagggaggatcagagcagtatttagttcaggcccaaatatttccactgctgagataagatccttctgagtactccacgtcccagaaagttgaaactgctgaggacggttctggaccaggctccgactgagctgcaggcactgtttcctggtgtctgagctgtaggtactataccaggccccgactgagctgcaggcactgtttcctggtgactgagctgcaggtactgtaccaggccccgactgagctgcaggcactgtttcctggtgtctgagctgcaggtactgtaccaggctccaactgagctaaaagcactgtttcctggtgtctgagctgtaggccactatacccggccctgactgacctaaaggcactgtatgaggcccagctgagctgcaggcactgtttcctgtgatccttctggggattctttcccaggcccagggtgatttcttcacgcgtatcagtatatgagtggctggtctccggatctcagaggttctcgatgccagtctctttgggctctgatctccggatggttctgtttcctcaccttcccgtactgtggcagcaacttggggcagctgtagggctcaccttgtttcctgtctccagggtcttgaaagtcaccattaggcggtaagttcagtccagtccctggtactgcatcttggctgaaagcagaatctttggttttaataggaaaagtttatgtatccataggcatatggagccacctctggcagagccggagcgttgactgaagaaatagagcattatgtgtggtctgaaattaccacgctcccacctcccaatccagcatagattcacgaggactctgggtcctgttgagttaaacacctcccagcgcgcctgctctgctgggcgcaccccactctccccaggacgtgcactctcctcccccgtgcaggtcaaaaatggcttggagaagtttggtcagtgcttgtaagtggcatctccagggctctaggcctgcgtgttcatcaccaccaaagatgatagtttatcttttcctctgccctttttgccacaaaaatgtgacttcctcctcctgccctgtgtttggtttcaggccaacatagccgaggtagaggtctccatccctgccaagctgcacaactccctcattggcaccaagggccgtctgatccgctccatcatggaggagtgcggcggggtccacattcactttcccgtggaaggttcaggaagcgacaccgttgttatcaggggcccttcctcggatgtggagaaggccaagaagcagctcctgcatctggcggaggagaaggtgagcatggggagggagcgtgactcttggcaggaagcctggtcctcagtacagtgttctcgcttctcactgtggaaacccctgaatgcccttcctttgtggcgggtcagaaaacagctctataatgtactgtttatgcgtctttgtttttgctgttactggagggcctttccaggtccaaacgctcacatatgcaatatataaaagttggtctttggcttattagttttggggtgcttttgttttttaaatatgatttacagtaaaattggccattcttcaggtatagttgagttttaagtaacatgcagtcatgtgaccacaatcatcaaaattcattttccatcacccctaaagattgcccatggaattgctgttgtccttgtgtcaaaacccatctgtgggtatgtttccgggctcttctggtgacaccaggtttatgggaagtctggaaatcagtagtgtgagccctcttaactttggctgttctacaccccttgctgatcagcctgtcaatttgtaggaaaaaagcactttcacgttttgattgggattgtgtgaaatttgaagatgagactggcgaggattgacagctcagcagttttgacttttgcaggcatttctccattttttttaggtctgtgattctttattggtgttttataatttttagcacatttttatgttcgacttaacagatctaactactgttactcttttagtgctattgtaaatggcactttttttccatttccagttgttagcacatggaagtgcctgtggtttttgtatgttgaccttcacgaggctgctaaataaagctcatgtatattagcgccagtcactgttttgtggattttttttttttttttttttttttttttttttttgagacggagtcttgctctgtcgcccaggctggagtgtagtggcgcaatctcgcctcactgcaagctccgcctcctgggttcacgccattctcctgcctcagcctcccgagtagctgggaccacaggcgcccgacacctcacccagctaattttttgtatttttagtagagatggggtttcacagtgttagctaggatggtctcgatctcctgacctcgtgatccgcccgcctcggcctcccaaagtgctgggattacaggcgtgagccactgcgcccggcccactgttttgtggatccttattttatatgtcacaatcacgtggtctgtggacagttacatttctctctaatctggagccttgtatttcttgtcttttttgttgttgttattagattgatgtttttgtctttgtgtttaaccagccttgcgtttctggggtaatccctgcttggtttggtaggttgtctttggccatattgctagattgcatttgcctaattgattgcctaatgtttgactaatgctgctatttgtggatgtctttgaaaagtagcagagtctctaggtggtatttggtgaaacctgcacttaaaaggtagcaaagttgttatttaatatttttgtgctagcatgtttttctttggtatttttgcttgcgggccagatcttgggtccggagaaaggcaagagctccccgtgtggacctgagtcccgtggagcagcgcccttctcggggcccctgcgtgggtctgccagaagcactggtgtccacaagcagtgtccggggcctttccaggaccctcgttttcttactgccacacaagggcgtcgcactacacgaggcctctgaggaccggtctctaactgtagccttggttggcttgtgtccctctgagcttgagcttgagcctggggagtggctggttttgtggaggctgatctgtagcactcgtgggaagaaagggagcctggcccagatttgtgtgtgcttggtctggaagcaggtagaagagtgggagcatggtgcacacctcttgggcagcttgcttcctgctctgctgggcacaccccacgctccccaggacgtgcactccgccaacatatcgtccggcgcgttgctcccacctccccctgtgcagatcaaaaatggcttggagaagtttggtcagtgcttgtaagtggcaggaccagggttctaagcctgtgtgttcatcccaccagcatctggttgttgtggaagagaagtaggtgtgcagtctgggtattcatctgtttattcagtgaggtgtgctagccccattttgggggtattggtgcaacatcaggacactggtgacaatgtaaggggagcccgagcttgctgtcctacagaccctcttgtcttcctcactgtggtccaggcacgtggtgtcaggctaacacagtgggattggtttctgcagcaaaccaagagtttcactgttgacatccgcgccaagccagaataccacaaattcctcatcggcaaggggggcggcaaaattcgcaaggtgcgcgacagcactggagcacgtgtcatcttccctgcggctgaggacaaggaccaggacctgatcaccatcattggaaaggaggacgccgtccgagaggcacagaaggagctggaggccttgatccaaaacctggtagggagcgggcctcggcggccgactctgctggggccgtgatggggtggcttatcttccatctcttcttaacactgcaggataatgtggtggaagactccatgctggtggaccccaagcaccaccgccacttcgtcatccgcagaggccaggtcttgcgggagattgctgaagagtatggyggggtgatggtcagcttcccacgctctggcacacagagcgacaaagtcaccctcaagggcgccaaggactgtgtggaggcrgccaagaaacgcattcaggagatcattgaggacctggtaggcacttgggtgctcggggaggggttctcaccccccagtggccactcaccgaagccgtgtatgagtgttcgctccaccctgtagggaggtgactccctcatacagccctggaaggcttcagaaggggctttctggtgctcgctcttctttcctcagcctgtctggcctccttcctgatagttggtgagaattctgcctgcgagaagcacttaaaaaaaaaaagagagagagaaggagaagaggagaggggagagagagagaggaaagaaagcaagagaaagaaagaaaatgcattctgtataagggatcaggaaaaatgaaaatgcagtctaaggggtcagctctcttctcccctctgtgaaggaaagaaaatcgatttgagggcatccacgtgaatccatgggaagtcatgagaagacgtggtctttagaagcagtctttagagagtgtcccctccaggccactcccctgccagggccttggattccctttccctaataatcaagtctgatgcctcctcatggagtcagaggctaccccaggaggtcccactcctttggctgaattggccaccctccagggatggcacctggccttctgggacacatttcagaggaggcccacccccttagacctgtcctgctacctccctcctccctgcgcctggagccctggactcgggagaaggggagcatctgtgccaagtggctgtagaggacagggaggaaggtggtgtgaagagtgctgtaaaacttgccctaaggaatttaatctttgctcttttcttttttctttgtgtacctccctccaggaagctcaggtgacattagaatgtgctataccccagaaattccatcgatctgtcatgggccccaaaggttccagaatccagcagattactcgggatttcagtgttcaaattaaattcccagacagagaggagaacgcaggtgggtcccccattagccctgctctgcttgttaatagtggcgcctcccatgtgagaggcggggctgtcgcacatactggtgaggctctttcctgtctctgctggaaaaccatctatgtattctgggggcttccagaggttcagggtcactccctggcctttaaaagatggaccacgtcagttactgacagagtgaccaggtgaccttcataggtcctagagacacacaaggtagccagtcccaaggcgatgaggagcgtgcagcctcatcctcgggtgtcccgagttcagtcccagtgattctcatgacatcgtttggatcgcatgagccccgtcgtagagcttcctcctccacatctcccatcactgtggggtgtcccctgtgaggsaggcagctgcagcctctggctggccagagggcaccatccaagtggccggcagttctaggagggcattcagttccccgtaccatgcttgcccccagctctgctcatgcacckggtggtggggaggcgacctgtgggatgcgggtcggttgcctctctctcacttgctctgcatttgtgaaacaaaaggtatgccctccactctgtgttatcagatgcccgccctccactctgtgttatcagtcttggttgagctgtttgggcggcaggtggccctgcagcctgctgagtgcacatagtgtcatctctctgggcatccaggaagcatgtcacacacagccattcaagcccctttgttttcctgagaatacagggtgttttgagtaggaaactaataaactcatactgcactcygtctatgttttacacttcagtggttatttaaaactttgattttgatagaatttcacagaatagtataaagacacatcctgtggcaccagtttcttttctcaacttctccccttttacacacgttttttttctgaatgtcatttttagacatgtccctttattcatggtgggtattttcttagaacaaggacattctcttacataattctagcacatttatyggaatcggatttaacattatataacagtagtatctaatatgttgtcggtattcaaatttgccagtttttctccttcagaaacacctacttccccatcctaggatcacccttgatttcaggcaggcgtctgtctggtctcctgctcatttatttacatcacacacctcctgggttctgtcttagtgataattattgttgtgtctgttttgtgacacttattgttgtgstgtctattttggtacacacgcggtgtcccagtgtggcctgtaggagcccctccagctgtcttctgtgtcctgttcacacgcctcttcacttctggggctctcgctttctgrcataaggagctggcacaggtttaccttggccttgccctttctgtctcccctagacctctcaccccccttcccactgcctctcctgggtggggctgcgtgctggccgccttccctgatgagccctgcctcacagtcaagcctcacttgtgcagtgggtctgccctgtgttcctcccatgaactaactcatctgatctcactgaagcctctgctgtagttagttgctgttagcttcatcttcaaggtgaagaagggagacacagagctcacggcctcccggcaaagccttcattgccgccccccccccccccaaggtctgggagccctctttgaggctgctgtggggacgtcctatctgctctccctgaccagaccaagacctcctgaaggacaggagtggttttccctcccttttaccacccagcacccagcaggtgcctcacagacatatgcattctgaacaaggtgtggggtctcttccagcagctgtcagctgtcccttttcccctttctctstagttcacagtacagagccagttgtccaggagaatggggacgaagctggggaggggagagaggctaaagattgtgaccccggctctccaasgaggtgtgacatcatcatcatctctggccggaaagaaaagtgtgaggctgccaaggaagctctggaggtatgtgtccrtgtgcccccctccaccccccgccaaggcccagtcagcaggcacctggggagacgcgtggcctggatkggatggacggttgcccaagcggcagtggcagtggaggtagccctcttgctcctaccgtgtgcgcacgggctgtgcttctcggctggacacagagtttggggaggccacttcccttcaccaaggctcggggttctatagcccctttctgggacagctgcatgggatccggcctctcaggcccacggtgggtgcgggggctgtggaagggtctcagctgcagggggatgaatgtgacctccagttgcaacgtctccccccgcgtgagtggggttatcaggcctagctcaccttgtgtgcagtcagtgtcgagtgccacctgcgtactggatgctgctctcagtgctgcggtgccacagcacacaaaaatagttctcacgttgccgtggagagacaagcagtcaacgcagatatatcctgtggcaagtgatggtaaatgctgtggcaagaaagcaggttctggaggtgaagggcggtgggggagacagggcagggaaggtgagcagcggtctgagagtcccttgtggcacctcgtgggcattagccaaagccgtcctgatcccaagggacagggcagggaaggtgagtagtggtccgagagtcccttgtggcacctcatgggcatcggtcaaagccgtcatgaccccraggatgtgccaggagtcagggcctctcctcctacgtgggcctgaaggggctgctgtaattcaggagggtaggcttgggatgaagggtctggaatttctgtctgccagcattagcctaatgcaaatcttttcctattcttttctattgagttaaaggtcctggtggcattgtcgggtggggcacattgctgttgtcatagggctgtttgccttgtgtttcgtggagccccattgctgagcttacaacgtcactctgctctcagctcccacggcctaaccatgaccatcctccctgcaggcattggttcctgtcaccattgaagtagaggtgccctttgaccttcaccgttacrttattgggcagaaaggaagtgggatccgcaagatgatggatgagtttgaggtagacccctttcccgggaggccatgtcacaggagtggcctgtyrcatcctctcccgagtgccagtgtcctttctcaacttcctgttgactctgcctcctcctgctcggactgggcactgacttcccttcacggcgggtggccttccctctcaccacttctgggtcccagggccaatggactctttcctgttctctggggtcctgaacgtcaagtcagccccctcttcacgtaggtgaacatacatgtcccggcacctgagctgcagtctgacatcatcgccatcacgggcctcgctgcaaatttggaccgggccaaggctggactgctggagcgtgtgaaggagctacaggccgagcaggaggaccgggtgagcaggaggtggccggggcactgcccagagccatggtgctcagctttgggcacatgtcagaatctagggaagttcttcaggatcccagcatcccagcgacatctggctggaggtgagatgcaggcagtgccaggacgcagtcagcatccaggggtcttgmtgtggaactagccaagagcatggcacctttctctttttcataaaaaagtgacaaagttggacttccgtgtaaatttgcagtttctctcaaaaccaaatcagagtggtacctcagacctacaagaaaggtcaaggttgcgagaggcccccaagcatgtgctatgcagtgaggacgagcatcggggacccccactaacctctagcacagggtggtcaaagggcgaatgacttcctggtaagcagggatgaaacccccccaacctctggcaaggctgacgtttgaaggattgtatgagcggagcgctgcagacgcccagcctctggcagggctgacatttggaggattgtgtgagcagagtgctgcagacaggagcaggggttctggaacttggagcagactgtgctggggtgctggtttgctaagggggttggctttccactcctcccgtgagcacgtygagtctggtgaatggggtggagctcgtgaacctyacatggtgtcagtgtacccctgcgtggactctgggttgtctcctgcagccaggtcatacctgtagcctttggccatgggtgttcaggggctgtggctgccccctcttcttggtctgcatctgccccagtcctaaaaagatccagagcatttctgtgcgtatccatcagatccctgtttgacaaatgaggagagcggggccccaagctcgtgactcactgcctagctctgtcagttcctgagcacgatcctcgcaagtggtcccaagccctcttttgaaggatttatagacctccttgtggagcagccaagttccctggttctcattattagcagataatggaaggtggcagaggtcggaccagagagatggcggaccattccggaccacgggttacagaacactgcagcatctccagtgtcctatgaccagggtggaaggggaatggagtcacagggtggatcagctcaatctttgcctcattcttgctcctttcatttgtaggctttaaggagttttaagctgagtgtcactgtagaccccaaataccatcccaagattatcgggagaaagggggcagtaattacccaaatccggttggagcatgacgtgaacatccagtttcctgataaggaygatgggaaccaggtgagagcctcggttggagcgtgtcgggggcagaggtgcttgttgacctttcctgtgacttgggagcagtaaccagatgtgcctagatgggggttcgagggccaagttgagagtggcaagtctctcaggacctaattctggcttgaggtttgggctgtgtctcggtacttgccagatgggtgaggtctctggcactatgtatcatctggggcctggagcattttctcctgcgtctccttccagaaaatgagcaggagctccagctgggtccttgatcagtggcgcctccaggtgtagctcattcacctgtcacccgggcctctctgaggctcccaagggctctcattcacctgtcacctgggcctcttggggtcaggtggacatttctctgcagccccagctgcaaacaccgttgtgcttgccagatggtccttagtaaactcttgttgttacttcctccaaattgcagtgccacccccctgccactggccctcatggcctcctgcttcactcagaacaaaatgaaaggcagccccatcccctctctgggccctgccacctggcatgcagggcagcctcacccaacaccccctcttgcacacacttcccaggcttggtctttcctggctctggcatcctgctggggtgtctgcttcctaggcgtgtccagcacagctttgcccacagtgggagactagcaagccttggtggccacagttgtgctggtttccagaaacagcaraccccctggcagcagagcccctccacgcccctcgctcccactgtggatgtgccgcccagggttttccgctgcttccccttccccttccccttcttcctccccagcttcttgttcccttttggatctttgagtcacacacacaccagccaggccaggagggccctcctgcaccctgcctcctccagctcccacgtcctcttccctccccacatacattttttaatttttagtcttgatcttgagagtttagttcttttttttgagagagatagtctttgtcttgttgccccaggtggagtgcagtggcgcgatctcggctcactgtaacctctgcctcccgggttgaagtgattctcgtgcctcaacctcccaagtagctgggactacagctgtgagccaccgctcccagcccaagagtttagctcttttaagcccctcacccttattgccttttatttccctctactattctatataattatcaatcttaaaagtcattataggtgagtcaccagtggctcacgcctgtaatcccaacacttttggaggccgaggcgggtggatcccctgaggtcaggagttcaaggccaacctgaccaacatggcgaaagcctgtctctactaaaaatatgaaaattagccaggcgtggtcgcgtgcacctgtaatcccagctactcgggagactgagacgtgagaatcgcttgaacgcaggaggcggaggctgcagtgagctgagatcatgccattgcactccagcctgggcgacagagtgagactctgtctttaaaaaaaaaaaaaaaaagtcattgtttagcaattagactattccatctaatacaccatgagccaagtggggtggagcagtcatttcttcacaggcagctttttcctgtgagctgtgcttccgatcttgaggttctgtacctggcagcacgcgggtggtgcctgaggctgtcagctctgctgggccacggtgggtggggctgctgcctcccactctggcattttgcttcaatctggacagaagcttcttgggctgctgctctgttgtctctaggttaggtctttctgctcatttcctttccaggcatttgtccctgtcctctagtcctgttgcgtgatgatggttccgtgttgtgatttgtccctgtcctctagtcctgttgcgtgatggttgtgatttgtccccgtcctctagtcctgttgcatggtggtttttgtgttgtggacatgttgttttcgccgattgtgggctacaggtgttttgttaccacgtttccttctctatgccctgaactgtctgcttggtctgcttgtctgctatcccaagtctggtatggtgtctcctgtccatttgtgtggcccaaggaaggcctgagcaggtgggatctctgagtgagggaggggctcgctgaggaatgccagccagcctccagcctccagcacaaagatgcctccagactgtggcccacgtgggcaaagaagcaggaagctgaggggcttggggctttgtctttgccccgctgtccttgagtccagaattcttgcctgttagtgtctctcctttgtctttgaggacaaatgtcctttttcgttctgtaattcactgtcttttgggtagagtttgggaagagatggaagctgagtggacataggttttttgtggggtgttttttttttgtttttttttttttgagatggagttttgctctgttgcccaggctggagtgcagtggcgcaatctcggctcacagcaacctccgcctcccgggttcaagcaattctcgtgcctcagccccgggagtagctgggattacaggcgtgcaccaccacgcccggctaatattgtatttttagtagaggcggggtttctccatgttggtcaggctggtcacgaattccggacctcaggtgatccgcctgcctcggcctcccaaagtgctgggattacaggcgtgagccaccgtgcccggccctgagtggacattgttaacctcttgttttaaatcagccgtgacgttgctttccatcttctctcctgagctgttttcctcagcagtgggggccggctcttgcccctgacgggaatcccagtaaggcatccccttttctgactacattctccttttttagccccaggaccaaattaccatcacagggtacgaaaagaacacagaagctgccagggatgctatactgagaattgtgggtgaacttgagcagatggtttctgaggacgtcccgctggaccaccgcgttcacgcccgcatcattggtgcccgcggcaaagccattcgcaaaatcatggacgaattcaaggtgagccggctggaagcacagtgggtgagaatcctctctcaccgggggcacctggctggccagaagaaagagcagggcatggccttcccctcaagatgatgaggccacaaccccagggctggcagtggaactgtcctcatggacaccacgggtcagtgcaggcgacggcctgtgtgaggctgcactgccacggtggccattaggagggcatctccttgacagctgcctggcgagctcgtcctctgtgggtgggaatttcatgcaagagcgcacagtacgtgctgcggccctctgtctgctgggaacaaggtgctcctgagatacacctaacttggtgtggtgatgaggctgactgacttcagaacaactctgaaaccagattttaaaacgtttgctaactcagaaaatgcttcactagaaattgacacataattttaacccttttcctcgcttggagtcccctcatctgacgttgtacaccccttccaggtggacattcgcttcccacagagcggagccccagaccccaactgcgtcactgtgacggggctcccagagaatgtggaggaagccatcgaccacatcctcaatctggaggaggaatacgtgagtctctgtgggccttggagccctgaggcgccctggcacgtccaccggcctgaggcccagccaggagcttcaggggacaaggtggcacttgtgtttccagaggcaggcgaggtgcaggggtgagcaggcgggcgggatgctgggggtgctgggcagactgaccctgtcttcctgtcttctgcctgcagctagctgacgtggtggacagtgaggcgctgcaggtatacatgaaacccccagcacacgaagaggccaaggcaccttccagaggctttgtggtgcgggacgcaccctggaccgccagcagcagtgagaaggtcagatgcgggcttctgccctcctgggtcccagggagggtgggcgggcaggcgggcttggtgtcctgagggtggcaactgcgtcggaagctgcttgcgagttggggagcatcccctcctgaagccgtgtcctctctctgcacaggctcctgacatgagcagctctgaggaatttcccagctttggggctcaggtggctcccaagaccctcccttkgggccccaaacgataatgatcaaaaagaacagaaccctctccagcctgctgrcccraacccaacyacacaatggtttgtctcaatctgacccagyggctggaccctcygtaaattgttgacgctcttcccccttcccgaggtcccgcagggagcctagcgcctggctgtgtgtgcggccgctcctccaggcctggccgtgcccgctcaggacctgctccactgtttaacactaaaccaaggtcatgagcattcgtgctaagataacagactccagctcctggtccacccggcatgtcagtcagcactctggccttcatcacgagagctccgcagccgtggctaggattccacttcctgtgtcatgacctcaggaaataaacgtccttgactttataaaagccaaacgtttgccctcttcctttcccacctccctcctgccagtttcccttggtccagacagtcctgtttgtggagtgcaatcagcctcctccagctgccagagcgcctcagcacaggtgtcagggtgcaaggaagacctggcartggacagcaggaggcaggttcctggagctggggggtgacctgagaggcagagggtgacgggttctcaggcagtcctgattttacctgccgtggggtctgaaagcaccaagggtccctgcccctacctccactgccagaccctcagcctgaggtctggtgagtggagcctggaggcaaggtggtaggcaccatctgggtcccctgtggccgtcacagtgtctgctgtgattgagatgcgcacaggttgggggaggtagggccttacgcttgtcctcagtgggggcagtttgccttagatgacagctgggctcttcttcacaccacctgcagcccctccctgcccctgccctagctgctgtgtgttcagttgccttctttctacctcagccggcgtggagtggtctctgtgcagttagtgccaccccacacacccgtctcttgattgagatgtttctggtggttatgggtttcccgtggagctgggggtgggcgccgtgtacctaagctggaggctggcgctctccctcagcacaggtgggtcagtggccagcaggcccatctggagtgggagtgggcacttccaccccgcccacaggccatccggctgtgcaggccagcccctaggagcaggtcccgggtgactggcagttttcayggtctagggccgagacgatggcatggggcctagagcatgaggtagagcagaatgcagaccacgccgctggatgccgagagaccctgctctccgagggaggcatctgtgtcatgctgtgagggctgaggacggggccctagtctctggttttctggtcttaacatccttatctgtgtccgccacggaggtgactgagctgctagygagttgtcctgtcccaggtacttgagttttggaaaagctgactcacgcccatccatctcacagcccttccctggggacagtcgcttccgccttgacacctcactctcagttgaataactcaagcttggtcatcttcagackcgaattcttgagtagacccagacggcttagcccaagtctagttgcagctgcctcggcaagtccccatttgctcaggcagccctgaatgggcctgtttacaggaatggtaaattgggattggaaggaatatagcttccagcttcataggctrgggtgaccacggcttaggaaacagggaaagaaagcaaggcccttttcctgcctttcccgggatctgtctactccacctccacgggggaggccagtggggaagggctgtcacctcttccccatctgcatgagttctggaactctgtcctgttggctgcttgcttccagctccccscaatctccatcgcagcrggttcctcctgtcttttctacagtgtcataaaacatcctgcccctaccctctcccaaaggtcaattttaattctcaccaagttttgcacatctctgtatgtcgcttgatgtcttagacgcgagccctttcctaaactgttcagcgctctcttttcctttgggtggttgttgcaagggtgatgacatgactgtccccaggcctgtctccctgaagcgtctgtgctgtcaggacagccctgggcagagatgaggcaggggtgaggcgtgcgtgtgcttttcctccttgttggatgtcttccatatcatctgtttccatagctacaatccatcccttggccttaactttggaatttggagattatatgcaaacatgtgtaaaggctcatgaatatggatgacactggaattttataaattctaaaataaaacccgaaaccagatgtagcatgctgggactcattttgtcacgctgccgcctgtgtgttctctttctcgtcaccctggagtggtgactggcatctgtgggtagttcgtctttggtgtgattttctcagcagttctcaacactgtgttcaacrgcccctcgggagccacaytgagggagacccaggtgtggtcatggcaagagggtggctgcctgtccctgtcctctggctgccagacagtcagcagttgccctgcagccctcattgagggtggacaaccgtccttgtggagcagcacctgccactcccttttaggactctgccagcctcagtggcattcctggcaccctggacccggcctgtgagttatgacgagctgagttgggtggtggggggtgcgggcggaggcctcggctggaggaggaggagggaggggcgttgagtgggaggagccaccccagtcacctgagtggcaggagataacgggaagagtcaagagggaataggtgttcctgctgctgactgggctggtccccacctgggaagacgggtatggcagttcctcttaaagccaaacatgttggccgggtacggtggctcacgcctgtaatcccagcactttgggaagccgaggtgggcggatcacgaggtcaggagatcaagaccatcctggctaacacggtgaaaccccgtctctattaaaaatgcaaaaaattagctgggtgtggtggcgggcgcctgtagtcccagctactcgggaggctgaggcaggagaatggcgtgaacccgggaggcagagcttgcagtgagccgagatcgtaccactgcactccagcctgggtgacagagcgagactccatctcaaaaaaaaaaaaatgccgaacatgtttatccctgacccagcagttctgttgggccctaaatatgcaacccacagtaaagcacacaactgcaaaatgaccctaagccaaacacgaagcagcccagcagccaggaggggctgagatggatgctcggcatggatggagctcgcgcaatgtcccacggcagacgccaaatgcaaagtccccagttccatctctgcttggtggctaaggtggtggctactctggatgggaaagggtcacaggcagggtagggcgcatgtgggcatcagggccctggatgggagagggtcacagggtagggcgcacgtgggcatcggggagcttccacgtcgggtgatgtggaacttgccttttacccacgtgctggttacaacagtttgttcacctggaagcctgtatgaactgagcattttcgtacgtttcaataaattcaccttaaaactttggagtttaagacagcaacaataaaaagcaaccagctggaaggaagtacacgtgggtttgtagtaagcattgtgctgagcgaaagcacacgtggaatggctgagctccccatctgtgtaaagtttccaaggttcccgccccgggccgtgtgtgctgtccgccatgctccggccggtggtgtccagccccagggcgctgtgagcctgcatccctgccggaagagcccttccatggaggcagggcacagtgctcctaagaggcaggtgaacaagtagcaaatcctcaagaaatgctacaagcaagcacgccgccctcaggccaggcatcacggtgggtgaaatagaacgcaggcgaggatgttcagaaagaggccttttctgtggagtaagtttggcagtactcatcaaagcacattaaaaccacatattctttttgtgtgtgtgtgttcccgagacggagtcttgctctgtcgcccaggctgtagtgcagtgttgagatctcagctcactacaacctccgcctcccgggttcaaacgattctcctgcctcagcctcccaaatagctgggattacagatgcccgccaccacacccagaataatttttgcatttttagtaaagacagggtttcaccatgttggacaggctagtcccgaactcctgaccttgtaatcctcctgcctcagcctcccaaagtcctgggattacaggtgtgagccaccacgctcagctaaaaaccacatattctttttgacacttaagttccacttgtagaactccaaggacatcaatacagatgagcacagatccattttttagcaagcagacggccacactgggattgctgcggggtagcaagttagccaggggaagcttcatgtggctccccagcacagggcagaactgcacgtcacattatgatccagcgtggaaaacaattatgtatgaacacaaacttctgggggaagagccaccagatgttacaggtatacacgtttcctcctctcatcccaaaacctcccccatttgggtgcttgctgggtactaggccccaaggaacagaggtaaaaacagcaagaggggccctgggccaggggccaggagctgggagagggagggaagttgggcaaggatcaaaaggacacatgtaattgctgcagaatgcaagtaaagcggcactgtcagaggctgcctgtagtggctagggggaaagcagagcctgattcaagaaacagaagaatccagaggacccagataactgggaatggagggaggggttcaacagacctttgctgtggcctgggacacagagctgcagggtccgagagctggggcatgtgggtgatgtccctgcgcaaacagggcaggaaggggcgggtgggtccagaggacacgagggagaacggccctgcgctctgaaacattcgaaggtcaccaggtgtaagaggagagggcgatgtggccaggggcggcgaggaccacaaagcccacctgcctgaggagaactgtcgtgtccaggggcctggggaggccaccgagggacagggtcccttgggtgcaggggccccttgggcttatgtctgggagcaggaaacaaagagggccttgtgagctgacggtccctccctgccggggatggagtgacaggcgctctgaggagagaagccggcgctggggggaagcaggcaatgtgcccagagatgaggcacaacagcagccagcggttcacacagccgctgcctgagggaagaggaaaaggacgctgctcgcagggctcaggaggggccactcccctaaggaccaccagatgtccttccaggcgtcactgctgcagctggctggccttgggaaccgtgaagggtgtccagtgggagctgagctggggagagggttgggggcagggacaagtcagactagggccaggagcaggccatggccacgaggcacagtgggcggctgggcagggccctgtgacctcagggagtgcacggggcaggggcctggctgctcccagacttgcctctgagccctcgggctgctcatcctttgttccgttcgttccaaaaagaacctgtccccaaaaaagggcagcaagaggaagagggatgtgactcagtgtccggaggtagagcagccactgacaaggatagggagagggctggggggagggccgagactgggctgtacagttcacctcattctcagccagtgcctgcttagccaggtagtactcccgcttcactttgatctccacagactctgggatgtcaggcaccaggaggtccaggaggcggccaacggagaaaaccacatgctgggagcagaggaaggcactcacgcccacccaaacgcccagagtggccttcacagggccaggcaggccggggctccggcacctgctcccagctgtgggtggagtcagaaagcagctgtgcaggaaaaggaaccccagaaggggcagaggccaccccagctttcgtggccctggggctcctgtggagacacccacaatgtccacaccacaacccagggatgaggccaggcagggaaaacgcaggtgcagagaagagctctgatttgaccaagatgacacagcaggaagtgacggcaccgacccctcaccacgtgctcgaattaggcaaagcacagggtcggggcctcatgccatggatgggagaaccagcaggtgcctcggctacctcaaacacaatgacgaaggccaggcggatggcaagaagattccagtaggtctgggaataatgtccatcgtcatcccggaaagcccgatacctgcagcagacacaggactcagtgcgcgcagccagggctgagtgttggctgggcaggtgcctctggaattagcctatctcccctttttccaccatttcgctctctcatcccatgttcctggcctggctcttcatcgagggtgcctgaaatgggaattcttcccaaacaggatactctgacaatacctttaactggtgggttccaaaggtggatgtgctgggttgtcccccattgggctaaactggaccctccccaccccccaggtggcagatgctttattttctagtagatgtgacagtccagtacgtctgtgcttctacggatgacttcagtctacttacacggtgaaaatccgccgattgctgacctctgtgagatcagcagttcacctgctcagagactgtccctgtccagcagagccctccctccctatcataagctacattcagcttcacttgctatttcagactttgacatcttcctgtgtctctgtcccatggtaaagatgtgacattccattttctaatataaagttacatgttgcactccatgaaaactattaccagggtcaactttgtaggaaaataaaaaaaacaaaaaaccaaatattgcaagttaaaaatatagccattggaaaaaaaatccctcaaatgaatggaataaacttttaagtggccagacacagcagaagagagactggggactgggagacagtgacgacgagaccaccctgcggcaacacagagagcacacttggggggaagcaggccacagcccagtgggagttccagacgacaatggacaagcagagaagcactgctggaaggagtaagatggagacatttccagaactaaacaaagacgtaactctttcagccgggcgcggtggctcatgcctgtaatcccagcactttatttatttatttatttatttatttatttatttatgagacagagtctcgctctgttgcccaggctggagtgcagtggcgtgatcttcgcttactgcaacctccgcctcctgggttcaagcgattctcctgcctcagccttcctgagtagctgggactacaggcccgtgccacaatgcccagctaattttttgtatttttagtcaagacggggtttnnnnnnnnnnnnnnnnnnnnnnnnnnnnnnnnnnnnnnnnnnnnnnnnnnnnnnnnnnnnnnnnnnnnnnnnnnnnnnnnnnnnnnnnnnnnnnnnnnnnnnnnnnnnnnnnnnnnnnnnnnnnnnnnnnnnnnnnnnnnnnnnnnnnnnnnnnnnnnnnnnnnnnnnnnnnnnnnnnnnnnnnnnnnnnnnnnnnnnnnnnnnnnnnnnnnnnnnnnnnnnnnnnnnnnnnnnnnnnnnnnnnnnnnnnnnnnnnnnnnnnnnnnnnnnnnnnnnnnnnnnnnnnnnnnnnnnnnnnnnnnnnnnnnnnnnnnnnnnnnnnnnnnnnnnnnnnnnnnnnnnnnnnnnnnnnnnnnnnnnnnnnnnnnnnnnnnnnnnnnnnnnnnnnnnnnnnnnnnnnnnnnnnnnnnnnnnnnnnnnnnnnnnnnnnnnnnnnnnnnnnnnnnnnnnnnnnnnnnnnnnnnnnnnnnnnnnnnnnnnnnnnnnnnnnnnnnnnnnnnnnnnnnnnnnnnnnnnnnnnnnnnnnnnnnnnnnnnnnnnnnnnnnnnnnnnnnnnnnnnnnnnnnnnnnnnnnnnnnnnnnnnnnnnnnnnnnnnnnnnnnnnnnnnnnnnnnnnnnnnnnnnnnnnnnnnnnnnnnnnnnnnnnnnnnnnnnnnnnnnnnnnnnnnnnnnnnnnnnnnnnnnnnnnnnnnnnnnnnnnnnnnnnnnnnnnnnnnnnnnnnnnnnnnnnnnnnnnnnnnnnnnnnnnnnnnnnnnnnnnnnnnnnnnnnnnnnnnnnnnnnnnnnnnnnnnnnnnnnnnnnnnnnnnnnnnnnnnnnnnnnnnnnnnnnnnnnnnnnnnnnnnnnnnnnnnnnnnnnnnnnnnnnnnnnnnnnnnnnnnnnnnnnnnnnnnnnnnnnnnnnnnnnnnnnnncgtctcattctgttgcccaggctcccccccagtggcgccatctcggctcactgcaacctccgcctcccgagttgaaatgatcctcctgccccagcctccagagcagctgagattacaggcgtgaactgccacagccaggttttgtttgttgttcttgtttttctgagacggagccttgctctgttgcccaggctggagtgcagtggcacaatctcggctcactgaaagctctgcctcctggattcacgccattctcccgcctcagcctcccgagta

SEQ ID NO: 97997 - DNA, 144935 bp, Homo sapiens
  misc_feature (1)...(144935): n = A,T,C or G
cctttttctagctgttgctttccttgattctcttatatcattatcttttgtttcctgcccctatctccctccccttggttgacaaagtgcctacattctctattttttcccatttccttgtctctctctggtgtaattccttctcattcatcttgcaagcagaatttctctatacagcaaaggtcagagctgacaggactgatctgaaatgctgttgaatttcatagttgctcattcaagatcattactgatacatgcaaaagtggaccttctgccaaaatcgacctcagaaaatcagaccaagaggaaaagggcaaaggtaaagaagagactcttgctgggcagcggctgatgcctgtaatcctagcactttgggaggctgaggagggaggattgcttaagcccaggagttcgagaccagcctgggcaacatagccagaacccagtctctacaaataattaaaaaacaatcagctgggtgtggtggcgtgcatccagctgggaccacaggctactcaagaggctgaggcaaggggattgcttgagtccaggaggttgaggctgcagtgagctgtgatcacgccaccacactccggcctgtgtgacagagtgagaccttgtctcgaaaaaattaaaaaaaaaaaaaaaaaaaaaaaaaagaagggactcttaccatttccatttcctcttaatataaatgacattaggcagcattactctgatggcgctgtaaccataggaaggagtagaaaatgacacagccacatagtggtatgatagaatacattacaatttggagtgtgtaaaaaaaaaaccggaagaaaatgctgattttcaattctcttccctcaactaaagaaacaggcgtgaaggaaaatggtgcagttggcattatctcacatggactcctttctaaatgcaagaatgcccttttaggagctgaaatatgaacactgtgagttagaatgcatgggttcaaattcagacttcacaattattatctgactgtccttgaacaatttaatcagtctcctgcacctctgtttcttcatctgagaaatgggaataataatagcatgcacctcaggggtggttaggagcataaaatggggataacacctgtaaagcactaagaaaagtgccttgcatgtagtaaactcttaattgctgcttgctagcattgatatattttttcttttttgagacagtgtcttgctctgttgcccaggctggagtatggcggcaagatcatggctcactgcagcctcgacctcctgggctcaagtgatcctcacctcagcctcctgaatagctaggactataggcacacaccaccatgccctgctaattgttttatttttttggagagacgtggtctcactatgttacccaggctggtctcgaactcctgagctcaagcaatcctctcaccttggccttccaaagtgctgggattattttttattcaccaagtttgaaatctttggtagtgtcctagctgaggaggcatccagggagtttctgggcagaatagttaaccgatactgtgaaaatctgctaacagtggttgttttgctttttgggaagcagcgttccttgtctggctgctgttcccccctggtcacatgggcacactatgattaaatcattcctagtaaatcttggatattcttggatttaataataaattaattactaatgatcacactttggaacatgtttccctgcctgtgacatactaagaaactagaaacgtattcagcatttaccaaaacactcttcctttttttttttaagacagggtctcactctgtggcccaggctggagtgcagtgttgcaattatggccttgatctcccaggctcaaatgatcctcccacctcagcctcccaggtagctgggattacaggcatgcaccaccacacccagctaattttttgtgggttttgtagagatgaggtcctcctatgttgccgaggctggtcttaaactcttgggctcaagtgatccgcccaccttggcctcaccaagtactggcattacaggcgtgagtcaccgcacctggccaaaaccctctcttaatggaacatacatctcacattctggaaatatctattatcccagtgcatatttctttctttctcatgactaacattctgcttttttagttattcacatacataaactgactgataataaatctgggaatttgtcatttaaaaaaatgcacatttcaaacacaatcagtaatcctcaaacagtagagacatgtttacatttctttggttaaagtgtaggaacacagggactagggaatcattttttaaaaagtattttcagacaaatcattttctgagagacttaaaaaaagaaactgtcagtcatttgaggcatacccttttgcttctattccatttttatcataccaatctctcttgcaaaattgatgttattcataaatgttttccttccaaactgtgggaaataagatgtgagtttggccctttgataaagttaggctcagggactgcttatcattgaaacaatgagcacaaaagcgattcagtcctgggacttctcacaaaactcagcgggccaggcggtgctcactcttgttctcaggcattccaggggagtggcagagggacagccagcacgagacattttcaaggttgtttttcccaccctttagaattggtaaatctccgatcgtttagaaaaggatttgttttgcaagaacctaaagtgtccccaagaactatgtttacccataataggccttgctctctgtttaacagagccagatggacactgctatttggctcatggtcatatccccacagatttgacctcatttagaggacactattaaaagattatcctattattgnnnnnnnnnnnnnnnnnnnnnnnnnnnnnnnnnnnnnnnnnnnnnnnnnnnnnnnnnnnnnnnnnnnnnnnnnnnnnnnnnnnnnnnnnnnnnnnnnnnnnnnnnnnnnnnnnnnnnnnnnnnnnnnnnnnnnnnnnnnnnnnnnnnnnnnnnnnnnnnnnnnnnnnnnnnnnnnnnnnnnnnnnnnnnnnnnnnnnnnnnnnnnnnnnnnnnnnnnnnnnnnnnnnnnnnnnnnnnnnnnnatgttgggatgttgggatgttgggatgatgggatgatgggatgttgggatgatgggatgttggaatgttgggatgatgggatgatgggatgttgggataatgggatgttgggatgatgggatgatgggatgtgaggatgttgggatgttgggatgatgggatgatgggatgttgggatgatgggatgtggggatgttgggatgatgggatgatgggatgttgggatgatgggacgatgggatgttgggatattgggatgatgggatgttgggatgatgggatgttgggatgatgggatgttgggatgatgggatgatgggatgttgggataatggaatgttgggatgatgggatgatgggatgtcaggatgttgggatgttgggatgatgggatgatgggatgttgggatgatgggatgttgggatgttgggatgatgggatgtcgggatgttgggatgatgggatgatgggatgttgggataatgggatgttgggatgatgggatgatgggatgtggggatgttgggatgttgggatgatgggatgatgggatgttgggatgatgggatgttgggatgttgggatgatggcatgttgggatgatgggatgatgggaatgggaatggggtcatgagggggacagctccattttcttctttgcatttacaaaatggggaacataaggtttctttcttttccttttcctttttttttccactttggaagccaaatgatgctcataggaaatttaaaactgcactggaaggctgcaagtgatttgagaattaagaccttaagaaacggttttaatagtaacctatctttttgaatgttgctggaaaaggtacttgaaagagcaatgaaggaagcagattctagtcaaaggggactgggaagacactgggacccaacaatttggtaaactagaaaaaattaaactttcagttctgattttacttgaacacactttaaaaacaattggttaaatttttttttataaaataaattacaggtcgggtgcagtggctcacgcctgtaatcccagcattttgggaggccaaggcaggtggatcacctgaggtcaggagttcgagaccaacctggccaacatggtgaaactctgtctccactaaaaatacaaaaattagtcaggcgcggtggtgagtgcctgtaatcccagctactcgggagactgaggcaggagaattgcttgaacccgggaggcgaaggctgcagtgagccaagatcaggccactgcactccagcctgggtaatggagcaagactccgtctcaaaaaaaaaaaaattacaaaagtagtacatgattagtgaaagaaagtcaagcaatacaaatgtgtgtaaaataagaaaggaaaaatctccttcattctttgccagacagggaccaatactgttataatctgtctctctttcataacttttatttatgtatttgagacagggtcttaatcagtcacccaggctggaatacagtggtatgatcatagctcactgtaaccttgaattcactgtaaccttgaactcctatgctcaagacatcctgctgcctcaccctcctgagtagctgaaactacaggtgggcaccatcatacctggctatttttctttttttaagagatgggggtctcactcattgcccaggttggtcccaaactcctggccttacgaatcctcccatctcagcctctaaaagtgctatgattgcagttgtgagccactgtgtctggccctctttcagaactttaaaaacactatatatactataaatgtgtttttggggtggggctaattatgtatgttctgcgatttttttaacttaatgttttatggacttttttctactctttttaaaaaaattctactctttggccgggcatggtggctcatgcctgtaatcccagcactttgggaggcccagatgggcagatcacgaggtcaggagatcgagaccatcctggctaacacggtgaaaccccgtctctactaaaaatataaaaaatagccgggcgtgttggcgggcgcctgtagtcccagctactcgggaggctgaggcaggagaatggcatgaacccgggaggcggagcttgcagtgagccgagatcgcgccactgcactccagcctgggggacagagcgagactccagcctgggggatagagcgagactccctctcaaaaaacaaaacaaacaaaacaaaacaaaacaaaaatttctactctttttgaagtgggtattcgttattttaaataaagtgaaatggaaaattctgtatctgatgtatttaaaaaatattttttggcatgctatacttaccaacatgttttataagttgcttctaaatgataaccgtactagatagtggtccacctaccaggataagataggataggtaagaagctaagagacatgctgcaggtgaaaaagcagatttcataagactatgtttagtataattccaatgatataaaacgtacatatgtatgcacagaaaacagtctatgttatagacaccagagtgctaatggctcttatcccaggatggctggcgtataaatatttttttcccgttatgctttttctgtgttttcaacaatgaacatttattacttttaaaattagttaaaattaatgtaatataaaaatcacaatgtatctgatgaaaaaagtttgtgtctaaaggctacaggaaataaatccatctgagttagcttccactccattccaaaaccccggagtaacagaaagtcgggtcttcttttattttcttatattaatgaattagatttaagttccctcattatgagaagataatctttagcatcactgaaagagttaagaaatgagacaaaaatcagatcatattcctttattacatatatgaaatataaaaacaaattaacaaagcaatatatatatatatttgcaagtccacaggacttcagagaaaaaaaggttctgtatgtgaaattattcatatggcactgtgttcatgttttgtatattcaagtacaaaagaaactatgtatagtggttatgcgtgggtacagaagatgaataataatgaaaaactgtgattttttgactatcacatacattgtgttaaaaaacaggtaaatataatgactattactgttaagaaagacaaggaggaraactgtttcaatgttcaggtttaaatactaagcacaaaaatataacaaattctgtgtctacaataatttttgaagtgtatacaagtgcattgcaaatgagctctttaaaatttaaagtccatttcccctttagccaagcatatgtctacatttatgatttctttctcttattttaaagtctcttctggtttagttttttaaaaagtttcatcatggctgtcatcttggaatctagcctccagctcaaagctgagacttcacgcatacatattctcctttctggttgcatcttcacctagtttctccaagtattcagagttaaatagcacaacttcttttatatgktcacttttgtccacatgtagtggcagtgctgctgcttcagtaggctttctcacacacccttttccttctttcaacagcagtcaccaaacgttcacaacacaagtggtaggtagtaaagtgctttatacaaggaaatactatatacacatggagaggttccatttaacacctacagaccaaagttcatgcgtaacacacaagagaaggctctttaacaaacaccttttctgatagtagggttagggattccttaaaacgtcattcattactttaagtagcatcaaacgtaagtaacatmgctgaagctggaaggcgtccttgttagaggtactgcccttaatggattactgctaaatgtcatgctgctattaaaatattcttaatagttaagaatttcagaatcagtcccatagaaaacagatatcagtgtaggggttttcatttctcttcatgaaataaaactgtatttaaacatgggtccagaagagataarttagataagacccatgcattcaaacatttctatatgttttggcactttaaaaaattccagtttcctgtctgaggtcttcttgctctaaagtttgtgttttgtacatagacaagtgccattatgtgctatccatcttaatgctacttgcactctctttttaaaatatccatgacttttcttccaagagaaggtttccagtgctggacaaagcttttcatattcacaattagtttgcctgttcttatatcctcatgtcctgctacaaggtattccaaacctaaaaaagaacaaaattaggggctatacagtatcatactttgttgaagggagagatgtgactccagcaggttttcttttgcatttattttgagacaaggtcttgctctgttacccaggctggagtgtagtggcataatcctggctcactgcagcctcaatctcctgggtttaggtaatcctccctcctcagcctcccaagtasttggtactacagttgtgygccaccactcccagctaattttttcatattttttgtcgagatggggtttcatcatgttgcccaggctggtctcgagctcctgaactcaagccatctgcccacctcggcctcccaaagtgctgggattacaggtgtgagccaccacgcctgcctgactccagcagtttyatatattcagggttggaataaggagtaagaaacattaatagctgccatttagtaagcatttactatgcttagtgcatgtatgctttacatgtatgatctcatttagctttgaaaataaccctgtgaggtagataattttttccttcttgttttgcaaatgaggaaactgaggctcagcaaggctaagaaacttgttcgatatctttttgtaagtatagcagcatctggactcaaactcaggtcatgctgagtctagaacctttcctttgtactataccatgctctatgacaaaagaactgagggttctaaggacacttatcatactgccctagatcagtacatcttggatactcactgtgtatggtagtgtatattaaggaggttttttttttgtttttgttttgttttgttttgattttggatggaatctcgctctgttgtccaggctggagtacaggggtgccgtcttggctcactgcaacctctgcctcctgggtttaagcaattcttgtgcctcggcttcccaaatagctgggattgcaggcatgcaccaccatgcctggctaatttttgttatttttagtagagacagggttttaccatgttggccaggctggtctcgaactcctgacctcaggtgatcygcctgcctcggcctcccaaagtgctgggattataggcatgagccactgtgcccagcctaaggaggatttttataaaagtgaaacaagcatttgggaaaacatataggaaagaagctatgaatttagaaaataacacatattccctatataaagcctatgtgtttttggaataggatgtttgtttgtcatacattaaaaaaaaaactaaataaatgataaaacttgcctagatcttgtgatgaccttgtattcaaaattcgtttcaagctttagataacaaattttagctaatatatccaagaaatgaaaggacagtctcatcacctatagattagtaaaaagaaatacaataattgcccttagttaatgtttgtaataacgtagattttggtatttaggaacgatttttaaaaattatagggtagataaaataattatgtttataaaataaaaactttccaatataaaatagaggcacacttttaaaaacgaaattaagtgaatgctagatgctaaaattcaactgaaaatatcaatttaatttcacaagttgattcattgctcatttttcactgaaatgactgagaaaaaaatgtcatccaagtagtaatgaacacctgtaacaaccatacaggcttcttggaaaacggcttattccaggttcagggcaggaagttgagcatgggacatcttattgtattaaaaaacaagaaagctttcaaagatgaatgtgtgtctttttaaaaggacacagcagctagcaggaaggggttataacttgtcaaagttgtggtaagttgagcaccaagaaacataataattgtgtttatgaaaacacattaaatccatagaaatccataattccaaaatgacactaaaaaatgagaaagccagagaaaaattaacttgtcatctttagaggtagctgttaaaaccatttcttactttgaaaattagaaattacagggaaggaatgtagcatttatcctgtctttacagtaagaactgtatttcatgataacctagttgcccagcttgggagagaaagccctcttacggaagaatgccagctaataagagaagagaattcaaaagaattagaaaaacatcatttctcagactctaatgaaattattgattcaggaaaggattatcagttggcgataaagtcattaaatgaatgattaatggaaagctggatgcttgtagaatgctacataatatcacactcactcttttctatctctaaaggtaaaacaaaactttggcaatggagagatcagactgccttcattgtaatccaaaggtcaagcttagagacactgatgggaggttatccaggtaccatgtgcatttgacatgattcaacatgaagcacaccatgatctctataatggactctagccaaaatgtttgtcttgaatcaatcaagcctttctttagagattacagaagatagaagagatagaggaataagctaaacaccaccataaatgaaccaaccacacaaatgttgatggtcagataatggatagggcatctgacctggtttcctcaacaagtcataaaaaaggaactgtgctagaataaaaaagagttgaaggactgaaaaactagatataacgtgtgatcctggattgaatactggcaaggacacatcagctgtagaggacattttgggatcagttgggaaatagaaatatgacctgagtattagataacatgaaaatcaactgaaattgaaggtaaagcttattaacagaataatgcaggttacagaatggagcatatactatgatatcgttttggttaaaaaatataatacatacacacagaggaagattggaaaggatttgcctaagctattaacagagatgatctctgggggatagaaatgtgaaatttaaaaatttcccctaaacatctcccctcccctccccttccctcccctctccttctgttcttcctttttctttcttttttttttttttttgacagggtctcactctgtcacccaggctgacgtgcagtggcaccatctgaactctgtagcctccacctccctaggctcaggtaatcctcccacctctgccttctgagtagctgggacaacaggctcatgccactaaacctggctaatttttgtattttctgttagagatggggtttcaccatgttgcccaggctgccctcgaactcctaggctcaagcaatccacccacctcaacctcccaaagtgctgggattacaggtgtgaaccactgcaccctgctaaaagattattaaaagaaactcatcctaaacttcaaaaaagctattatggtgttttcagaaaaagagaaaaaggaaaataatgacacagagaggtttcaaacactggagagtacaatgtaaaatgaatgaaaaggcatttaaattataaaaggcaaccttaacttctgcatgaaaaagaatctcaatatttaattaacagactagttaaaaatataatagccttaaattgtttgtataatgtctaaaataataaactcctcatttaaaaatacaataatcaatttttaagaaacttcaaggttagggctggatgcagtggctctcgcctgtaatcccagtgctttgggaggccgaggtgggaggactgcttgaggccaggagtttgagaccagtttgagaccatagcaagaccctgtctacaaaaacacaaacaaacaaaaattagctgggtttggtggcatgtctatagtcctagctactcaagaggctgaggcgggaggattgcttgagcctgggaggtcgaggctgcagtgagcagtgatagtaccaccactctagcctgggcaacagagcagagaaccctgtctttaaaaaaagaaaaaaaaagaaagaaatcaatctcagggttaagtctagtatttttacatgaatttactttgaaactacaaatagaataaacaggaatttaccattaaagtataaatataagttaaattgataaaaacaatactgaataaaaccataaattatgaagcagcatcacaccaaaaacaaatatgcaaaacaatgttcttttatacctcttattagcatttrtattttattttcctatctctagggttttgacatctactttgctacacgtctgagaacacgragtttattttgtatccatagaaaaagaaratacaatactttagtgctagttttggtgttctaaaatatatgactgatgaatgagtaaatgtatgcatgaattaagaatgaatgaatatgcagggatacccaataggattgtttcttttccaaagtagccaaggaagcaggttggcgtgtaaggtttcagttttcttatcagcyttctttggccttggctgttgaacttgtaaaaatggaaaaacaaagtaaaatgaaagagtgtctggttttgctttggcaagttccagtcttttcttcaaagcaagtaaacatgttttcaagaattctttaaataattgcgcttatgttttcaattgtgatgaactcagttgattctttgacttggcttggcagaaacctgattaggaagtatagttcacttcctggagggtggctcacatggtcaaagcttttgtttttaatgtctcactaaactgggcagactttttttttcttttgccaagacagtaggaaagctcttataagagatgcctctaagcacaaatcactgggaaatagaacttacatgaattatttttagtgtcctgtattcaaagctcaggattcttattacttcaatttgttctttggaattttatttatgtatttttaatttcttttgagatagggtcttgctctgtttgcccaggctggagtgcagtggctcaatcatggctcactgcagttttgacctcccyggctcaagtgatcctcctacctcagccttccaagtagttgggactacaggaatttgccaccacacccagctaattatttaaaaaattttttgtggatactgggtctcactatgttgtccaaactggtcttgaactcctgggctcaagctatcctcccaccttggcctcctaaagtactgagattacaggcgtgaaccaccatgcccagtctatttatttatttatataatttaaaacattatttttcacagtttccttattaaaatctaaattaatttaaatatattattgaaagggtagaaaaggatgtgagagattggtcaacacttggccaaaatcaaaagttctgtatcaatgttgagtttgtttagactgaggggatattttattgttagtttatgctctctttctctttctctctcagttatctgcttctctcaaatttattaatcaaagaccgcaaaagactttgtttttttgagatggagtcttgctctgtcacccaggctggagtacagtggtgcgatctcagctcactgcaacctctgcctcctgggttcaagtgattctcctgcctcagcctcctgggtagctgggactacaggcacataccaccatactgggctaatttttgtatttttagtagagatggggtttcactgtgttggccaggttgggcacaaaagacttcttattaatgtaacaatgagtttatatggggaaggaataaactcatataaacaatgagtttatatggggaagaacataaataatgcacctgtttcatcagtgcygctaagacacagatgacaatcacacaagcagggagatgcagaggattttttgaattatgatttgttttattagaacctgctaagtattatgttaccattatctgggtactaatggtaggtattgaagatactatgatcaaaagcctaaatcccatcctcaaatttgatgagggagacagagaaataagcagcttataacccaggataaccatgcgcttggggcaagaacccctgtgcttatttatttgtcttcacttctgctataacatttaaaggtgcaaatcaaatttctctccatttcaagttgctctaaaatcctacagtttttgttttgtttatttctgctgtttctaatttgaaaccagaaatatcatttcatgaaaaacaagatgatgagaacttgagarctgttttctctccaagagaaacagatgcttttcaagcaatagtcgaaatgaattcaatattatttccacagatggaattttgcatttgaacttcctttgggaacaggttctactgtaataggacctagctttcagataaagagtaagtggcagataaattcatgaaagtgctttctatgcaactggcacctggaaccaatctgagcctcctcttttaggatagagagtattatatttctggattttaaaatattaaacttttatagagcacatggaagagaaataatttttcgatgttagttcaaagaattccatttggattttccgcaggagtcagatggtgaaagggagagatgttcttgctgagtttgtttatgttgtgcttcagaggatgtaagacaagcagcaaatcagcagagacaaggtaggtactaagataggaaagtctaatactcaccaggattgaggattggacaagtgcatcctctgtccgtccatgattctggatataatgttcgctttcctcggaaaatcttcagtttggtagattttaagacctttttaatcttcacattgacctcaacatgagtacctttatcatgagctgataaaatctttatttttagcactgttaacacagaagtcaaaatgcatagaatttcatattatcatttgaagtttgaataacactcaagtatgcatttcagaatataatggaaaggtgaattgatgatgaggatgtgaaaatttgctttaaaaatcattaggcattaacttggatggagttagaagccattattctaaggaaagtaactcaggaatggaaaaccaaacctcattatattctcatttgtaagtgggagctaagctatgaggatgcaaagacctaagaatgatataatatactttggggactcagggggaagagaggggataagggataaaagactatatattgggtacagtgtacactgcttggatgatgggtgtactaaaatctcagaaatcaccactaaagaactcatccatgtaaccaaaaaccacctgttcccccaaaactattgaaataaaataaaataaaaatactgaattaaaaaaatcataggctcattcagttttgcactggctttatctcgtttatctatattaactatattcttatttgttaggcaatttcaaatgtgactccctccaatatcattatcctaagagaatatcaaccatttgcctattgcaattataatcttaaatacattcagctaccacatctaaacagagagaggaaacataggaagtagaattatcctggcttttatttaggttctgactatattattcttttgtggctgattgtgtttaatgttatgatagagagaaaaatgctactcctagaatatattttgcatattccaaagagattatataatatgattgactacttaatattcttctcctggaataaaatgcaagctgactggagttagggaagctgtcccttaatgggtgtccaacctcttgacttccctgggccacactggaccacacataaagtacactaacactaatgatagctgatgaactgaaacaaaaatctgtgcataatttttgtgatatccgccaccacagataaaccaaaaagtcttcacattcaaagggctggacacccatgcatgatgatggagctccagtattctgtatgacttatgattctattacgccctcccattgatgaaattgatatggctggggattaagtaatggaataatttggggtcggaaagaaagtaaagctaaggatcactgagctactcaggaacactagggaacgtagggaagttctttttttttttttttgagatggagtcttgctctgtcatccaggctggagtacaatggtgcgatcttggctcactgcaacctccgcctccgaggttcaagcaattcttcctgcctcagcctcccgagtagctgggattacaggccaccacgcccggctaattttcatatatatatattttttcacagggaagttcttatcggcttatccacatctccatggaagagtgtgtgtaatgagagcactctatcttggctggtctcatactctgcgaatacagcgtcagacagctatctttatggagtcatcacattttagacttctaaggggtcttaaaagctcatgtattttatacacgaggaagcaagttttaagaaattaaggccaggtgcagggactcatgcctgtaatcccagcactttgggaggctgaggtaggcggatcacctgaggtcaggactttgagaccagcctggccaacatacagtgaaatcctgtctctactaaaaaatacaaaaaatttagctgggtgtggtggtgcatgcttgtagtcccagctacttgggaagctgagccaggagaaatgcttgaaactgggaggcagaggttgcagtgagtccagatcacgccactgcactccagcctgggcgacagagcaaaactccatctctcaaaaataaataaataaataaataaataaataaataaaacaaataaataaagtgaacctttcaagttcacataactggttggctagaggtagagtttgggctagaaccctgatgagataaatgcatgaaggacagggagcatagtgcccggcgtgtggctaacgctcagtaaatgttcgctattattattccactagacttgtaagctaaaagagagcagggaccttgtctgtcacttctattgctcaatagatatttgctaaaggagtaagcaagtaagtcaagtgtttttttttttttttttctattaagccagggaatggggaggaggaaaccaattttttccaagtcttagcagtattgcacttaataagaccaagatgtttcattacattaagagcgttcaaattcttcttaagtagaaaattaatgcagttgtattaaaagattggttatttgtaaattcagagagctaccaagttgatgtgataaggaaaaccagttgatattttcactgaatgaactgactttgaactaaattatcatattctttgctcttaatagtcaatgccattccctctaaactgcctttcctttattgagcgctgtacatttcaagttttcttctattgtttagccaagttagaaagtagagagggaagtgtacatataattttagataagattcatgaggtttttaccacttatttactttttaaaatcttgtatgagattagagacaatgttatccagaacctaaatacttggtttcataaatgatgacttaaaattttctcctcattgtagtgtatatttcaggccatatatattatagaccaataaaaagtctcaggctgggtgtggtggctcacgcctgtcatcccagcactttgggaggccgaggcaggcagatcatttgaggtcagaagtccaaaaccagcctggccaacatggtgaaaccccatctctgctaaaaatacaaaaattaggtcaggcgtggtggctcacgcctataatcccagcactttgggaggccgaggcaggcggatcacgaggtcaggagttcgagaccagcctgaccaacaygggataaccctgtctctactaaaaatacaaaaattagccgggcatggtggcacatgcctgtagtcccagctacctgggaggctgaggcaggagaattgcttgaacctgggaggtggaggttgtgggcgtggtggcatatgcctgtaatcccagctattcaggtgrttgaggtatgagaatcgcttgaacccagaaggtggaggttgcagtgagtctagattgtgccactgcactctaggctgggcaacaaagcragactctgtctaaaaaaaaaaaaaaaagtctcagacactaggcaagaatgtgttggcaagatatgatatcttaatatatttaatagtaaatataaagccatttgaagatagtaacagtctttacttaggcagtgccatttccctttttgtacaggatgtattttcctgttatttgaaagataggggtatctagagtatacagagagggtggggaagagacccaggtggacagctggtctcagtgcctcacaagtaagacatcatctccctccccctaccatttaccgagcatcamatatgtgctagataatgtgctgcatgcttttcaaacatctcattccacgaggaaggtggcatgatccctattttacagatgaggaaacaaatttggagaggttaagtctcccacccaataagccagaaatcaaactcacataggtctgagtccaaagcctgtgctctcaactataatgaaatgctgccttaaactgatttctactcagtattactgtacgacaaacgaacacaagagtcactgaagtggctagaaatgtcccttttggatgaataaggcaagaagtatccacgagaaaggatttcatgtcatgatttcttctctctgctctctgcctctttttcttatggtataataactctacctttgctctacaagcattctgtcctccctgggacatccatcaccaactacatcaggaaaatctagctcaagaccagaacactgtgtttagtgttattatgtaagactaatgctttgtgctttcatttatacacaatgtcatcagtcaggcctcccattttcttaaaaattytctgaacttagtgtgaataggttctcagaagcattcaaggatttcagactcaccatatgaatatttcattccacagaatgccttggcatttcctaatgtctgttccttacattcgcatttacctatggaaagtaaattaaaaatggtgttagttattagaaaagcaaagaaagaaaaaataagagatcagcaagtgtawccagataacacatcccttaagccttgagtgatgcatacagtgtaatctgtaagtaccaaggaaccacgaaagtcattcaaaagaagtagagtctctttctaaattagttatcttccaataaagtattcatccaagagaaatacagaaggtagaaacagtgatgtatttcaatgcttgtaattgatgttgtgataaatacagtctagtattaatattccatgctaacaggaaggaaaaactgaatggaaaacaattgtctttctgcagttaatgttcaccaccacaaaagtgaaattaaataaactgattgggcagtcccttgaaggtaatgtcgttcaatttttttgttgttatccatttaaaaagtatttattgagcacttttggtatgcaaggcatggtgcttcgcacttcagcaccataaagataagcaagatacaattcttgccttaaggcttgcaattcagtaaggtgaagaaaccaagtgtacaaaaagtgataaagtgataagtggtctsggagaggtacaatatacttgggtggaagagtcacatgtgtctgggaagatgggaaaaaacttcttggatcaagaaggatttaaaaggatcccaatagtttaaattatatattgccactattacatgtgagagatttgccaggccctatggaagactttcaaaatgcctttgtgcatagtttattttatgtatgdatgtatgtatgtatgtatgtatgtatgtatgtatatatttatttatttatttatctatcgagatggagtctcattctgtcactcaagctggagtgcagtggcgtgatctcagctcattgcaacctctgtctcccgggttcaagcaattctcctgtctcagcttcctgagtagctgggactacaggtgcacaccaccacgcctggctaatttttatatttttagtagagacggagtttcaccatattggtcaagctggtcttgaactcctgacctcagatgatccactagcctcggcctcccaaagtgctgggattacaggtgtgagccactgcgcccagcctgtacatagtttatatgtagcaggggaccccaaacccctggccgtggactggtactggtttgtggcctgttaggaaccgggtcacacagcagraggtgagcagcttgagagagagctgattttcatctgaatttacagccacttcccatcactcaaattaccgcctgagctccgcctcctgttagatgagcagcggcattagatgctcataaaagtgcccaccctactgtgaactgtgcatgtgagggctctaggttgtgctctccttatgagaatctaatgcctgatggtctgaggtggaacagcttcatcctgaaaccatcccctgcccctgccatccatggaaaaattgtcttccatgaaaccrctccctggtgcccaaaaggttggggaccacagatatatagcattctcatactcatttatatattcgtttcctctctagactgtgtcccttcaagacaatggctatatcttatcaaccttacatttctggagcccagcatggataggatttgcactcactgatttaacaattagatatactttttcccctttcctgccccctcctgccctcatgcactgcatttcataggcattgagtggtcataacagcagctagtgcttactgaggagcacttactgtataccaggccgttttaagcattttacattaatttactcatttaatattctcataggtagaaatctgggaagattatagagataaaagagtgagcagccaggtgtggtgactcatgcttgtaatcccagcactttgggaggtcgatatgggtggactgcttgagcccaggagtctaagaccaggctaggtaacgtagtaagacattgtctctacaaaaaagattaaaaattgtcgagcacgcaggcgcaatggtcgggttgcggggggcgggcggggggagggaggggaggcgggggcagggggcgggctgtgattctagaatctgaaccccagctggcactgcctcccaagcccgccgccatggccgcctacaaactggtgctgatccagcatggagagtgcatggaacctggagatccacttcagcagctggtacgactcygacctgagcccggcaggccaccaggaggtgaagcgcaggcgggcaggcgctgctagatgttggctatgagtttgacatctgcttcacctcagtgcagaagagagcgacccggaccctctggacagtgctagatgccattgatcagatgtggcccacctgtaatgaggacttggcgcctcaatgagcggcactatgggggtctgaccgatctcggtaaagcagaaactgctgcaaagcatggtgaggcccaggtgaagatctggaggtgctcctatgatgtcccaccaccctgctggagcctgaccatcctttctacagcaacatcagtaaggatcgtaggtatgcagacctcacagatgatcagctatcctcctgtgagagtctgaagracactattgccagckctctgcccttttggaataaagaaatagttccccagatcaaggaagggaaatgggtactgattgcagcccatggcaacagcctccggggcattgtcaagcatctggaaggtctctctgaagaggctatcatggagctgaacctgctgactggtattcccattgtctgtaaattggacaagagctcgaagcccatcaggtgcatggagttcctgggggatgaagggaccctgtgtaaagccatggaagctgtggctgcccagggcaaggccaagaagtgaaggccggcgggcggactactgtccccaggagcaccctccttgcctggtgtgtccctctgctcatccctcctgcacacgccacactgaccacatctgtaggcatcttgagctgtagctgcagatgaggaccagtggctcccattttcgttttagccatttttgtctcctgcacccactcccttcattcattctagtcagaatagcacttctagggcatgggttctcagtccaagctgtggaaaagctccccttgtccaagagagtttaaaggtagtgacttgggtttttgcgaccgctttgtttactaagaacttgtkggggaggaaccatgctaagccatgaccaatgaggagaagcaagagagcctgtctgtccccaagagccagtcctctgctcttctgtagtcaggccactgcctgggagctctagtcattccagtggaagatgaatgtaactcgcatggtgatgtgacagctgtttcctccctgaccccagaggagatggctctagaaggttgggatcaatcctgaatttagcttaggtgttacatttacttttataaaaaaaaaaagtatagtatatataaataatacaaaaccataatccttctcggatctcttgtggcagttgaaatagtcccacatgtggtcatcagaaagtaagccattcctcatactaatatgggataagctccttgacctcagaggagtaggagtgcttcctgctgtgtgttttagaatccctctgctgccttgtttcatggcagtaaaatgcctcttggtcctgtccaagtgtgtctttcactgactgatttctgaatcatgttctagttgctcggccacatgggtccagtgctcatttgagcatcacwgtactaaatcctttctccaggaatgagtataataaaggagttatgtgcaattaaaaaaattggcctggtgtggtagtatgtgcctgtagtcccagctacccgtggaggggagcattggtggcactgaggtgggaggattgcttgagcccaggaggtcaaggctgcagtaagccatgatggcaccactgcactccagcctggacaacaaagtgagactctgccaaaaaaaaaaagaaaagaaattgtagtaacctaagtgaatagcctatggcctttgataattccacaaagcagaagagtacagtaactactgtgctataaaacctaatggaactccaaatggcatatactgttcctcaacacaatgcttttctctttaacccttcagcctagaagagcagacataggtctattgtttgatgacctttctttggctgctttccaatacttctttttcatatgcttagagctcaaacaatatttgttgatcaggcttcagcccagatgtgttttcttaaaagaaatctggaagggaagaaaagcttgtttagttatgctaggttattaggacattaaaaaaaaaaagagcattgtttacagttctgtggtactagttaaggccagttttgttatttaggaagtgaaattttacatctggtataagaagtggtagaaattaagggtgttttgttggtaaagtatattatactcctagttgaaagctgtttttatggaaacttrtgggaggtatataggtaggtagattgttttcagtgcttagaacacttgttgaaaaaggtgctcagaagcaccattctatacccaatgcagggaactcaataaagtcttcctcaatctggcgttcatccagatgaatttcagagactctctggggacatcacagacctaacagctgctgtggacatgagagtctgcagtcattctggtgccagcactttatgtgcttggctggaatgctgccaactctctaataacatgcatgatgggcttagtgaatgtcctatagtcctaaaaactggattattacagatttggtttagcaaacttggagaattataaaaagtcattgtgtgcttagaaaaatagaagaacacctttaaaagtggctattaaagttaaaatcataaaattccagactacatagcattaaggcaaaaaaaattcatagtaaagacttgttttctttttcaaatgctgaaaagataaatatgataacttcatgttgccttctctttcgcaccttctttcctgttgtgattgaacatgaagccattaggaaaattatcacgagattatgttaagtgaaaaaaccatgatacagatgggcaaataaccttgtttctcagatttaggttcttgattcttgaagggtccatatgttctctatgagaaggttttaaaactgtgatttctttctgatctaaaatgtggattgatgggtggatagaatttaggtggcgggtatgtgaatgcacaacttctaaaacttttctggatgtctgaaatttttcataataaaakgttgggaaaattatcacagacattctcaatcaacacaactttgtgaattcatacttcagcacatcctcagctccaagcacatagcaatattagataaaggacggaaaaaaagacatagcctgcatcaaaaactagatatttatctctgtggactagaaatgaatgttttcaatttgttgatacttcttgaatttaaaaaaaatgtaaagaaagaaaagaaatgaatgaatgtgcattcgggggatagggctttggggtcygctttcagaatcaggcagcagtggtcaggagttcagatacaaaggagttaataggacaaaaaagagatcacagtcagactcactttttaaagacagattgggtaaggctctccttgctaatgaaaggaggctgggaaaaaacaataaaccaaccacgtacacaaaactccaaactattattcatggccacttgatgacattcttaaaaagggctctgcatttcatccagcatctagtcctgcaaattatgtagctagtccttaagtgacctagaaatgaatccaagttgccctcctggttttcaaagaatagatataatacaatgaaattagattagagataatcagtaaacaaatattcttttttgtttttttgtttttgagatggagtctccctctgtcacccaggctggagtgcagtagcctgatctcactttactgcaacctctgccttccaggttcaagtgattctcctgccttagcctcccaagtagctgggatcacaggtacgcgccaccacacccagctaatttttttgtatttttaagtagagacggggttttgtcatgttggccaggctggtctccaactcctgacctcaggtgatccacccacttcggcctcccaaagtgctgggattgcaggtgtgagccactgtgcccagccccgggtaaaaaaaaaaaatattctaaaaaccctgatgtttgaacaattaaatatcctagacaactcaatggattaaagcgaaattcttaatggaaattagaaaaacattagaacttgaatgataatgaagatactacatataaaggccaataggatccagctaaaagatcttataaggaaatgtataaccttaagagtacttgctaaaaataagaaagactaaaagtaagtgagttaataatcactggactcacaaaggcagaaaaggactaaaaaagcaaacttagagaaaacataaaaaaaaaataaagataagagcagaattagtgaaataaagaaaaattaaataggttggatcaagttaaccaaaagttaatctctgagagaagcaaattaagatcagtataagacaataagaaaaaaggcacagataagcttagggacaaaaagaagattaaggacagattgagtaaaggttaaataaattatgagtgaataccatgtataactctatgccaatacaattttttaaaattaaaataattggtggctgggcaaggtggctcacgcctgtaatcccagcacttcgggaggctgaggtgggtggatcttaaggtcaggagatctagaccatcttggctgacactgtgaaaccccatctctactaaaaatacaaaaaattagctgggcatggtggcatgcgcctgtagtcccagctacttgggaggctgagaattgcttgaacccgggaggcagaggttgcagtgagccgagattgcaccactgcactccagcctgggtgacagagtgagactccaactcaaaaaaaaaaagaatcggtaattttctagaaaactttgattaccaacaccaaatcacaaataaaacaaattaataaccatgacagatattgaatcagtaatactttcgtctactcatagacactgtgtctcaatggttttatagataaattctaacaaaaattcaagtaacagatgattctatttttatataaataattgcagagaatagaaaaaaaacgtagtgggtaaggggacctcctaactttctcaaatatacaatgcaatacattaaattataggccaatatcagttataaacatcaatatgaaaatccyaagcaagcaaataaataaatgaaagataaaaaccctagcagatcaaattcagcaacgtatgaataaaaatacatcacagcaaataaaacttatcctaagactaaaagaatagcttgataataattgccattctgacaaacaacagatgctggcaaggctgtagagaaataggaatgcatttacactgttggcaggagtgtaaactagttcaaccattgtggaagacagtgtggtgattcctcaagggtctagaaccagaaatatcatttggcccagcaatcccattactgggtatacacccaaaggattctaaatcattctactataaagacacctgcacacgtatgtttattgcagcactatttacaatagcaaagacttggagccaacccaaatgaccatcaatgatagactggataaagaaaatgtgacacatatacaccatggaatactacgcagccataaaaaaggatgagttcatgtcctttgcagggacgtggatgaagctggaagccatcattctcagcaaactaacacaggaacagaaaaccaaacaccatatattctcacttataagtgggagttgaacaatgagaacacatggacacaggtaggggaacaacacacactggggcctattaggggtgtggggggcgaggggagggagagcattaggacaaatacctaatgcgtgcrgggcttaaaacctagatgaggggttgataggtgcagcaaaccactatggcacatgtatacctatgtaacaaacctgcacactctgcacatgtatcctagaacttaaagtaaaaaaaaaaaaaaaaaaagaatagtttgataccggaaaaaaattattttcaaataccacattgatagattacaggaggaaaaccatctgattttctcaaaagatgcagagaaggcattcagctaaaagcaaaactcattaacgataaaattagaaatagaagagaatgacatttacttgataaaggctacctatcaaaaatcgatatcaagttttatagtggtgaaaatttcaaactatttccatcaaatttgggaaaacattgtactgcagtaaaaaaaaatgatgcakgagaactacacaagtgagacaaaactgtccttatttgtcaataatatgatggcctacattagaaaatccaagataatccatacatactggaatcagtaawcaagttcagcaaagtcgctggatacaagctcaaaatacaaaaaaaaagtgacacatatacatttatatcctttatatcaataatcatttaaaaatacaaaaaaagtgacacatatacaccatggaatactatgcagccataaaaaatgatttttaagaatcattttaaaaattcaggtaaagaacactttcccaatagcaataaaatctaaaggtatctaggagtaaatttaatgaaagacaggtaaaaccattttggagaaaagtgacaaatgctattgaaaggccttaaagagsaccttaatatatagaaaggtatcttcatgtttgggactactcaatattacaaagctatcacttttttcaaaatgatccataaagtcaatgcaattgcaataaaaatcccaacagagccttttgtgggatttaataaacttaatctaaaattcacacgaaaggcaaagaaccgatagctaagataattttaagaaagaacaatgaaatgaagggacttgccatctcagatatcaggactcattataaaactgtaataatatattgtggtattggctcatgaaacatgatagacaagacacagatccattcatgtatagaaacttgatatatgataaggtagcattacagataatggcctcagctgctcattcccatgaccatatcttagacatcgccattatcgataactgctactcttccagtctcaatttcaagcatctcattctttgacttctacatcccatcctagcttgtttccaactccaacaatcctttgaaaccctgtaatccttgaccctacctcatttcaccctcacatccctatttacccagtttaaattctatgaacaattattgccctctcttgcttcattcttgcttggaaaaacctcaacccagcttaaagtcatctctttgtgtatgcctacatccacagtgctgaatgtgactagggaaaacacacaaccatgctgatgggtgttactctaaatgccacacctttgcttgaaatgctccaatggcttccatcttactccaggtgaaagccaaggtcctcatagtggcctctgcagcctcgttatatttcctcttccacttgtcttcccagcttactctgttccagccacactggccttcttgctgtttcctgaattcctcctcagggctttaaagacttgctgtatcttctgcctaaactctcttttctctgccacctgtatagctagccttcttacctccttcagaatttttttcccctcaaatgtcacctttcaaagggcttaccctgatcaccttatttaaaagtatgtccctctaaaacatatcttattccctgtccctgcattatttttctattacactaaacattcatcatactaaatactttatttgtttattagctgttttccttcactagaatgtaggagacacagaagcagagatttaatgttttgttcactttatttacagcgctgccacatgacagaggtacttaataaatatctgttggatgaatgaataaatttataaagaactactacaaattcgtaagaaaattatggataggaaattcacagaaaaggaaacctgaatggccaagaataaagacaggtacttctataaccatttaaagtgtaagcatttaaaactgtgaaaaccattcttagggcaggtagcccgcaagctatagaaaaacaggtggccgacttggcctgagggctgtggtttgccagcccctggcctggtgaaacaccttctcaagtgcacaaagtcacatacaagagaacatttacggcagtgttatttataatggtggaaaattagaaattggagatatcctaaatggcaaacaaacgagagaataaaaatggtatattcacataaccgcttttatatgaatttttttgagacggataaacctcaaaaaactacataatcaggtaaaaaatgttttgcttatttacatttcagagatgggctctttctatgttgtcccagagttcagtggctatttacaggtgctattatggtgcactacagtctcagacctctgggctcaagtgatcctcctgcttaagcctcctgagtagctggtactacaggtgcacgccaccaagcctggctaccaaaaacattttaaaagagtatataacggccgggcgcggtggctcacgcctgtaatcccagcactatgggaggccgaggtgggtggatcatgaggtcaggcattcgagaccagcctggccaacatagtgaaaccccatctctactaaaaatacaaaaaattagccaggtgtggtggtgggtgcctgtaatcacagctatttgggaggctgaggcaggagaattgcttgaacctggaaggcggaggttgcagtgagccaagattgtgccactgcactccagcctgggcaacagagtgagactttgtctcaaaaaaaaaaaaaaaaaaagagtagatatcatgtgcatggaattctgaaatactcaatatatatataggtaataaaaacatggaagtggatgatcaacaccaagttcaccattgtggttattctgtggacaaagggaggcaactgggcttggggctggtacatcggggacttcaaaagcatctgtaacattttataacctaaatgagaatatgaaacaattacggcaaagtgtgagatttgctaaccctttgaaggtgtgtatgggtgctcattgcataacatttttactacttgtaatgtttcataataaaatatatttaacttgmtgtgagtttaatttggagcatttggtgagcactttatagccaagtgttgacgcaatatttcatgcccacatttgagtttgtgttaaggagcaagttagtgctaagtataatcacttgcttttctacaagaagagaatagaggcaagatgaacacagaagctgaggattcataccactatcatggcatgcccttcgaaagaagaaacagaacaatgtcatagggaaattgrgtcagaggaaagaggagcccatattgagtaaactcaaagagctatatttatgtagtgagcagtgttttggctttggtacaaatcatttttcatattcagttaatgtcattaatttgatttttttggcttcattatttggcttatatttagtttgtagaattacttttgctttctagttgtaaaaaagctataaacataaggagttcacatctagcttttgctttgtacctattaagttaagctaggtttataagaatatttttcctttcaatggatctgtaaatttccaaacctaatatattcagtaggcttttttttttttttttttttttttgagacaaggtcttgctctgttacccaggctggaatgcagtggcacgatcacagctcactgtagccttgaccgctcaagtgatcctcccaccttagcctctcaagtagctgggactacaggcgtgcaccaccacactgggctaactttttatttttgtagagataactcttgctatgtttcccaggctggtcttgaactcttagccttaagcaatccttctgccttggtctcccaaaatgctgggattatactcaccccactcagtaggctcttaactgtgttttagagtgagaaaaacataccaaagtattaacagtggaataatgagattttgggtgacctcttttttttttttttttactatgatgttttgcattttccaaattttctataccaactacatatattactctaatcatcagaaaacaaacaaaaatgtgttaaaataccccttagctatattttacagtttcatacttacaggagtcactactttattataccatgaaaccccagaactaaagagttcccctcataggatccaaaagctggaccctggtttgtcacgtatcactgttacataagaccagacctsaaaatatgatgcctggttacatccatctcacctgagtgtagaagtgcagaaaacccctgcgcatcctcccactcccaggctggttcgctcttattgtgcacgggacggaagtcaggaacttcatgataccagtctatgtctgtgtggctaacaaaatagaacatgataaagaacrtattcaggaattttttagaacttgtatagaaatgaatctatagagatttaaaccttatcttctgccttcccattcttcctttttccagaaatagtgttttaaggaactattgtgaagacaataattattttgcaaaatgaattagatgatctctagaatcttgcaagaacaaattacttgagtttgtaattagacaaaaattattggttttgttttgttttgttttgttttaaaacggagttttactcttgttgcccaggctggagtgcaatggtgcaatcttggctcattgcaaactctgccttccgggttcaagcgattctgctgcctcagcctcctgagtagccgggattactggtgcctaccactatgcccagctaatttttttgtatttttagtagagatggggtttcatcatgttggccaggctggtctcgaactcctgacctcaggtgatccacccgcctcagcctcccaaagtgttggaattacaggcgtgagccaccacgcccagcctgacaaaaattctttaaaagagatgtgcaaatacatctttgctccattaacagaatgcaagattttccaaatcactataggttttcaaaagagcctgaaatacatgcagctgagagcaagagccttgcacattcacctgctgatgcagtctccggtgatagggtcacagctcccygcacagtcacatggtcgacagccatagtctccgaagccccagtatcccaccatgcacctgtcacaacgtcgccctgccaccccaggcttgcaagggcagtcaccattgctggggtcrcagaaggtcactgagttggcaggaaggacagctgatcctactggatggcaggaacacgctacaacagagaggacacgcaaggatcaaagactgactgtagatcacccgtgtgaacattaggcttgaccatccccaagtggcttcccttcaccacacagcatatttctgagactccttctttagccagtgagtgtatgctcagagaatgaaagctaattaaatgacagataagcgagatataatcagaaaagcatgtctgctgcaaaaataaacacataatttatcctaatatggaaggcatgaaatatgaatgccctttggttggggtgatgaggacgaaccagcaaagaagacagggtggaaggattcagtgagaaaggaaaagacgtcatgagagtatagtgttctggaagccaaagaaggtttcaaggagtagggcagcatcagctgtggcagatgttgaaaggtcaaagaagatggggcatgtgatggartattgcatttgaacagcacaaaagctgatggtgttcttcacaggaagagtttcagtgtaatacatagtgagagggaaacccagtggaagaggattcaggggagtatgggagtagaggaatttgagcatgtgaacagatagctcttttgaggagctttgcttttttttttgagagagggtctcactctatcaccaagaccagagtgcagtggtaccaccatggctcactgcagcctcaactycttgagctcaagcgatcctcctgccttagtctcccragtaggtgggactacaagccggcaccatcatacctggctacttaaaaaawwtttttttttttttgtagaggcaaggtcttgctatgttgcccaggctggtctcaaactcctggcctcaagcaatcctctcaccttggcctcctaagtgctggggctacaggcgtgagacactgcgcctggccgtaagtctttaatactagtcaaaagtccttctcctcagccctctccctactcctggaattacttattgctcacagtctgacaacctgcagcagtttctttgttcttgggatggcaaaagtagttgaacaaagtgtatatctatgtgtttgtatacatacatatatacacttttcatatatatgtatgtgtgaaatgtgctttctgggcttatcacaaattcgtgagccctaacttcagttggatctccaaaccaatgctcaccaactctatttttgcttttttgagacagggtcttttcttgttccaggctggaatgcagtggtgctatctccactcactgtagcctcaacttcctgggctcaagcaatcctcctgcttcagcttcccaggtagctgggactacaggcacacgccactacgcccagctaatttttgtattttttatagagatggggtttcaccatgtccaggctggtccaaacacctggactcaagcgatctgcccacctcgacctcccaaagtgctgggattgattacaggcgtgagccactgtgcctagcccatcaactctatttattcaatttttcctggattaaaaaataataatatttctcacagtggctgcctcagaaattccctaggcttctcaatcaacctacccacttagtctgattctaattcactgggagggtcctctggataatcttttctccatttcaaaatctttttcatcttcccactgctttctctgagaatcaagtgagaaacgctgggagaaaccttggttgacggctctgcctcccagagcctctgtgacctcaggtgagaaatataactttcctgaatcctggtttccttattgtggtatctacatctcatggagagttcatgcagttgacatgattttaaatgaaactacttcagcaaggtgcatagcacagtgtcacacactgaagaagccagttcttcatgctgcaccttctcaactaatattctcaatcctgttctctgctttttccccttggaaacttcttttattgattatttttcctttaaaatatcagtttggcttcaaatctccactactgactaactgtgtgactttgagcaagatacctaggctctcatctcagttcccttatctgtaaagacaataaaaataggaactatccttatgcagtggtaaggataaaaagagattatgtgtgcaaagcagttagtgtgatgtctggtacatgattaatagtaaattaaattaactaattaatccaatagataattctttttttttttctttagagaaggtttcactctgtcacccaggctgaagtgcaatggcacatcactgctcactgcagcctcgacctcccaggctcaagagatcctcccacctcagcctcccaagtagctgggactatgggcacatgccagcacacctggctaatttgtaatttgttttttttttatagcgacagggtatcactatgttgctcaggcagtcttgaactcctgggctcaagcaatgctcttgccttggcctcccaagtgctgggattacaggtgccagccactgtgcccatcagataattcttatagagatataggacctatgtttatctgagaaatggtgccagccctcagggaacttatagtcttgtgggggaaacagagaagtaaataaaagatttccatacatgtgatgtgctgtaacagaggtatacataaagcactgtgggaacacagaggaaaggtgaaggcaatacaagctgagggaatcaggtgggatcaacaaaggagggatcatttagckatctgagccagttcataaaagatgaataggagtttgcaagttgaaaaggagggcaaggggctgggcgtggtggctcacacctgtaatccctgcacgttgggcggctgaggcgggtggatcacttgaggtcaggagatcgaggccagcctggctaacatggtgaaacctcatctctactaaaatacaaacattagccgggcgtgatggtgcacgcctgtagtcccagctactcgggagactgaggcaggagaatcgcttgaacctgggaggcccaggttgcaatgagctgagattgtaccactgacctccagcctgggtgacagagcaagactctgtctcaaaaaaaaaaaagaaagaaaaaagaaaaggagggcaaggaaggcaattgctgattccagctcagtctttagacactttccccagtgcatctttttaaaataaatttttcataaataaattgtggtaagaaacacacactatacagttgaccgtcttagctatttttgggtgtaccgttcatcccttctgcattttacgtttctgcattgtgtgggagctcttactgcttcctggaaatgctactctctctgatgcctcagtgctcctggcccttggccatgcctgtgtggcctttccccaccttgtccatctagattctgacaggatttcttgtcccactccctccagacagttagccactctctcctctaagctgcctctttgcatatatttctattttgtccctatcacagtgcatcattattattattattttttccattggaaaaggattttatttcaccataaaaatgcaaactggaataaacatcatctttcctaatgcaaatgttacagctatttttaagtatttctgagtttcactttgaaaagcaaaygactataaaattaacaagtttgcagccttaaatctgtttgagacattccatgtaaaaataatttggtgaaaaaaatttttttttttttgtttttttgttttttgtgatggagtcttgctttactgtccagggtgtagtgcagtggtgtgatctcggctcactgcaacctctgtctcccgggttcaatctattctcctgcctcagcctcccaagtagctgggattataggtgcctaccaccataccggctatttttttgtatttttaatagagatggagtttcaccatgttggccaggctggtctcgaactcctgacgtcaagtgatctgcctgagtcagcctcccaaagtgctggaattacagatgtgagccaccacgcccagccactaaacagtttcttaaaataattatttgttgatatgcctatctctcttactagtagagtctgaattcattgacagaaggatctttatcttcttatttttgtctttggggccccagaacagtgtctggtacatcatagatgccctaatcagcatctgtggaattgacctggaggatattccaggctgtgggaatcctatgtgaaagagcccatgtggggaatgtgagaagtttagtgtgcctgagtgtacactgagtagaaarcagttgaaggagatgaggcagaagaaaagctgtagagtcaggtcggatggtaataggattccaggttgtggaattgcctagctttagaggttgaattttgtcctatgggcataatgaatcataagaagttataaagcagaattatggcacggttacaattgaattttgacagacactttggaggcattgtatagactagagtggggagaggctggtggcaggataatcaaagaaaagagagacagcaaggaaatgactaagacagtaggtgtgggaatgggaggtaagtttggatatgaaaaacttattttttaaagttagaacagatagggtttggagaccatctggaagaggaagaaagagttgttgagggacaaatagaagtcggggaagattttcaggtgtctagttcatgaaactgaataattagtgacattattcacaaagatctagaagagaggactagagaaagttggggcagatagatccatgctgagggtggagatagggaaggaagggaaagagaatgagtttaggatcaaacacattaagcttgagatgcttaaaggctatcttaaatatatcctggaaacattctgacacttaggagaaaagttggggtcataaatacagttttgagagttgtcacccartggcagttgaaattaggagggctagatgaaacttcccagggacggtgtgtagagtgagaagatgatcaaggatagaacacggtggaaacatccataggtactggcagttggaggagcaataactttcaaaaagattattaaggagaaggtagagaaggaggagaaaaaaaaaaaagccaaaggatgagaaagtttcaagcagttaacagtgtcaaacagtgcagaatgctcaagtcacatacgatggacaataggccagcaacaccatcaatcaggaggtcattggtgacttttgtgagaacagaagctggagaaatacaggccctgatggtgtactgtgctactgtttagatctctctttcatctctttaaccaataatcattagagccaaggttctcaaaccagtatgaatgtgtgaggtttgcaaaaaatttctaacatctgtgcaaccttccccccacgcccctccccataagctctctttcattgagaaccactacaatagagcatgaaatgttgcttcttctgccaaaggtatgaattatcttcttggataacctcatattcattcatttattagaatctcattcattgattcactcactcaaccaacaaatgttaataataataattctaatgtttatgaagcatttgtagtttccaaaatgtggtcactccttagccaaacatgtaaggtccttcatagcagaggcctagcctacttttccagtccttcctctcattattctcttgcatatagcccttgttctaattaattaggacaatttctagacacaccctccatctttcttgtttctttgcctttattaatttcaacagtgaaatctttcttcccataacaatctttcaaaattctatatgtccttcaaaacctatatctaatgtcacccctaagggttgctgcaattcaaccatttggggggattagcgtgctcaaggtgggagctctgttggtatcttccttgttaaagacagaacttttgacatacaatgatattcagaaaagaaaagtgggattcaacaccctttcctctgccaccccttcccacctcaccaaatgtgaagccagagcagtagctccacttgcccacaagggacaggtccaccttattttagaaatcattccttattccaatrcagttgagtatgatttaccctttctttgtaaccctccagtgctttaaagaaacatttcttcttatagctctgatcacattctactttgcattaggcagttgggggttttctttgwctatcacaccggtctgtaagctctttgaagtggagcatgggcctcactcacctatcccctgcagtgcttagcggaggcagacttgagtttaactcctagctgaaatttgttttacctttctgagccccacatttctattttaccaggttctgttgaggactaaaccagagataatgtacgtcactagcacttagtaagacrttagcaaatggtagattacagctgctcaaaaatgacccttgaactgaattaaaaggctatgatataagcactatttacaaaggacaatggaggaaaacagcataggagacactgtttgaaaggctaataatgtgtatatttaaggcagcrtttatttacccattcacttactcaacaaacatttaatgagcacctgctatgtgctaagtactgtgcaaattgctagggatctaacttgaataaaacagtcttggtccttaaagagatcccaagtttaaaagaattattccaagattttaaagatctttatacyggaggaaagtaaagattttgcctctaaaacattgaggttctaaggagaacatctttatattcatacagttatgataagcactgtctctacattaaatttcctaatttttttcttcacttggtttttattatgagaacatttaggcatttttctcttaaagtatcaaagcactattgatttatggtttgtttctaattaagaaataattcatttggattatataatatgcaatatgaatatatcaaaatgctatattcaaaacagtgtagacattacttaaaatgaaatcacataatctagtatgaaaattatataattttgagatgacgaaacctatagttactatatcactcagtcaagtcaatttggttcttaaagcagataggagagatttagccagaagaaagatattataagaaccccttctatggtaatatatggtagtccaccactcctatcttttcctctaatagaaaattcaagcatttccaggagttgacctctcccttctaccatatattttaaaagctacactcatttcaggaatggccagagaagaatgtgtttctgtcatatgtgctagtagatttctgtcagcgtgacttctcacataattacaagataaagataccatttggaaactatgcagaactagctccaggccgaaggccctgacatctttcatggcatactttttcaagactcacaccgaggtctgccttgcatacttatctcctgaagcttgatagcagtcaatatctgacacatacaatctacttttcttattttcttccaaaatgcaaacatattttcttcttgtttggaaggaaaaaggatctcctcaggttctggttcagttctgattccccaacacatatttcttactaattgttgattctaaaatgcaacccaagaacttattttttcacaataaatgtcaaagttatgacccagagtgacagaagttcttaacttcagctttgtctttgttgttgtttgtttgttttttgagacagagtcttgctctgttgctcaggctagagtgcagtggcgtaatcttggctgactacaacctccgcctcccaggttcaagctattctcatgcctcagcctcctgagtagctgggattacaggcacgtgccaccacgcctggctaattgtggtatttttagtagagacggggttttgccagttggtcaggctggtcttgacctcctgacctcaagtgatccacctgcctcagcctcccaaagtgttgggattacaggcgtgagccaccatgcccggcctgtcttcttgttagacccaacagttgaaccatcatcatatactattatgctgacattaattattcttttcgttataatttttagtgttcacagctgtggtgaactgtccttaagagccaaaatattacactgagtggtaaccaggtatatttagaagctgtatggcctgtctaggtggtaaatcattcatcactggagtcatcattttccccccaaaacatctgccctaacctgctctcacccacaaccatggtggcaaaacaaaattattaaaaatgtcaatttaatttccggatattttcacaagagttcatcaataatgcatgagacttactttgaatagtacctttttttgggggggacagagtttcgctcttgtygcccaggttggagtgcaatggtgtgatctctgctcactgcaacctctgcctcctgggtccaagtgattctcctgccccagcctcctgagtagctgggattacaggcacccgccaccacgcccagctaatttttgtatttttagtggagatggggttttaccatgctggccagactggtctcaaactcctgacctcaggtgatccactcgcctcagcctcccaaactgctgggattacaggcatgagctactatgcctggctggtaccttctttacccaagtgttctactggaagaaaatctatggtaacagtgcaaaagttttgaaacagatgaggtagaggaaatgagtactttacaaaagatttcacaacagattcccttcaagtaatgaatttagataattgctgaatatgatagaaattttatctatagttatatgtttgcagcaatacatctgaaagtgaagcagggcccctgcagcatttatagaaaaggaggcaatgctgctgtgtaggactttctagcaggaaacacacctgttaatgaaacgatggatgggcacattttcaaatatcttgtgtgtgcataaggctctaaaactaatatttgtatcaatcacaaaggctgacaataaatacagttgtttggaaatttgctgtaagatttcttagaagacagaaaataaaatagaagcaatataataaagttggtaagagcacaagcttgggaatcagactagatgactagattctatccagaactagattctggtgatgaggcttattatttacaagactttgtgaaattaacttcttcagctgtcagttttctcattaatgaaggaagccacagagatgttttgtgaggtttgagatcatgtatgtaaatatttagcaatgtatcaggcatctagtggcaccaaatgctaaaaaaaaaraggatattattatctagatgaaacgtattcgtataaaaatgctcaccactcgttcattcattcacttgcaactttaccaaagggttattgaactttaaggttaacatgaactatgctaggggccgaagatacaaagatgactacaaaaagtcatatctcttgagtgagggaagagagaagtgtagataatgacagggcagtaagcattatacccgaggtagttcagggtgcatgagaatacaggagcaacaaactgcctcattgtagatatgtttttttttttaaaggaaactratgattgaactggctttcaaaatagcctccttgcctttgtatcagagaggaacactgctttcttgactactctaagttctatggaattaagttactctcctgttatatgttcctttccttggacaaaaaaaattaacttattggccaggtgcggaagctcatgcctgtaatcacagcactttgagagggcgaggcaggcagatcgcttagggtcaggatttagagaccagcccgagaaacatggtgaaagtccgtctctactaaaaatacaaaaattagctgggtatggtggtgcatccctgtaatcccaaatactcaggaggctgaggcaggagaatcgcttgaacctgggaagcggaggctgcagtgagccgagatcacgccactgcactccagcctgggtgatagagcaagaacctgtctcaattgaaaaaaaaaaaaaaagaaaaagaaaaaaaattaacctattactcttattttgtggatcagagtatgttgaaaaaaaggagggtgtgatctatggtcctgctgccctgaaatgtcatataggacaagagtcacagcggtcaacctgcatgaatataaaaagtacacaaacacaagcacaagacaggaacataatggaaccattatggctccctttattctgaagagattgctatagcctttgatgatggagtcaaaggaggtaattgctgccggttcatctttattcccaccttccactagaactctaggagtctgcctgtcttccactgagggagtgatctgtgatcttaagctcaytgttgaaaccaccaatggaattcagcatcttaccgctctgaaactggcctcctttaatattacctgatggctctaacttttgttattttgttataaaagctacactgggagaaaaataccctaaaagtatttgctcctgatttagcttttctaaaaacagaactcaaagttcaaggcccttagctgggaaagaagctgcttgtcaagatctttcaccaagaccscggcggccactccctccgcgcggccactccctcggcagcgmctccaggctcccaacattgttttctcctgaaaaggccaaggccctacagaatttctgagggggatttttaatagtgaagtcattccaaaagctgcccagctgcctgctgaattcttagagcaagggggacttaagggagatgatttcgagacacagctttaagaagaaaygacacaatttgaactgttatacataaatagagtgtgaagttaaatagtagaaaaaatgagatcttttatcttttttttctttttggcactgttttcttctttccttctgctatcaactatttttgctagtggatgaaaagctayaaaaaaataagaaaaagttgtaaatgtgctttactctgtgaaaggccatatggtacccctttactatcctagggaacatttttctattgatccttgcratgttatatacattacgttcaatggtagctagttccacaatattcaaggggtatttaatttcaaataaaattatggccaggcatggtggctcatgcctgtaatcccagcactttgggaggccaaggcaggtaaaatcacttgaggccaggagttcaagaccagtctggtcatcatggtgaaaccccatctctactcaaaatacaaaaatcagctgggtgtggcggtgcaaacctgtaatcccagctacttgggaggatgaggcacaagaatggtttgaacctgggaggtgaaggttgcagtgagcggagatcacgccactgcacgctaacctgggcaacagagcgagactgtctcaaaaaaaaaaaaatgacgcttgaatcagtttaataagaaaacaatctgaattatgatttgcctttcatttactgaagttcagtgtctcctgagtttttgtacatcctacccaaaagaggggtaggatgcatgagatctgcctctaaagctttaaaaaataaatgtacagtatttaagtctgtttcctgtcttctatacacatttaaatgcatactgcaaataaatacaaaagtcatagcctttattttattttattttgagacaagtcttgctctgtcgcccaggctggagtgcaatggcgtgatcttggtttactgcaacctccacctcctgggttcaagtgattctcctgcctcagcctcctgagtagctggggttacaggtgtgtgccaccacacctggctaatttttgtattttyagtagagacaaggtttcaccatgttggccaggctggtcttgaactcctgaccgcaagtgatctgcccgcctcggcctcccaaagtgctgggattacaggcgctcagccatagcctttatttttaatgcttgctatgtgactactgctcagattccctatttaatttctgtatcattcctttcatgtttactagttgtagctgggccagttactatttattcctgggtatatctaagagatcttaggcagctaaaaagccaattttatattcttgatttgctactttaattaaaactgaagaaagcacttttgcatatacagacaaattttatcatgggaaaacttgggtgcaccattctctcccttcctccctccctccctcttttcttttctcttttctttctttccctccctccctctttctttttctttcctttccttccccttccccttcccctttccctccctcccatactcacttccttccttccttccttatttttccacctgttcagcctcctgtatttccaatctatgcaggcacctagccaggaactggagttatccctagctcctttttcctttggagaaacaaacctaactgtgtctatcttcgatctcgcctttgaactgatgcggttcatcctgccataatctgtcatgctcccctttttttttcataacacttattatagcttttaattacatatttacttgggtaaatttatttagagtctatttccacggggatagagacaattttgttgtacagacagtgactagaataggcctgccacatgagaggcactgaataaatttaggttgagttttttaaattgaactatttgtgtcatttaaaaaatatttcttaataattgatgatcttatggcctccaataatcttctgatttttcacctcactgccgtcactatagtacattgtaaagggctagaggataggaaccacatcgttttatcgctgtatcccccaaacctaggtcaatgcctgacccattttagcaaatcactcacctttgttacattaataaatgaacgtgcatcttaataagcaacaatcatgaaatgattttatgttttgatgaacctcctagaaggtccatactgctctttataggtttctgtgaataatatcttaacaccacaggattgtagtactggatactggatactagaaacagaaaaccaccccaacaaatctatggtaaactcaaatggtcaaaacaaagcagattattctgcaccttcccagagcaagactatatcctatatttaatgcttcagtcagtccagctttattatttattttttgtaagaaaagttctttccaggcacggtggttcacacctgtaacctcagtactttgggaggttgaggccggaggttcacttgagcccaggagttcaagaccagcctgggcaacacagcaagagcccctctctacaaaaaataaaaaaaaaaaattagctgagtgtggtggcatgtgcatgtagtcccaactactcgagaggctgagatgggaggattatttaaacccaagaggtcaaggctgcagtgagctgtgatcatgccattgcactccattcagcctgggtgacagagcaaaaaccctgtctcaaaaaaaaaaaaaaagttatttattctaacttgataggggacattctscacccgtaagtacctttcactggcagcaaaatttctttcacattaatcaatctgraattcctttcacccaattatatccaattagaactctttgttcaaggaaagtaaattattttttgccacacctctacttcccccttacaccttttgagtatttatagaaagttgctgtagtatccttgagaaatttcctggataatctgacaatatttatcatctttcacacttattcattagtatctctcttttcttgatggtttttgttggcctatctggaatattctccagtcatttccatctttcctatactaagattccttaggatgaaatcagttctttagattcaaatwctacatggctatttatcagtaagcagggccttacaaaactaaaggcttttacttttttttttttttcaaaaaaactaggttctttaaaaattatttttgccttwaaaatatatatytwattatttcttcctttgggttttgattctgttgtcattaactgggtcacggtgtgtaatacagttctttggatctttgcaggtcatgggatctttgtagtcagactaacctgggttcaaatcccagccttggcactgaccagctatgtgaacatgggcaaattatatacagtcatccctcaacatccgtggattcagcatccatagaatcaacccactgtggatcaaaaatatttgaggagaaacccagtaaaaaatagcaatacaacaatacaactaaacactacagtataacaactatttacacagcatttacattgtattaggtattataagtaacctagagatgatttacagtatacaggggggtgtgcataggttatatgaaaatactaagccatttcatataagggacttgagcatccatgaattttggtatcctcggggatcctggaaccaatccctcgaggatactgtggatggaggaacagggacaactgtaatcaatttaagtctcagtgtcttcatttgtaaaatagaaaatatagcacataaagctataacttagcacataaacattgctaaattacctaccacgaggtctggtccatgacagccattcaccaaatgctcattctcttctttatgcaccttctaattttgtccagaccttctgaagattttgatattttctaattgtttgcttgattattacatgtcctcatcaaaagtagaatggtatactatttatttattcagtgaattactgcattccactttcttcttggaagacattttagagaatttcatgacctygtccacttctcttcccaaatgtgactgatttttattatccatcaatttgtaaagttttggctgggtgtagtggctccagcctgtaatcccagcactttaggaggccaaggtgggaggatcacttgagctcaggagttcaagaccagcctggggaacatagtgagaccctgtctatactaaaaataaaaaattaaaaaattagctgggcatgatggcacatgcctgtagtcccagctactcagaaggctgaggcaggagaattgcttgagcccaggagtttgaggctgcaatgagccatgttcatgacactgcactccagcctgtgcgatagagtgagactctgcctcaaaaaaaaaaataaaataaaaaataatcgtagcttctctttttttgatgaatttcaatatgtgttatttaatctttttaaaggattgccttagtatgattattatgttatgacatatctattttctctatttctctcacttcttaaactctggttttacttcttggattaaaaaaaaaaaaaaaagctgagattaaagtttcccaactattactgccaagttactgttctatttaaagtgtggtttccacaaacagttacttcatattgattctatgctggaatcattcacagttgctttcaatataaaacaaggatgtctrtgttgtttatatggtataaaatgaactcacgtgactttgccaaacctacaatttgaaagaaaaagcccacaagttactatttgaagagacctcaataacctttgggaaggaatggactggttcacaggcacgagaataaacaaatgaaaggtgcttatgttttcttacatgtgtaattgtggtaaggtattctggatttaattagtgtaaaaattgtacttgaaagatagactgaaatggaagcatcactatacaggaggtaaaatgaaataactgtttaagagagatcagtgcaaacggaaatgcagagactcttcctgagagcatcatgagaaggggctatttgagtagartgtgaagaatggcaatagagactgaggcaagagagtcatccacccaaagcamctgcatctccaacagctgagtagttttcacctaagccagaaagaaggaaaaaaaaaaaaagatctggatgatataaccctttctttacaaagatagctggttcatttgggtaggtagccatgaaaccagatgctatcttggtaaatgcttggtttgggttttagggcagagagaccaagtttatttttattcactctgtgctaaagggcaattgactacatttattttggcccatcagggaggaaggaagggcatgccaatctttcaagaggttgtttactttgacagagaatgaattytgctttcttttccattttctgattttccttttaatatggagaaagactatgtaatagtttaaaatatgtgtcttggcataaaagtcaataaatttattgtaaaggaattaactggttgtttcctaaaaggagttaattctgttctacaggcatttctttaaacacctgtttcaaacagtgtattcttctaaagtgaggattttttttttttttttttttttttttttttttttttacttagggtctcagtctgccaccctggttgtgtagtgcagtggtgtgatcatggctcactgcagcctcaaactcctgggcacaagtggtcctcctgcctgagcctcctgagttgctgggactacaagtgcataccatcatgctcagctaattaatttttttttaaagagagcttatgctagagacaagactgctataagcagtggttttcaaatgctgagccaagaggccaaaaggctgaatcagagtcaccaacgatgctttttaaaggaatgcagatttctgtccggacgccctgttggagattctgattcagtgtattctgggcaggactctaagattgcacattttgagtaagtgctccctggtgattctgacccacagccaggtttgggaaccaatgacttgaggtgagagaagtggggctgtgaaagtggaggcaagaccttgtccaaaccrttctacttttgactcagagtctgagtctgacttcctgatgaaaaatgacctgagagtttgaaactggccgtggtgagaatgtttcaaccacagaaattgctaaatggtgtgaatcaggtcagggttccctcccaccacgaaccctgccgcaaaagccagtacacaattatctaggaaggttattctcttttttctttctttctttttcttttcttccctttcttttttctttctttctttctttttttttttttttgagacagagtctccctctgttgcccaggttggagtgcagtggtgcaatcttggctcattgcaacttccgcctcctcggttcaagtgattctcctgcctcagcctcccaagtagctgggactacaggcgccctccaccattcccaactaatttttgtatttttagtagagacagggtttcaccatgttggctaggctggtcttgaactcctgacctcaggtgatctgcccacttggcctcccaaagtgctgagattacaggtgtgagccaccacccctgctgtcacattttaaaaatatgcctgctatagaaaaatctacctgtgttataggttaccaaagtcacataggtgactttaaaggtttcaagtgagttactctaaaagagactatccactttttgaacagagagatgagattcctcaaagtacctcagtacacagtgagaattacattcccctttttccttctgtgcctgagcaacgagtcactttgagcctccatttctgttctcagccctaggttcagctggagagattcatgttttcccttstgtttacagaccttaaatgcactgtcctttcaaaaawttttttttcctaagctgtagaaataaattcagtttcagtgatctccccagtcttaaaaaaacaaacaacatccctggaatcctcagaagtgatttcttggcatggtaatgtgtagttgattgtgctgggtccaacagtagactctgattaaggttgaaataaagaggaagtgagaacagggatgatttaattgctcacaagaaataaatctattggctagaagatttggttcagggcctcgtttcttcaggtttgatgaatttataaccattaagtaaaaatgtacacataaaaccatagcatttagcatggtgcttctcaggagagtgggaggaaaaatctcctagaacattcgtggaaccagtaagtccttggcttaacctggcaggaaactagctacctaactgcaaacaaaaccccaagattaatgccatcaatatttgttgaatgaatcaacatgcccaggtamgtattttattacatgtatcatagatgctgtgaggaagaacatcatcaatttgtttcattttctagatcaactcattaaaaatgactgagattagaaagctggacaaactggctgggcgcggtggctcacgcatgaaatctcagcactttgggaggccgaggaaggtgaatcacttgaggtcaggagttcgagaccagcctggccaacatagggaaaccccgtctctactaaaaatacaaaaattagctgggtgtggtgacgagcacctgtaatcccagctgctcgggtggctgaggcaggagaatcatttgaacctaagaggcagaggttgtagtgagccaagattgcgccattgcactccagcctgggcaacagggagagactccgtctcaaaagaacaaaaaaaaaacaaaaaaaaagaaaaaaaaaaaaagaaatcaggacaaactgtatttcagcaattttacaggaaaaaacagaaacagccatctaagaagtagggagggatcttttcaaggaagtcttccctaaattgtcctcactcacccccacactctccctaaggcacttgctgtatctttttcattgcactttcctcttgtaaaatgggtggtaataatgttacctacattgaagtgctttagtgaaagttaaaaaagtgaaaacatacacagccctttgaatagtgaccagaaaatagtatgcactcaatatacgtcagcaattactatgatattgtcatcatcatcaccaccacagagtactgaaatgatctattattatacatttctcctcatctagaatgtaacatctcttagggaagatcttctgattttcacagacttaatgttggcacaggggaagcactcaataaatgttttctgaactaaaytgagctacaacttatgtgcttctagtaaatttatctcaactgttgcttcaggttttcaatggttttttttttttttggttttttttttttttgagacatagtcttgctctggaggctcccaggctggagtgcaatggcgcaatcttggctcactgcaacctctgcctcccaggtgcgagcgattctcctgcctcagcctcctaagcaggtgggattacatgtgcctgccaccatgcctggctaattttgtatttttagtagagacggagtttcaccatgttggccaggctggtctcgaactcctgacctcaggtgatccaccggccttggcctcccaaagtgctgggattacaggtgtgagccaccacccctggcccagttctaacttttgagaagataaaaactggaaaagaagagagagaagaagaaaagggctgtcatatgttcattgctggcagtccaatagactagattgcccaagcctagttaatattatgtttatgattatttcactgatagaaatgtaaggttcattatttccttggtacgcatttgtaggctctagcacttggaaatggggaacaaatatayagaaaaaaatcttctagcgtgtgtcttcccaagtaaagtcttcatatagatatggccagtataacaacattttccagtgtgtgctatagaacacgggtcccaaaagatgctttgaaagaaaagcattctctggttaaattggagagatgtcaaaactccgaaacaggtttataataaacattagcatattaggctctgagacatactgaagtgaagaaacctttgattaatttatttcctaaatttgaaggccatagcaaaatttcccctcacataatttctattaacatttcatagaattagaactctgcagatcaaactctggaaaatgctgtaccacagaaacatatttattcagatttccattttttctcagtaaacctctacataatttattctaaaatattctaagcctatatgcacacaaatagagatgtaaaccttcgttaatttggatgtttgcttaactaggctgttctggctaactctgaaaaatttaactgtaaattaagtgcatagaacccttgttgaaaagcattcaagagcactctcaaccttaaaaaaaaatttttaagagatgggaaatttctctgctgcccaggctggagtgcagtggcgtgatcctaactcactgcagcctcgaattttggaggctcaagtgatcctccctcctcagcctcctgaggagctgggatgtcagctgtgtgccatcatgcctggctactctgaacctttaataygattcaatagctctggggtaggatcagaggttctgaattgctaatcagcaaccagatgatgccaatgcggctggtctgcagaccacacacagagtagcagtttgcttttctgccttggtaagctcagtaaaataaatataataaaattgttattttgaataacattgtacttgttgttgatggaaccacatactgaaatagtttaaatttttaaaatatcaacttgttttcttgatactaccttcctcataaaagtaaagtgggaaataatggggggaaaacatctagctataagaatatcgctgtcagcacctcacatgaaatctggtaattataggtacttaataaatgttaaatatgttaacttatttgtcataagctttattatcagttataactgaagcagtgacaaagaggtgacatagggatacatctactaaggagggaattaatgatatgaaaatattactaaagagtaatgaaaatgctctcaaacatactcctaatcaaacaacgtaggtagagagtasgtaggtagagagaactggatgtgctgataaatgttgggatctactgcaggctcagaaaaagagaagaaccagagtaatattctggaagcagatgccagtaaggaaacgtaagctagggaagcagacacaggcatctctgccccaaatgtatcctggaatagtcacaaagcgaatggagataggctttcctagggaagcctacccagggatcggggagctgtctggagaggraaagaaagaaatacagatcttccctatgaacccatctacctcctatacattatgctaaaagaactaaattggtgttggttattttcataattttcctayttggtgcattaagtaccatccaagtatttgttaactaggaatgattactaatatgacttagtagtagtagtttttagcttcaagtttttcagtagccagatgtagctgaatccataacaacatataaggggatcagaaacttgttacaattatgttagaattacagacaaatatgttacaattaccttattatgtttcagggcaattttttttttaagagtatcttaatgtggtcttgatggagttttccttgaaatgactttggagcctttggtcttctggtacttgggtattatctataaatatacatrgctatatctataaatatcaaccaggcaattatagtagatgacgcacatggactgattatcaactacttgttggtagttcaactcgagagttactcttgctccctgactgagatgtccaagatgcaggcactttcagccaaccacttacctgccctacttccctcatcctcacactgctttaaccacctcctcactctttcctgtctctatggccaggacttttttcagttgtcagaatatgctatattctttcttccttctgttcctttttggcaaatcctgttgatttttctctctgatgggaatatctctactcatgctttgttaatttccattaaacttcaggtctcaggttctcaaaactcagaacactccactcttgctgactgcycctctgatgtgctcccctccacactcygtaacacaatacttattatacttctgtgtatgagtgtgtgtgtgtataccactagttgcctatatatacatatgtgtatgtatacattacagataactcactagactttgttagctttgtcaaaagatggtgtctcttttgcttacagttgtaattcccagaaactagcacacctagcacatagtagcactgagtaagaatgagttgagtgaaggaataagctttaaaaatattctaattgctcaagttcgttgatgaatgttcagacattttcatggattgaaaaaataataaaaagttacgggtgttgtttaattttagctgcattctcacaatttgcttatgtttttcacagacctggtagtttgggaaccaaaacctatagaacttgttttgcacaagtctctagatgagctgtataagtaacagtaactactaacaagaggtcactttttttcctaactcctctttcatactctttttataaaactctgaagctatgagtattctaggatttaaaaagctagggctggtgacctttttacatttagtaagaatatgagccatatcttgaacatagaacagtaacaaaaaaacaaaactaaaacaaaataaacaaaaaggtatttattttggctccaactttgccagtaagtgttttcttttttctctttttaattggtcagacttaggcactataaaagggcttcatctgttttaattctttgtacatttacctatcttatgactttacaaagccaaacaatttaaaaatcartaaagtaaaatgcaatgaataatatgtaatgctttgaaattaatctgagctatacatcattaaaatacattgcaaatatatcacactatactaattgaattattgtgatggctcctagtaccctagaaaataaataccaacatttttaggttggcagttaaggccctctcaaatctagccccaatcaatcctccaacgttttcttgcactattccccttggtattctactctttattctaatggaagtgactagctgtttgctacacaagcacatagaagaggctcaaatgttagcaaaatgttagaaactggctttgttaaccaatgtaaaatttgggggggcggggcatgctttattgagatcagtgtttctcaaactttactgtgcatcagaatcacctggagggcttgtgaaaactcggattgctgggccccatctgcagaatttctgattcagttgatctgtctcagggtccgagaatttacaagtctaacagatttcccaggtgatgctgatggtgctggtccaagagccacactttgagaatcactagtttgcttgctaacttcaactaaagctgaatgctgaaagtgcaagttcaatatgaattgagctgcctttgtgtaacacaagaacagtcttttgaaaactaagtcagaccatgccacttctctgctgaaaacccttgcagtggctcatcattttactccaagtaaaagctggtgagcttacagtggctcatcagtacatattagattttctcccctccccagtcacctctctagtctcatctcctgacacccccaactctcattctgatgcagccacgctaacccccatgttatttcctttgtcacatcaggcaccttcctgtcttaagacgttcactttaggtattccctctccttagaatgttctttccccagttaactctttggtgaacttcttcactgtcttcaaatcttagctgaaatctcaccttcccagtgctggggactaccctcatcatcctgtccctyactgtaccctgccactcctcttcccaccccaagcccttggttccctggatcccttccctcttgttttatttttttcttctttgatgacactagcccttatgaacttctcacatactgtatatttcacttattagttatatttattgtctgtctcctcyatcagaatataagctccttgagggcaaggatctttgtcttattctctgatgcatcttaagcacctggcacatagtaggcgctcaataaaagtaactggatgaatgaatacatgaacacattaggtatactgtacagcatactgttcaaggaaatgctatataactgtatctttttgaaaatgttacctgttgccctacaagataacttatccaagttagtgacaaattatttttcttttctcttttatctgcttagtagttcagacattctcatttttagacatttctacwagtggtctgaggctatgggatacacacgtatatatatctattcatttaaacatattctgtacaaaatggtgtcaggactatgttctaagacaccattattataagcagagaccattttgttagcacatggagattaggatctatattttagaccctaaggagctgcagattttaaggaagtaattatctttaaataaggtatttttgatcaataaagagtagaaacgctatagtattattttccactttctggcttataggacatgacagttattataatactagttttcatttttatttctttattgttattttatttatttatttatttatttatttatttatttatttatttatttttgagacagagtcttgctctgtcgcccaggctggagtgcagtggcatgatctcggctcactgcaagctccgcatcccgggttcacgccattctcctgcctcagcctcccgagtagctggaactacaggcgcccgccaccacgcccggctaattttttgtatttttagtagagatggggtttcaccgtgttagccaggatggtctcggtctcccaaagtgctgtaattacaggcctgagccactgcgcccagcctctttattgttatttttaaatataatattaaaaatagagacagggtcttcttctgttgcccaggctggtctcaaactcctcggctcaagtgatcctcccacctcagcctcccagagtgctgggattacagatgcgagccaccccacctggcgtagttttcgtttcttgagggcttattctatgacaggcaatgtgccatctcttttatcttatatacacactttgtcttatatagttctcattacactacaggcaggaattttacatatgaagaaactgaagtctgaagagcttcaatagcyggcataacatcacacagctggcaattggcagtgaaggcattgaatctacatctgtttgaaacctattaaatattacaaagtctgagtacaaacaaggagcaggagtaaaacaggatgctgggagaaatattatgacacagatccagatttggggcttggtgtggaaagtgagcagtactatattttatctgccattatttaagagaaaaagcttttaacaagcaagcctgttcaaattgcacattgatatcttctccctgatgttaaaaaaatatttttaaagagcaatatagtttttcctttaaaaaactcgcaaataaccccaaggttttaaatgcttatttcccattgtagtgctttcttcctgtcactgtttttgagctagaacatggagtccttggtagggaaaggaagggcatgatcatcaatctccattaatagtcttgagtggcttctgttatctgatgatttctgagctgagagagggtaaatactgatgtggttagatgagctattcatccacagttgacatttacataagccctgcatgcaccctttacattcacataattcagataatgtcctatgaatcrgatagatcttttcaaattctattcttttttcaaataaacctctttttcttttctttcctttccttcctttctctctctctctctctctctttttttttttttggaaaggtttggctctattgctcaggctggagtgcagtggcactatcccagctcattgcaacctctgcctgctggattcaagccatcctcccacctcagcctcccaaatagctgaaactacaggcctacagcaccatacccagctatttttgtagtttttgtagagacagggttttgccatgttgcccaggctggtctcgaacttgtaagctcaaacgatccgcctgccttggcctcccaaagtgctgggattacagacataaggcaccatgcctggcctccaaataaacctcttctcagagttatgtcaataaaaaagcagaacccatgctataagagtttagtattttgggggagagcataaaattaatatgatttcctaaattagttatgatagtgaggatacattagagcagtgtcaatcaaaatggatttataaggaaaccaaaactagtcttttttcatgtttaagttcactgttaaggtaaaagaataatccaagtgcagtaactatcctttatttcatcagcttgagtccatttattgtctaccttctactcacaagtagtcttaagatcttaaatagctctccctsttcmtcactcttttttctattagtcatcctgtttaccaaaatgcagtgctataggaaataattttactttatggagaatgagaaaggaaattactttgatgaatattatactgttttcacccaactggttgaaaattcttgcctcttatcaatgaagaaattaaccgatatctgtgagtgtgttatctcagaacctcaatgacctccttctyttgggttagcagaatgagggataaagagattcatctcttgtacaaatcagcctattttctggaaaccacaggttacttacgtttgcaagcatctggagctgagaagggtctccgcaggtcacgatagaagcctggcttgcacctctggcaatactgtccttctgtgttgtgctgacagtcatcacagacaccaccactacgattccctgatgcctcccacacattaacgtcgaagtgacaggtatcagcatgcccattacacttgcaggctggaaataagaagcgtggagagaaacactaataagtaaaaataaaatgatggrttatctcatattcagataggtaaaaataggatgagttggccaggcgtggtagctcacacctgtaatcccagcacttgtgggaggctgaggcaggtggatcacctgaggccaggagtttgagaccagcctggccaacacagtgaaactccatctctactaaatacaaaaaaattagccaggtgcggtggcacacgcctgtagtcccagctacttgggaggctgaggcaggagaattgcttgaacccaggaggtggaggttgcagtgagctgagattgcgccactgcactccagcctctgtctcaaaataaataaataaataaactaaaaataggataaactgattgttaatgtttagttttagtttctgagtagttaacaatacaaaaatcaaagcaatatagaaaggtatccattgagaaatctagcctcggcctccccatttaccctgtttttcctgatttcaataggttactacttttttttaaaagggtttcttgtgtagccttccagtttttcattataggctgttaattaaaaaaaataagtttcaggagatgcatgaaaatcaacaaagtgtagatttgtctagttgggcagagatattatgatgaacttaccaacggggattgacatttattatggaaagattacaggagtgacaaccagttttttaccctctcttttggtaacacttcacaattcccattcctgatacatctcaagggtcatccctgtgggtctcctgtccttgctaagaaaagctgagattgtcaggccttatgtggaaaggagcattcatattgcagatgtaggcatgaattcatgcttactaatgagcctggaaggaagcttctggtggacagagcttagtaagttggcaagtagattgatttatctttcataaagtatattcttcagctgttgaactggtgagtagaaggtggactcctattgaagcctcaattttcttacagaagaggcctgcagtatttattatataacaattcttcaaaggcatttctaagattataagtcaatagcatcaagtgacatgtctctgtgttctatacgtatttagataggcagctgatttctgtggaaagagccagaaagtcaccctaggaattcaggagaaattctttagattctcttcatgagtgatttagaataagaatccagatttttgtggaggtcaaatgtatttgaaaatgtttgtgctattgtttttcattgtttccttgatgtgttatgaaattctgaccagattcatatcttttaaaagtatattacaagataatttaagatkgattcttacaggaaatcctttacatttcctagaaacaaamacaaatcagttatgactccaaattaygtatgggaagagacttctcacagttttacccacagaacctgcttttaaattcttgtaaaagagaggttcgtgagcgttaacattgtgatgggcacgcgcatttctctgaacattttaaattgcaaagaaaaaaatggctcatgttcccatattttaaccttcctatttaatctccagcctcaaacctcaagttagttagtccttgtagagaaatctcattcttaacttactggcttaatttcaaatctaatctttcatttcaagcatcataaagtgaaaaaaaaaggcaatgtggtattatgggaaaaagtacctaatatggagtcttgaaacttgggatcaagtccccactatcatttactaactttggcaaatcacttaatcttactgagcctcagtttcctgatctctataatgggattaacaccacgtgctttattgggtagttttgagaactgaattcaacatagctattttcatgtttataattcaccatctcagcaatgagagtacaacagaatcagatgttctcgtgtctattcatgtatttatttatttatttagagacagagtttccctctgtcacccaggctggagttcagtggcgtgatctcggctcactgcaaccttcacctcccggtttcaagtgattcttgtgcctcagcctcccaagtagctgggcttacaggtgcacgccaccatgcccggctaattttttctttctttctttcttttttttttttttttttttttgtatttttagtagagatgggatttcaccatgttggccaggctggtcttgaactcctggtctcaagtgatccacccgccttggcctcccaaagtgctgaaattacaggtgtgagccatcctcctgtttttattatgtcaaattataaaagagttcttagctcccacaaagtatccaagcaaataggcaacatattcttggcaaaacagtcacattggcaatgtaatgaacggcaactgttttcagtggctgaagcctcagtgggcagtgatatggctatgtttgtgtagggtctagtgtttgtcacccaccactttgtgttgtatttctagagacaacaaggagtccacagatgcgytgactttacaaagaaagcttttgagtatcgtgggcttgttacttacttctgcactcgttgggagcccccgttttgccatcagctgcctcccatggccggtcattgtataacggggcacagtgctggcagtggctgcctgctgtrttgtgcttacacatacacttcccatggacctacaagcaacatcaagtgagaactatgagcacacatgtcgccaaagaagaacagaacatgcttcccacaatctaatctcatggattggctttagtcataagatgttcattcactttcctgaagaagttagccatcaagaggagagatgctttctttagtttgtcttatcatcttttgaaaaattcaaaagattaagtaatatagtttcttggctgaagggtatatgaccctatagagcaattctaaggtactggctgagcaaacacttgaattctaaagtactggctaagtttttaatatctttaattttttaaaattctttatgcaaaagtaacataccttcattctagaaagtttagaaatccataatctcattgcaaaatgacattaatataacatttggagcatataattccagtacttaaaaaaattatatttacaatctttttcacataatatattgtgaatatctttccattttgttaaatattctcatataatacacaccctaatggcaccccgtatgatgtacaattatctgaccacctattttattgtaatttaggtttttaaatgtatgtatatattatattcaatgctataatgaatatcattgtagctaagtatttgagtgcatctttaattatttcctttgaatgtattttctagaagtaatattgaaaatatgtgtattgttagggctttgaatacagtttgtcctaatgactgggcatttttttttcctccccatagttcagagtaatatagggtttattaaaatagtatttctcccagagagaaatacttcagtagaattcttagaaacatgggaattttaatattttttgtattatttcactgataacttctaaaaattaatatttggaatcatctgaactatctcctgataactgagacttgcaatgaatttcaaccaagatgcattccagtaccaagattatttatttacatgatgtcatgactgtacaaaggaaaggtttgcaaagtagctcagaatggggtccataagtgtggatctaagaggtyttatattttttccttgagaaacagtgttaaaggtaacataaaggtaayaaattatatcaactagtcaacaaatatttaatgggtacctacaagggagagtcactatgctaggccatgtttggtacacaaagtattagaaaactttcctgtctttaagaaagataaaatgtataatagctggagaaaaaagagttacatagaagaaaataacagataaacaagacaataaacaaatacctaagaagcaaaataatgctggcgttcaaaagatgcagaaatcaccacaggctgacagctgtggagggctttatgagaaaggtggagattggagctggcccttgacacatgggtggcatttttaacagacagaagggaagaaacttttcaggaaaaggaaacaaaatgaaccaaggtgtaaggagaatctgtgagcaaagtttatttcaatgcatctaaaatattttgattgtgacaaaaaatgaattactaaaaatgacatgtgctcagagtggccaaaccaaaatgagtccctaaggtaaagttcaacaaacctgaaaacagccacaccgatacactgatatactactgcttgayctaagataacactcaagtaacttgtgtcatctcatccaggactttctttcttttaatactttcctaccactggtggacgcactctgcaagtggcctgtgcaattatccgagtgtgctatatgactgctatgggccttatgctcacataatgtccaagttcaggagttacacacagggcttagaggacttcgggctgcgtgtgagtgaacatgatgcctaagagttagctggaaaatttcataagcaatatgttggtggccatcttgctaaatttcatttcagtgtattgtcatgtaaggttctcatgcttcatgaaaattatagaagttcttttaattctcagggattagtgagtatacagattttttaaaaatagggtaaattggctccttgaaaaaaagatgatgttgcaaaaatttttgttaattttctttatagaaatgcaactaatactatagattcaattcactggttttggtcttggaatccccaagtatgaattgagttatgataatctaccttcttggccttctcttcatggctctctgatatgaaaagtttctatatcaaaattccatggaattataagggttcactacaaatctccattcacacatccaggcaagctctaaagacaaatctgcacttaaattttgagagctgcaggaattcaacttctactgctctataaaaatgagatttttttcatcctagctcctgggtatctgatttttcctatccattttttattataaaatatatgaagtagagatgcctcagacatattacttttattgaacattttaaattcagtgttctctctcatcatgaaaaaatataaactcttgccaatcaaataacttctatgtggcaaatttctgtaaaagctctcaggaaaagttgatgattctttgttttacttgtagtactaaatgctgacttcaaagaaaagagagtctttgagaaaatgactgtgtaggaaaaatcttccgaggctgaagaatttagtaagatgaaggcatccttatgtagctggcagaagtagcacaatggagactagtaggaaaaacagttttgtaattatctaaatcctacatgtcaaaaaaaaaaaacacccacacacaaaaaagcaaaacatacataaaaacacataaataatctgatagaattggagtcagagttcctgctgttaagggagttctatctaaggagggcattagggaaaatgttaaggggtgtaaagtaaatatgataaaaaacaaagtcaattagtgctgtctgtataaaacttctaagtgcagtccctgagtctgtgtcctgaagggtacatgggattttccttagggagcaaagacaagaatataaaaaccctaaaggaatagtcagggacaatcaataaataaaccagaggtatgtgttcgagaggtaggttcaatccagatcacagaacacactaaacattagcttaaagaggctgaaatttatcctgtaagcaatgcagatccattgaagatttttgagtaaggaaatgatgtgaaagatatattaaatatactttcttttcttctctttttttaaaaatattatttctatctctctcctatcttgcctgttatgttctttcttccctttctccttttatggtttcttctccagctttccccccagctcatgccttacaataaccagtggcacccacatgtattttctgaaaatattcagaagttgaaaaggttgttaatttctttttcctgattttccagttacatcagcatgttaattcttatgtagtttttttgcatcctctccattttttaattttacttatttatttttaattttttttagagacagggtcttgctttgttgctcaggctgaagtgtaatggtgtgatcacagatcactgacaccttgaattcctgggcggaagtgatcctcccatctgagtctcccgagtagcttggacaacaggcacatgtcaccatgcccagctaatttttgtattttttgtaaagatagggtttcactacattgcccaggctggtctccaattcctaggctcaagtgatcctcccacctcagcctcctaaagggttgggatcacaggcatgagcccctatgcctggccctcttttccactttttagcaaccgtttattgaatactgtatgaagcaagatgctgcaaagtactgtgagtcctcttcaaaggagctcaaccatcatcataggttcaacttatcaggtttggtcttggaaggcctaaggcctatacgtaatatcacccaacacatgggttcatcctgccacaaatctcaggcctcaggagtccgcagatatttagagttacctcgtcaaacrttcacatgtatcacaagataatgttggacaagtcaattccctctacagcgaggatttcagagcattcccttgatcccacatgccaaggattgggatgaacctcccggggtctgaaagatgctagcccagcaaatttttctgcatacagaaaaattcaaggagctgtcattttgagaattaccaaaaatagctgtaaatcattacctagacaatttgaaacaagaaatccttcctcagcaatacaactgttgctgttcaagcttgaaagatcatccactatttgatgctcgtgaaaaatgtgcaagtaaaactaggtcttcattgaaaaaaaaaaaaaacagaaaaaggaaactttagtaataggttaaacatagctcttgtttggtatacaaacatgaactagataaggagcaggaaaatgggattatgtatttaaggttgagttgaagaaaagcggtgtctagttatctaattaaaaaatgagtaatttaccttaacagcaaaactacaacttctaatgacccaagaggtgaatagaattttggatattctatgatttccataaacttccctgttatgctaagaatactcttctctgccaatgtcaaaagttttcacactcgtatttaattgagtttatttgctactaatattaacgcacttgccagtcatttttagcacatttatcttacaggaagggactcatacacacattgaaccagtcagtcaaggaattactggaacagcatgctcgttaagagctgtttactttggtgataatatcatatattaaagccaaataggcatggaagataaaatattatttcctcatatttgaggcaagagacataagaatttaggtcagggggaggtgaaatagggaaattattatcttttagattcataactggaagatacacgggacttgcctagaaaagctgctttttcattgtccttccttttggggcagaacgctttcagtagtcagcaatcatgtggttgagtttgaaactgaccagccaggaggttgtgggaagctgttcattgacagcatcaagcatatgggatggatgcttaccaagattgttgtagaatatttaaacatggaagattggcttaaacaacttttaggttccttctagtcttaaggttctatgatttcaaggcctgtttctctgtattgtaaatactatttggttgcagaaactacccaaaatcctttttgagcccccagattaggcttaaatgacatatagctggatcctgttgccacttaccaatgcagaacattcctggaatcatctgaaaatcaaaygaggaagagctaagagagtatttcctctttcctgcagcaactacccaatgtgacacaaatggaaaagtaaataaatattaatagtctctgaagacagactttcattcatctatattgactatacttaaatgaaaataaatacgatccttttttatttctctccttcagctttcttctctctctactgcatgtttcccattgcttgtgactatggtactcttggactaaatgttattctagttcctcctcccaaataaagatgtactttatctccagtgatgtaccacagacgttgaccataatggaattacaaaagcagaaaatccacctggttaatgctttgaaggacttacattaactaaattattctaggaatgtctgataaaatttgcttcccaattgctttccaagaaagaaaggaacaactattgtttgagtctcttgttgatcatgtcctactaaaaattataatgaaagttaatgaaaaaaagatttgttttagagcaaagtacacagaaatctttgaatttcatcagttgaataatttccttgtgctactgtgtcattattatttatatacatgatttcaatttgttaccatgcaaattttaattccaattgaaaatgaatattctcttagaccatcatgggaactttaaaaaaatgtttgtgaaaagaggatacaaacagtgcttattctatggaccatagaaaaatgcccccttaacgacagctgcagcaattcatggacctctatagctatgacacataatttagagagtgaaacaatgctatacagcaattgaagaccaaatgtgaaggcaaaaactgattaatttctaaagagatagtatgccccttttagagaaaaggattaaacttctaaaataatgaacttgttattcatgaaaagaaataaattctaataatgggctagcctgttagaacctgctgctcttattcaggacaaaaacatgcacaacaaatgctacaacacaacctttgaatagaaagcattgtgataaaaacatgttttttcattaacgaataaaatatgccctttcccattaaaggtttgcatgttttaatttaacagaagaagtagaagttctatggtgaatatcaagcataataattgagtttggtgaaaaggaggcctgaaacctactgtcagaatggggcaaaataggttgaaggctgagtgtttcaaactcttgcccaataatataagtagtaaaaatgcaagtagaaatgaaaagctttactgcttattctttgtctatacttgaacacttgaggaaacccactcataaaaaagcatgggcaataaaataaagataggcatagtgtaaaaacaattataattaaagaataaaaattaaccagtacttaaggcttcatttcccccagctaagctgtaacctgaaattctttctgtataaattcattcctttagctctagaatgatgttttaggttcaagacctccttacaaaaatgcacttaccctcaggaggggcaaatccttatattattagcaaaaacatgtcagcagagattataatcatgttttcaatcctagaactgggacttcccggaggagggaaagggaatgtcttaaggggagagaggagccaaaaacaaactgtgcytacttcactaatttgccaagaccttgctctgatggacagacctgaaaaaaccatgaatggagccaatgcaaattccctaagaaaacggcatttagtgtacagcatgggaatcatacattatccgcctctctctactagattgtaagaccttgcagggaacaaacagtggcttaaatgtctttgaatccctggtaactgacatacaatgggtttccaataaacgtgtatttttttttcattcagggaatatatatattatgaagccttgagaactcaagttaccgagcttagtctcatttttaaaactgccaagaaggcagggtgataattatgcatttgaagtgggaacgagataatttcacttgtcacatttagctttgtccagattgcttcctataaggggtatacaggtttatacctgggcaaggcatgttgataaatatgtcctcatgcgtagtggtcatctcctggagatctattgtaagctcaaggaatgtgggtcagttatggacctgatgataaataacaacaacaatagtaatagtaactaacactgagtagctcttactatatacccaggcaccattctaggcattgtataaatattaactcaattcctttacacgaaaaccccatacagtaggtataactattattgcccagtttcacaaaggagaaaacaaaggcccaaagagtttaagtaatcggcccaaggccacaaagccaataagtggtaaagctacctgaactccagcagtctcactctagcatcctcatcttaacccctaaactatgccattgtaagacccttggcagaaggattttgaggggtccactttggccaagtctcttcgggatgacacttttataaataaaattggtgtgtcctcccaaaacttgtcctttaagtaagagctgtccaggacagagtcgggtttggactcatggtgagccacttcatgagtgttctgtgcttgaatggattatcggttctattcctctggaagaagccaagcagttttgaagacaggtgaatacagagagactggccccaatttcccacacctggcataaagttcaggcaagtaagggtagagaatactttttgatcttcactggttctatgtaaaacctttctatctgcgcactggagattctgatgccttctaggggaatttccaggccactgcaagcctcaacaagtccttactaggaactcctttgaatacatttacaaacagagatgacagcaggaatgtaaataaactctaattaaagatttgctctttgtggatagcacctcctttatgttatttaccatccctattagatacgatctggtaagaatggtaataggtagtgtgatgacttctagtcagtttaaatctagttatgaagaataagaagtacactgtgcataaccgaatgatttaggtaaatttttaaattgaggttgctggcttatttccattttttcatgtacaaaattttatatgccccaaagctttgaattatttatctaagtccaagttcatctgtgccatggcatatgctacttaccataagaaatcaggagttgaagagtattcagaagtgcaagtgtgcatgtgcatgcacacgtgcgcgcacacacacactcacacacaaatttccaaatgcgaccccatctgtgtacattgactggccacatctgtatacatctatatatatacacggtgggcactgattccgagactgcttaaagttgtgattcagtagatcttttttttttttttttttggtagtattacagctagaactaagacctaaagtcaagttttgtggtttatctttctctatacagcatggccacttttgtaaaaattagatgattagccaaaaatgaaataaagcaaaaacaaacccccaaacccacccatctgcaggaaggaaggcagaaactgctcaagggcagagaaaagcgcagcttggccttttcaaataaatcacaaaacacgtttgagtttaaaaatagtgttgataacataacctcacttaggctgggcgtggtggctcacacctgtaatctcagcactttgggaggccatggagggtggatggcttccactcataaattggagaccagcctcggcaacatggcaatacctcatctctacaaaaaatacaaaaattacccgggtgtgctggtgaacacctatagtcccagctactcgggaggctgaggttgaggatcccttgagcctgggaggcagacgttgtaatgagccgagactgtgccactgcaatccagcctgggccagagccagaccttgtctcgaaaaacaaaacaaaaacctcacttaaaaagccaagtgaaagaaggttttaaaatatttccattattttaggccaggtgctgtggctcatgcctgtaatcccagcactttgggaggccaaggcgggcagatcacttgaggtcaggatttcgagagcggcctggccagcatagtgaaactctgtctctacgaaaaataataaaattagctgggcatggtggtgtgtgctgtaattccacttacttgggaggctgaggcaggagaatcacttgaacccggaaggcagaggttgcagtgagccaagatcgtgccactgcactccagcctgggtgacagagtgagactctgtctcaaaaaaaaaaaaaaaaaaaaaaaaaatccattgttttaaaactatataattggctcaagagtattttttgcaagtgagcagtacagtttaaatttgggctgagtaattttaggtaggagtctgtcttactcttcagaataatgatttcctagaacaaaacaaatctctcttttgtgaggccagcgatagactatctttattgataactgtggactttaggttcaaatatagcatcttttgggaaaccttactaccaaaattacctttcctgctgtcggggaaaaatagtgaaagactctgaaatccactccctgtgcccaccaccaagagattaccaagtgtgttaccgcagcacaccctygctaggttttcttggccttttatcatcattcagctattttacaactctgtaagttgtaggaaatgattaataatgcaaataatttctgtccatagaaatgcaaatcagttgtgtctggtagaatgcaattgatcattgcccttcatattgacttgttttgcatctatttgtaaatacatttcagcattattttttttttgagacacagtcttactctgttgcccaagctggagtacagtggcactatcttggttcactgcaacctctgcctcccgggttcaagcgattctcctgcctcagcctcctgagtaactgggattacaggcgccaccacacccggctaatttttgtatttttaatagagatggggtttcgccatgctggccaggctggtctcaaactccttacctcaggtgatctgcacacctcagcctctcaaagtgctgggattacaggcatgagccactgtgcctggcctatttcagcattctttatttgcctatatatgtgtgattctttgaattttcctttgaactgtttgtaatgtcttactggcctgtcattcattaatgagttaaatacatctttgactcatgttcgttttatatatatatgagagtcatgacctttctttttacaaagttattttttaacactaccatttcttacccttcacatgttacctaragttttttttttaaatcaagaatacttgaggatttacttctaaaaatggaattttaacatgtttcgtatagtggggttggaatgcctcatattttcacaagattaattctactagcttcctcttttcagtatcatcacgcactttatcttccctctggggactgtaataaatatttctgccataaaaatgcaaatagcattagactaagaattgtaatgcccaggaggcttaagaagattacatttagataagatcatactgttaccaattatgagatttttttccatcattactccactctatagaactgtttcttattctttgtttccaataggttttaaaaattatttctgactactggccttttaaaaatgatttctgtccaacagggatatttacttgactagatcctacaagtgaactgagctggtgtatgggcttaacttggctgcagatttgcatgtatgcaatggcaataaagtaargcactctgattttaagacatttatttcaatatatctaagacttcattgcattagaatatcaaattggctccttttctcctttataacagctatagtttgttcagctgcaaatatagagcaaaagatgatcaacaagtattacaacaaaaatactagatttttgctgtaattcctgtctatagacagacttttctataatactatatgggaaactatctcaatacacagccaagtaatttgaaatttctttcaagccaaattgctactaggtcactatgctcagttactaagacagtagctacatagtcattytacctactccatctttgttcttcatttgatctcagtcttgttttcataactttcctttgcacttgtctttttatacttaaactttcccaaggtcagaaagcaaatcaatgacagaatagggaacagaactcccaagagattcctaaaatattagaagttccatcttagaacagtgatgtcatcaggattttttttttttttttgcttcccacaaacacctaaaataacttcttataatagaatctcttggagggaaaaggggattacatcgatttcagtttcttagtacctatttaattttaataattttagaaagaggcagcaaaaatagaattaacaatatataacttctagtaagccatttaaactcttaatacaactattaggcaagaacctgggaaactgcgtgaaagcaaaaaacgagtagaactaattttgtaagcaacttatctgtcaagtagtgtttgagaatgaaggaaggtgttgtagggttttattcactgtcttctaggatttagaagttgttataattagttggggccaggtaaattctattagaaatgctgtagggattattaagtacttttcacccgttaagattcatttgctcaatgtgtttgcatagtttctggttgttttaaaggaaaaaaatttcttgtcacaggctactatgcattctcttacaaagatttttttaaagatccagtctagttcacgtttcctgctgtttcccttctttcttgacagcactgtctgattgtcactcagtattctatacagggcacagggtattacaaaagttgacatgtttaagataaatgagcccctgattgtagtacaagaagtcagttactagggcatgttgtcttccattgttttttgttgttaattcattcagatgcttcttttcatatcgggaaattgtttgtttctaggtgaatcttgtaaaacacagtcttcattattgagtatgcacatatgaaaaatgaaggtggaatactggtttattaaaaagttacgcttgtttagaaactctatcagaatacagagccattcagaaatctgtgactatctgtgtatggccagaaacaacagccacagctattgaaagaattggttttcttcaatactcatccatccaaaagctattgcttttgaaatcagtcagtttaatgactggtcttgaaaagaaatatatttattytgtaaaattcctgtataacccaccatgtttgtttttctgtttttgtttgggttttttttttaagctattgatttttttctaactgagataacattcacgtaacataaaattcactatttttaaccattctagtgtacatttcagtggtttcagtatattcaaaatgttgtacartcattaccaccatctaattccacagcattttcaccactccaaaaagaaatctcatgctcactaggcagtcacttctcattcccccttaattgctgrtacctgccaatcaccaacctattttatctttatggatttgtctattctggggatttcacataaaaggaataatacaatatgtggscttttgtgtctaggtttcacttagcacagcattttcaaggtttatccaaattataacgtgtatcagtatttcattcttttttatggctggataatagtccattgtatagacataccatagtttatccattcatcaagtgatggacatttgagttgtctccactttttggctactatgaataatgcttctatgaacattcatgtacaagattttgtgtagacatgttttcaattcacttgtgtatatactgaggggtagaattgctgggtcatatggcaactccatattaaaatttttgacagggttgggcatggtggttcacgcctgtaatcccagcactttgggaggccaagatgggtggatcacctgaggtcaggagttcgaccttcaggagttcagccttcaacatggtgaaaccccgtctctactaaaaatacaaaaattagccgggcatggtggtaggtgcctataatcccagctactcagaaggctgaggcaggagaatggcgtgaacctgggaggcggggcttgcagtgagtggagattgcgccactgcactccagcctggaagacagagcaagactctgtctcaaaaaaaaaaaatttttttggggaaaatgccagactgttttccacagcagcagtagcattttacatttctaccagcaatgtatgaaggttccaacttttccatatcatccccaagacttgttattgtttgtctttctgatcatagccatggatgtaaagtggtatcacaatatcgttttgatttgcatctccctaatgactaatgatgttgaatgtcttttwatgtgcttattggccatttgcataccttctttgggtggctcaagaccagtcattcaaatcttttactgattattaaactgggttattttttgttttgttgttgagttgtaagagttctttatacattctggataccagaactttttcaaatatatgatttgaaagtatttactcccattctgtgcattgtcttttcagtttcttgatagcatcctttgatgcacaaaagtttttcattttgatgatgtccaatttatttgttttatttgttgcttgtgcttttggtgtcatatctaagaaaccattgcttaatccaaagtcatgaagatctacacctatgtttctttataagagttttataattttagctctatatttaggtttttgatccattttggttaatttttgttaattttggccacaaatgtataagtttatttctgaactctctctcccattgatttatatgcctatcctttggccagtaccacactgttttaattactatagatttgaggtaagctttgaaattggaaagtgtgagttctccaactttgctgttcttcaaggttgttttggctatttgaggtcctttgctttcccacctgaattttaggttcagctggtccatttctgcaaaaagggcagctagaattttgatagatatcacagtgaatctataggtcagtttggagagtattgtcattttaataatattaagccttctaattaatgcatgaagtcaaaatgtctttccctttacttaggtattctttaatttttttttaacaatgtttcagggttttcagtgtatatgccctgcatttggttaagtttatttctctctattttattcttttttgatgctactgtaaatgagattttcttaatttcatttttggattgttcattgccagtgtataaaaatataattgatttttgaaatgttgatcttgtatcttacaacttgtttatcagctgtaatagttttttggtgaattcttaagagttttctataatctaagattatatcatytgtgaataaatataggcttacttcttcctttctaatctgaatgctctttacttatttttctagcctaattgccctggctagaacttccagcaccatattgaatagaaggggtgagagcagacatccttgtctgattcctgatcatgggaggaagtatttggtttttcaccattaagtatgatgttaacaggggacttttcatggatgacctttattacattgagaagttcctttctaacctttattacattgaggaagctcctttttattcctggtgtgttaagttgaattgaattaagttataartttgaactaaaagacaaataggctacaggattttttgcctctgttcagcctatggaaatactatgatcctgtgttctctttaattttaatggctactaggttcttatctgggaaacaataaaatcactgcctttcagaaattctgagagctcactgagccagctaagttacatgcctgatagtgttgccctgatatggtttggatctgtgtccccatccaaatctcatgtcaaactgtaatccccaatgttggaggtggggcctggtgggaggcgattggatcatgggggctgtttctcaggaatggtttagcaccattccccttggcactgccctcaggatagtgagttctcaagtgatctggttgtttaaaagtgtgtggaacctcccctacccttgctgctgctcctgccatgtcaggggtcttgctcctgctttgtcttccgccatgattggaagcttcctgaggcctccccagaagcagatgctgccatgcttcctgtacagcctgcagaaccatragccaattaaacctcctttcttataagttacccagtctcaggtatttctttacagcagtgcaagaacagactaayacatgcccttagagatgcaaaattaaaaggcaagacacttgattcatgtttacttgtatgaattgcataatgtttatattatatataaaatatttaatagtataacaaatataataattttttccattataatatgtgagctatcttaaagctaaaatatattttgtcttggtttttgaaaccataatcttctctatttttgttctacctaaagactaggaaaagagctaaaaagatgccaaattagaatcccatattacaaaaaaatcttttatgagttaacaaatattatagcccttttatatccctatatgtgtactaatttactattttattccattaaaatatttacattgctaagatgtaatgcaatcgtagtcccaattatattattaaggttttgaatgtcaacatcaacagatcttgttttccttactatttgaaatggctgtgggtttttttccatcttctggaattattataaagagagagagagagagagwgtgtgwgtgtgtgtgtgtgtgtgtgtgtgtgtgtgtgtgtgtattttaaccttacgtgtcttgtcactaaaaatttcccttgcaagggagaataaggacttaaatcacagtttatcttctactgaatataactgtttcaggacaaattgaagtatgcttccagctattacaaaattggcaagacacaaatgaaataccrtggagacacgatttgtgcaccagaagtcagatatctatcagtaacctcagcttttctctttccatatagcttccttctccccatgaacccattatattagcagtgaaattggaaggccaggtcttccagacacagagatctgactccaggttcccagctattcacagatggacccaaaaatgttatactgaaaaggaagtattcatgagaaaatttgcaaagtgagatatgccttgaatatttggggagtactttatagtaagaaaaaagtcaaatatgagttattccttcccaaatttatagaacaagtatttcaaacctgttagattcatttttgcacttttrcartgccccaattttgacctaaatatatatgttttctggaaaaacattcactttctggaaagcatgttcatgaaaagttaaatgaacaaatattatattttggagactcaaccttactttcccattggcttctatttcacttttagagatgtcagctctgataccaacattttacctctcaggtatttttatcctttcacctctctgtgaaataaaggcctataaataaatatctaattgttctggggaaactcttgaaaggaaccccacaggaaatccttccatgggtgccaagattattttagaatgcctctggtcccaaagtcttcttgtttcctaatcatcagaaacagtaatcctgggcaattttttccattaaaagaaagtatatcttactgtgtggagagaaaacacagtcaaaacactaacaatttccagccatgaacgtgaatttggcttgcccttctattaggaaatatgaggtagtaaataaagtaaaatcaacattctgtacaccttctatagcacctgtggttactcagtgctaagggactaccagcagaactatgccatgctaacacaggagcactgaaataaggattgaggataggctcacactaattgtatcaaattggcaagctttacattttgttaatattaggaatatgttgcactcctttggtgacaggattacctattcctccagatcctaatgtgacaaattaaatgatagaggttgctggtgcttttcatcagcagcaaaaatgatttagggctagagagggaagtaaaggatggtagatccagaaattcctcttcctaataaaaccatagatatccatacccctccaaagatagtcacttctaaattatttactttgtagaatatccaaagtttttgcttttattctttctctttttcttccctttggagccatttcactagctgttaatggaagagaatcaatgctaatttctggtgacattgaaatgtagaggacttggatagtttacctatccttgtaagagcagtcataccttctagggttatagtaaagatggagtgaaataatgcagaggaaagaactttataaaatataaaacagctaggccaggcatggtggctcacacctgtaatcccagcactttgggagggcaaggtgggcagatcacctgaggtcaggagttcgagaccagcctggccaacatggtgaaaccccatctctactaaaaataaaaattagccgggtgtggtagtgggcaactgtaatcccagctactcgggaggctgaggcaggaaaatcgcttgaatctgggaggcagaggttgcagtgagccgagattgygccactgtgcaacagagtgagactctgtctcaaaaaataataataaataaataaatcagctaacctttgggggtgagaattgtctttactctctcacttccctccttagtttagattctgtggttatgatgatgatcagtcccttgaacccagcctcatcgcccctgccctctccaatcctttttcccctccctctcttttctctgttcttggcacgatgtcaaccctggttagatccaagtctttcacagtgcaacaccaacaaaaagagaatgggctttagtgtctgacaggtgaatgtaattgtggctctacccttcgttcgttttggggaagtcaacattttcaagtctcggtttcgcatctgtgaaagaaaataatgatactccatgtagttgttatggagattaaattcaataatacttgtagcatgacagcacaagacctggcacatagtaggcattcagtaaggggtaactgttgtcatcagtatttataatccatgatagtttttttctgtgctaaaaccgaaaactaatttacagatgtacatttccaaacatacatgcatgttttaccatatgaagtattttaaaatcctgattttatagtctaatttaataactttattgttttttaaatctcctgttcgtttccttaataccttaaagattgaagagctttcttttctctccctttctctctttctttctttcbctttctttctttctctcctttctttctctctctcccttaaaatcctgattttacagtcaaatttartaactttatcgtttttaaaatctcctgttcatttccttaacatcttaaagattgaagagctttcttttctctctctctttcttcctcttttttttttttttttttttttccagacaagagtttcgctcttgttacctaggctggagtgcaatggcgcaatctcagctcactgcaaactctgcctcctgcgtccaagcgattcttcggccccaatctccggagtatctgggactataggcgcgtgccaccacacccagctaatttttgtattttagtagagacagggttttaccgtgttggccgggcagatcmctcctgacttcaggtgatcygcctgccttggcctccgaaagtgctgggattacaagcataagccaccgtacccagcctgaagagctttctaatgatacttttggcttattcatagaacatgaataaaatctaaaataaattttaaaaagaagatgaaaactgtagctttaaatctgtccttaatttataaaacatgacatatgatatatgaaaacataaatacatgaatgaatgtatccggattccttgggaaacactttcataatgagactatatgaatgattctaaaacctgccttatacagctaggtagctaaggaacattttcctcaaaccccattatatggttccacagatctcagcatttaccctcagacttagacgcatcagtcaaaatattgaccatcttttaaaataagctccaaattacaggagaaaaatctgccttaacaagtgcagctcagggcatttaaatatttctcacagtattctaaggcctccatgttatccagtggatgataattgaataaaataatgaaacattccatattccctcttattaccattcatcacccaacagctgtaaaatcaccagctgctaggaaaaagagaactaaattagtcctctacagctgcaaagagaaaaaagcttaagatctcttcacacaatttccgggattccagcaggctggagtcaaagcacagttttccttgccacaaaaccctcagccttgtaaacatgtcaaacagcacataagctgtgatttatttttgtcattattggcaaagaagtgtatgaaggagaagagtagaggtagctgagataatacaatagaatcatgacagcaatgtaagtagtgtctaccatatcccgggcacagagcatcagacttttaaatccttaccataactacaaaaggtagatattatcctcattttattagagaactgaggctcagtgagaccaagtaacttagtaagtgctgtggtaagtcagatttagctgtgtttggctccaataccagggtcttaatcatcacacagttctgtcttccagtaaaatagacagatgaaggaaaactgaactggtgagactaagtggaatggatctggggagaaggggaaacatggggggaaggtgatgctgttttaaaagacacrggagggggccgggcatggtggctcatgcctgtaatcccagcactttggaaggccgaggcaagcagatcacttgaggtcaggagttggagaccagcctggcctacagggcgaaaccccatctgaactaaaaatacaaaaattagccaggcatggtggtgcatgcctgtcatcctagctccttgggaggctgaggcatgagaattgcttgaacccgggagggggaggttgcagtgagccaagatcacgccactgcactccagcctgggtgacagagcaagactccatttcaaaaaaaaaaaaaaaaaaaaaggaatgtattaaggtaaatgaggctcctagtttgaatctcttttcctattcttttcgatagtttaagaaatagggtgccatttccattaacttccctaatttgctatcatcagccataaacaattctagcccataaaatcaggtttcattaattactcattttagcaacaatattagccacagacgaactggcatagtctgtaaagcaatggttttcaaactttagcaagcattagaacacctggaggggttgttaaacatagattcttaggcctcatctctagaatttctgattcagtaggtctggggtaaggtttgagaatgtgtatttctcacgagttgccagatgaggctgatggtgctggttcagggaccacattccactgctgcaaataaaaactgtgctaaaaatttagatttgtgtgcacatacctatgataagctgacctgcaaaagaacagcatttcttaagaagctaccttccattctgcaggcacaatcagatttcagttcttctacagccgtgtacataaaataaatggcgtctagagacacacaaatgtgggacaattaatctatgcctatgttcctaataaggcaaaaggctatactttcaatgtgcaatatgctcagtgaagcaatcataggaattaaaacatcacattcaggctgggtgtggtggctcacacctgtaatcccagcactttgggaggctgaggcgggtggatcacctgaggtcaggagttcgagaccagcctgaccaacatggagaaaccccatctctactaaaaatacaaaattggccaggcgtagtggcacatgtctatagtcccagctactctggaggctgaggcaggagaatcacttgaaccagggaggcagaggttatggtgagccaagattgtgccattgcactccagcctgggcaacaagagcgaaactccatctcaaaaaacaaaacaaaacaaaaaccacattcaaaggaggcaaccatttccaaatttaatacaagctcttttctaattcagaaaaaagtatagataaaagtcaaatacacccaagcttaggggtggaaaaatcgaaaaccagaataattcacatttccaaccgtggctgctattggtccaattgcttatgggttcttttttcttcttttttcttttttctaaagagaatagggatagcaagaattgtgatggaactggatccctggaagtcaacatagtcttggccacttaggctgttttttaccccctacctggccttatccacagttttggcttggcttagctccattcaaacacatgcttagtaatggcactaggggctgctaccactgctgcacaaattgaaatcagyatgaaaatggaatagaaagatgtcagcaaactaatattattttaaaaggaaattgcttccaatttcaaagcagcaggagattagtaagaaaatgaggtttccgttccatagggttttctaggatggagatgtctcattctaacatccttttggaatggaaaaacacttactgtatagtctcctttacttggttatcctgaacctctttacaggctgataattttcttgctggcagtatattgtatagaatagttgtattttaagacttcttcaaaagtgtctgttagctttgagtaattatccattgttgaatttggcagaacaaagagaaacttctagaatttttatcttcagccttagaaagtgttgttaactctgaaagtttatatttagaggacttactttaaaaaaagaaagtawtacttttaaatgcctgctcatgattttttttaaatttttatttatttatttatttatttatttatttatttatttttttgagacagagtcttgctttgtcactcaggctagagtgcagtggcacgatctcggctcactgcaacctcygcctcccaggttcaagtgattgttgtgcctcagcctctcgagcagcagggaatacaggcgyccaccactatgcccagctaatttttgtatttttagtagagatggggttttgctgtgttggccaggctggtctggaactcctgacctcaggtgatccaccygccttggcctcccaaagtgctgggattacaggtgtgagccactgtgcccggccacctgaagtttttataaggcccttgagaactctggcactttgttgtggttgatcagagccatgcaggtagtctcataggtccttcagtccacaaatattgagggtccaccctgtgccatgttatgggggcctctgtcattttgctcaggactctactctgaggtggtcctgtatggcttggattataagagacagtcgaggaaacaaaagatctgcatgctctcctttcacaaattcactaaaatgtcatggcaaaatattttgagcactctacctcacataaactttctagttcacagtctggtaggttgacatgtctctaaatatttgttattttctgattgaatcctacctgaacccagttaactgagatacactaaatcatagcacyctttatttgaaacaatactgtaggatttcaaagatycatcagtgtctagaaactagcaggtatctgttgaatgaatgctgcattttcttcaactctgggagcctggattaacttctacaagtaatagcactgtttctattttggttactttctggctactgtcctagtcattttagttaccctgatgctgccccagcgactcagcccagccagcacaaactgtcctgctggctaactggatcatggctgctggtggcctatcgtatactagggctgagagaaagaagaaagaatagggatgtctaccctttaggaaatgcagtagcatattctgcagccttttccattttattcattttgctttggtttgctcagaagtatcagagcaaaatagaaaatcaaataattggagcgctcatccttattttctccttgcccaatccccatccatagtctctggatgtgtcccaacaaggtgcttactgctgagccactctgtatcttttctggaagtcggggaggtaaggacagataaacaatgacactaatttttcatcatctccctattcctatgttgctatcattcaaccaaacacctactgagcacctacttctggcccaggtaatacacttggtcctgaggatacaaagatcatacagttcctcagagagttcgtggtctcctgggggatgcagagaagtaaaaattcagaggaaagcccaggagatgtgtgaacctagaggaaagagagtttaactctgccttaggtgaagagggggtcagtcctcttcatggaggagaatttttattcattctgctggctggacagcaaagataccaggcataaaatcgaggttcttatttttccaactttaaaatctactccacaatggtccccatttactgtcaaagctggcttgtgtgtgataataccactaatataatcatgccatcctctcactcctgctcactttacactttatatctgaaggtcacagtactaaaaactggcatgggtgttttccaaggaatctggttatcaggcttgactacaactctaaaactgaagattaaaagacaagttaacaggcactttataggatgagtatggagtcggagctgtgatgggcagaggaaaaaatcagcagcactatgttaagcatataccaaccaatgcccaaagctgaaggtaacttatgatttgtttttcttaggggaggacttgtttcacctaccatgtggaatgttcctggggccttgacaggtctgaagccatgaacaggtatgcattgatcagcgtggccattgcagaagcagctgcccttgacaatgaaatcatagattgcatagtgtgtaaaatgttgaggctcttcgttcaggtcatttctctgacagggacaagactgtcgtttcagcagctgcacgcgaaggttggtgatcttcagctgctcctgaactttggcactgtaagggttctctgtatcgtrtggtggtgacaaagctttgaaaataacctgtaaggagaaagaaaataccatgcgtttataggactgtgcgcaaaccctgaattgtttgcctaatgtagtccctgtttgatttatgccttatgtcatctgtgaacgataagataacaagaagtttttagaccttgagcacacctgggacagagcygccctgttattctaaggagcagatgtgctgcctgtttgtacacagaagtatacattgagtgaccagcagagacctgacccttgagataaaggcagccatacaaagatcttgccaggaagagcattctgggcgagggaagagcaagcttaaaggctttgaggcagagtcaagcttggcttgctcaaggaagaacaacgaagtcagtgtgactggagaccagtgaacaaagagagagtggctggagaggcggacagagagcaggtgtgagatagacatgaatggagccctgtggaagtcacagtagagttatgctgactgtagcggaagccactgggacactgtaggcagagaggtgatatctgatttaccttgcctaaaaatataactctctctttttggatataaaagtatcaccttagagatcaatttcataccaaaagtatgaaaaggaaagaatcgactgtgtcacatgtccaaggtctactggtacagacctgtcctcagtgaaatataactatgggggagagggtaataattcagcagacatttggcctctgcagctcatggtctagccagtagccagagtggttctctataaacagagattggatcgtgtcactcccttgcttaaaccacccccacctgaagacctcccattctcctcagaacaagatgcaaggtccttataatggctctgcctggtttctgttcttagtacttatcaccatctgacattatatttgtagtggtttagtgatttactatcttcccagtccagaccaaaaacttcatgtaggcggtcacgtatgtatcccaggacagtggctggcacatagtaagtattcaataaatttttggtaaacaaattaattaatttaacattgttcttggcatttgtgtaataggtgagaattccaaataacttccttatgtcgggtctaaattcattcgcatactgaatttcacgttaaacaccagtattatgacaataataagaaataacggattaaccggtatttgtatttctagctatttttgaacttttaaagcttaaacaacattgtatcttaaactcaaaccacattctgtcccatttatccacatgcaaagtggtggaaggaagcttatcagaaaataaaattttccaacaaacaatatgtcatatattcaaaagtcagtacagaagtaacatctttttcttttaacaacagctagaacatgattttctgtttcgaagcattttttaaaaattgaatccattatgggctttatatggaactgattctcaacgtgacctccaaacactgacatttctgttagacaggaagaacccttgctctaaatgatatcagtaaagtgctacctcctattttatcaaccacagtaatgcaaggacatggaaaaggacacaccagtgctaaccaagtaagagctccactgaaaagtctgtggtgtccttctcctcgttatctgcccacccttccttttcctgagcctcggtggcaactgtttggtctctctctgtctctgccacgtatttacccttgacatttaccctagttccctctctcaccccattccatctccccctcaccctcagaattgttccgcacaggcaaagccagaggaagctctgtcaaggtctgtaggaactttgaagctcttctgcttcctgagcccagacagtgggagctgaatggcggctctgtgcttggtgtgcatgacaccacagttggcamgcggatatcagtagggaagggacatcatgacccctgaggctgtgtgctggaaaggagacagcagagtgccacagacacaaaagtgaacgggaatttaaaccatgaaatcttttttccagaaaggagacgccttaatctgataccctgggaatggatctaccctgcgtcaggaaacaaagagtscgccartacagatgcttccaacttctggcaggtcgccctttgggtcccacccagtttttcttcaaacttccccagaagaagcctgtatggcatgagtgaaatgaagtaagaaaacacgtagaagccctcaggatagtatcagcctcttctgtgttttgttcccataaggaagggaatgtatctataggcccatcactgatcctctgtctacaactgcctcttaatacacactcccaacaagatatattaatatttagaaagtcagggattgcgctttttgaccaggttcaagcatacttcagtatttctggctcgttagtgctattggccaggacttcatgatctcattttttaattaagaacttttattatgttttggtggttaatattatgctcattacagaaaaatcggtcatgcaaaatattaaagataataagtacctacaaagtgatctacctccaaagataaccagggatgccaacttgataatatctttctacttaaacttctgtatgtatgcatacatataaaatacaacataaacatctttatataccttgtgagtattcttccaagtcactaagtgtatctctacatcagaggttctcaaagaatggttccccagaccaacagcacccctagggaacttgttagagatgcaaattcttggaccctatccaagatcaactgaatcagaaactctgcaggtggggcccagcaatctgtgtttcaacaagccttccaggtgattctgacacataacaaaatttgagaaacaccgttacataattttaaaacctgcttagaattacagtgtgtggctatgacataatttatttagccaggctgctattgttaggcaactaggttgcttccagcttttcagtgtaacccactgcagggaacaaccttgtagctaaaatgtggatgtacagacagtagtccgcccttatcctccgggaatgacttccaagacccccaagggatgcctgaaactgcagacagtactgaacccatagagactatgtttctcctatacatacatacctatgataaagtttaatttataaatgaattatatatgatatataattatatatttattatatattaaatacaattatatataattcatttataaattaaactttatcataggtatgtatgtataggaaaaacctataatgtaaattatgtataaatatatatatatatatatatatatatatatatatatatatatatatatctcctccatgccaacctggaggattgttatatcctcttgatgaagtgactgttttatctatgtatgtccctttttatccttggcaatattctttgatctaaaatctactttgatagtaatatagccactcaagctttcttttaaagtgtttaatatatatatataaaaattatatataatttataaattaaactttataatagcacagtaagagattaacaacaaataataaaatagaacaacgaaaaataaaacaattataacaatacactgtaataaaatttatgtaaatgtggtctctctctctctctcaaaatatttactgtactcgcctatttttggaccatggttgatggttactgaaaccacggtaagtgaaactgcacataagggaggactactgtaataatttcctgaagatacatttccaaagctgaaatcaatgggtaaaggaaatgcataatttaaaaaatatctgaccctctgaatgaatcatggaccccttcctacctaacctttggaatcttcacattttcctggtcttgccttatttctctaagcctcgaatcccttgaactttgcctgaggatggggattcttggctcaggctctgccatttctttgtgccccagtgtaacagagaaatccatacaaagtcctgaacaggtgaaaatgacctatatgatctttctattctagaatactcataaaaaattctcaataagaagatggaaaattaggctaggtgcggtggctcatgcctgtcatcccagcactttgggaggctgaggtgggtggatcacaatgtcaggagtttgagaccagcctggttaacatggtgaaaccccatctctactaaaaatacaaaaattagccaggcatggtggcgttaaaaaaaaaaaaaagcatgctatatgtcttatttatgctttgagatgaaaatttaaacagagcatcaatacagtgtgaacagaataaggaataaatattaggtacataatagtcaaggaattctttgagaatcaaactcatatcttaacatattgctccatgcctaacattgtattgcctatgttgaattataaaaatttgtaataataaatgtgatcatatttttaaaaattctttttagctgctagcttgaggaataatattcaaggccgtcctgtggactcccttggaactcgttccttccatgatggcacrcttacactgttctattgttgttgcctatttacttgtctgtatctcacatcagactcagtgctcagagggcagggatcctgtttgtctggttcacagctgtgctccccagcatgtcccacagtctctggcacattgtagcatttcataatgactgctgaatgaataaatgaatcaactatttctccaagtatcattctaagaggagaagccaaacagggtctagagtttagaagaacacagatagcaagatgctcttaccacaagttccgcactcttgatgagaacgatgtgaacacacacatctatgtataaacactatgtaaaaatatgtaatacatttcaaaatgctttatggatttcttctcttcagtagcacacaagatctttcatattcttaagaaaatggatcaggcaggtatagcaaacactccaagaaatacaaatcttttccatagtttctgatctagttttcttatttactaaaaatagcaacttcaggaacataactgcatttgttctttaacagttcttaagatactagacacatcctcacattcttaaagaagcagctttttgttttaatgattttctctattgtttttctgtttttctttttcattggtttctgcttttatctttattatttactttcttctgcttactttgtgtttaatgtgctcttcttttactagtttcttaaagggaaaacttagatcattgatttgactttttaaaaataattcactaagcagtgaattttacttttaagctctgttggacttgaagatcattgatttgagatgtttctttttccctaggtacttcttcagttgcatccccccgaagtttgatacgctgtgttttcatttccattcaatttcaaaatactcctgatttccttttgatttcttctttgaataactggaataaaaagtgtgtttactccagttatttggggatttcccagataccttcctgttattgatttctaacttaatttcattgtggtcaaagaacatattttgtatgatatgaatccttttacatttatcaatacttgttttatgactcagtatatgttctgtcttgataatgcaccttgtatccttgaaaaagtattgaaatatccagctataattatcaacttattttatttctcccttcaggttttgcttcatgtattttgaagccctgttgttgggtacataaacatggaggattgttgctttttgttttttgagatgaagtctcactcttgtcccccaggctggagggcagtagcgcgatcttggctcactgcaacctccacctcctgggttcaagtgattctcatgcctcagcctcccaggtagttgggattacaggctcctgccaccacgcccggctaatttttgcatttttagtagagatggggtttcactatcttggccaggctggtcttcaactcctgacctcaggtgatccacctgcctcagcctcccaaagtgctgggattacaggcctgagccaccgtgccccgccaacatggaggattgttatatcctcttgatgaagtgactgttttatcagtgtatgtccctttttatccttggcaatattctttgatctaaaatctactttgatagtaatatagccactcgagctttcttttaaagtattagtagggtatatctttttttatccttttacttttaacttagctatatctttatatttaaagtgagcttcttataggcagcatacctaatctttttcaaaaattttgtccaatattataatctatgcctttaatggggatrtttacaccttttacattyaatgtgattgatgatatttaccacttcacatatagtataagaaactaagaagagtatactctcatttcctcccctcaacctttgcactgttgtcatccatattacctctatgtatatgttataagctccacaacacactgttaataccttggctttaaaaagccaactaattatctttaaagagattttagaaatataaaaaggcatttcacatgtattcacctacttttcctttttgatgatcttcattcctttttgtaggtccagatatccatctggtatcatttttcttctgtctgaaggatttccttcaatgcaaatctgctggtgaaaaactttttttttttttttttggcttctttatgtctgaaaaagtcttgacttcatcttcatttttgtaaaatattttttgctgggtatagaattctaagttgacttctttttttctttcggcactttaaaagtttctgcctccgctgtcttcaggcttacgttgtttccaacaaaaagcttttgtcattcttagatttgttcctctgtacgtaatgtgccatttttttctctggctgcttttaaggttttctttttaccattgctttttaaacaatttgattgttatgtgttttggagtagatttcttcttgtttcttgtgtttaaggtttgttgcacttcttggatccatggatttatagttattataaaatttagaaaaatttcaaccattatttcttaaaaatttttgttcccctcctctcccttctttcctttgttggttccaactacatgtaccaaattgcctgaagctgtcccagagctcactaatgctatatttatttctttttctggcttttttttctccctgtgtttcatattgggtcatttctattgctacgtattaaaygtcactaatcttttcttctacaatgtctagtctactaatcctgtttggtatgtatttttcatctcaggcatcagaatcttcaaaaatggtcattcaacttttttttgctatcttttccttgcctctgcttaatgtgctccatctttcttccaccttttgaacataagaaatacagtgataataactgttttaaagtcctcagctactaactgtatcatttgtgtcatttctgtgtctgtttctattgatttgtttttctttttattatgagttgtattctctgtttctttgcaggtcttgattagctgctaggtatcatgaattttaccttgttgggggctgaatatttttgtattcttgagctttttcttgggatgcagttcagtttcctggaaatagctggatccttttgagtcttgcttttacattttgttatgtgggaccaatgcattttctagcataaggctaattctgcccctctactgaggtgatactcttcgaattactctaacaatgaattacaaggttttccacactgtctgttcctggccccatgttacctctggggattgttccctccctccttcagggtgtaatgcccaaccttgtttttactaaccctgttcttagtctctccctttcctttaatcacctagacttgtttccacctgaattgattctcccttagctaagagagccagacagactccatcttggctctttcactggcagccccttcctcaaggacttaacttgtgcaagctgactcctagcacatccaagaatgcaattaactgataagatactgtggcgagcaatatctgcagttcccaggaattcgtccgattgataacacccaaagccccgcgtctatcaccttgtaatagtcttaaagcccctgcacctggaactgtttactttcctgtaaccatttatccgtttaacttttttgcctrctttacttctgtaaagttgttttaactagaccccccctcccctttctaaaccaaagtataaaagaaaatctagccccttcttcggggccgagagaactttgagcattagctgtctcttggccgccggctaaataaacggactcttaattcatctcaaagtgtggcgttttctctaactcgctcaggtacaacaagggtgtttctctctctggcctcaggtagttttcttgcatatgtgttgaacagttctcagctggagacttgagaaggactatctgcaaatctctgaaagtctcttccatatagtgctctcctctgtggaactctaccttgcaaactctagctcccttggtctttcctagattctcgagtccttaagtcaggaaatccatcgagctctatctaggttcctcttccctgcactgcagactggacaccctctctaggcagtaagctggggtaattgtagggctcacctcatttgtttcccttctctcagggatcattgtcctcttctgctggaagttcaatactttaaaacaattgtttcacatattttgtccagttttttagtagtttcaggtgggagggtaaatctggtccttattacccatcctggatgagaagtgacatgtaaaaacccaaggcagcttaacttttataaaacacagtttataaaactgtacataaactaagcctttatttttgtactcaaatatatagaaatggcatattggatgttttataataaagttagaagtatagttatatttagtagatagaaaggcatgaaaaatcaataaaatatgttcctgaaaaatttgaaaaagaaaatataagcatctaaactttgtacatttattcaataattctgttttagtaatttgtgtctgaatataccagtaaactcccattataacttttcaaataatttgtgatacctattattatgatcgcctatatatgtatgtattgttttctttttttttcagagacaatgtcttgcttgagtctagtggcacaatcatagctcaccacagccttgaactactgggctcaagtaatcctcctgcgtagctgggattacaggtgcatgccaccatgcccagctaacttytttattttttgtagatactaagtctcactatgttgcccaggttggtctcaaactcctggcctcaagagatcttcctgccttggtctctcaaagttttgggattacaggcacgagccactgtgcttggactatttatattttttgtgtgtgtgtttatgctatgttttgatgcatccttatatatccccaacatctaatacaatgccttatgaattctcaataatgttactgaatgagtgaatctgaatcatgtcaatacaggtttattttgattttccaatataaaaataatggaataactataataaaaatttatttttataatgtacatttcattaataagcaaaaattctaggtacatattgcctcacaataaactttatcacttaaaaaatatcttaatttttatggtaatcttacacccccttcaacataactagcacaattttactttatagaaaaaatatatttaatatgccaggcatggtggctcacacctgtaattacagcactttgggaggctgaggcgggtggatcacaaggtcaggaattcaagaccagcctggccaatatggtgaaaccccatctctactaaaaatacgaaacattagctaggcatggtggtacgcacctgtagtcccagccactcaggaggctgaggcaggagaatcacttgaacctggaaggcagaggttgcagtgagccgagatcatgccactgcaatccggcctgggcgacagagcaagactctgtctcaaaaaaaaaaaaaaaaaagaaaagaaaagaaaaaatagatttaatattaatcagcttattatttattcattacattattcaaatatggcattgaaaaagtattaaatatttgaatattttcagtaataaatttacaccaactgcaggaatgactacaaacatttagggagaaatccctggaacttttgcctaatataatctaataaaaagacaaatcacctccatagtaaaacctattttcttttctttttttttttttttttttgagatggagtctcgctctgttgtccacgttggaatgcagtggcatgatctcggctcactgcaacctcccggttcaagtgattttcctgcctcagcctccagagtagctggaattacaggcacatgccaccatgcccagctaagttttgtatttttagtggagctggggttttaccatgttggccaagctggtctcgaactcctgacctcaggtgatccacccagcttggcctcccgaagtgctgggattacagctgtaagccaccatgcctggccctatttatatatataaaatcacatttcttccctactgtgtctaagcctggttggaataggatctatagtgagaaacatttccacttgtatttgtcaggcctctgagcccaagccaagccatcgcatcccctgtgacttgcacatatacgcccagatggcctgaagtaactgaagaatcacaaaagaagagaaaaggccctgccctgccttaactgatgacattccaccattgtsatttgttcctgccccaccattaaccctgtgaatttccttctcctggctcagaagctccccaactgagcaccttgtgacccctacccctgcccaccagaaaacaaccccctttgactgtaattttccattaccttcccaaatcctataaaacggccccacccctatctcccttcgctgactctctttttggactcagcccgcctgcacccaggtgaaataaacagccatgttgctcacacaaagcctgtttggtggtctcttcacatggacgcgcatgaaatttggtgctgtgactcgaattgggggacctcccttgggagatcaatccgctgtactcctgttctttgctccgtgagaaagatccacctatgacctcaggtcctcagaccgaccagcccaaggaacatctcaccaattttaaatcaggtaagcggcctcttcttactctcttctccaacctctctcactgtccctcaaccactttctcctttccactcttcaatctctcccttctcttaatttcaattcctttcattttctgggagagacaaaggagacacattttatccgtgcacccaaaactctggcgccagtcacggactgggaaggcagccttcccttggtgtttaaacattgcagggacgcctctctgattatacacccacgtttcaaaggtgtcagatcacgcagggacgcctgccttggtccttcacccttagtggcaagtcctgcttttctggggaaggggcaagtaccccaaccccttctctccttgtctctaccccttctctgcttttctgggggaggggcaagtacccctcaactccttctccttcacccttagcggcaagtcccgcttttctgggagaggggcaagtacccctcaaccccttctccttcacccttagtggcaagtcccgcttttctgggggaggggcaagtacccctcaaccccttctccttcacccttagtggcaagtcccgcttttctgggggaggggcaagtacccctcaaccccttctccttcactcttagcggcaagtcctgcttttctagaggaggggcaagtaccccaacctcgtatctctgcgccccaatcccttatttccacgcccctacctcttatctctgcgccccaatcccttatttctgtgccccgaccccttatttccatgccccaacccctttctgtgccccatcccttatttccgtgccccgacctcttatctctgcgccccaacccsttttcccacttttctggaaggtaagaaccgctgaaccccttctctccgtttctctactctctcttttctctaggcttgcttccttcactatgggcaaccttccaccctccattcctccttctactcycttggcctgtgttctcaaaaacttaaaacctcttcaactcacacctgacctaaaacctaaatgccttattttcttctgcaatgccacttgaccccaatacaaactcaacagtagttccaaatagccagaaaatggcactttgaatttctccatcctgcaagatctaaataattcttgtcgtaaaataggcaaatggtctgmggtgcctgacgtccaggcattcttttacacatcagtcccttcctagcctctgtgcccagtgcaactcgtcccaaatcttccttctttccctcccgcctgtcccctcagtaccaaccccaagcgtcgctgagtctttctaatcttcattttctacagacccatctgacctctcccttcctccccaggctgctcctcgccaggccgagctaggtcccaattcttcctcagcctctgcttctccaccctataatccttttatcacctcccctcctcacacctggtccggcttacagtttccttccgtgactagccctcccccacctgcccagcaatttactcttaaaaaggtggctggagctaaaggcatagtcaaggttaatgctcctttttctttatcccaaatcagatagcatttaggctctttttcatcaaatataaaaacccagcccagttcatggctcgtttggcagcaaccctgagacgctttacagccctggaccctaaaaggtcaaaaggccgtcttattctcaaaatacattttattacccaatctgctcccgacattaaataaaactccaaaaattaaattccggccctcaaaccccacaacaggatttaattaacctcgccttcaaggtgtacaataatagaaaaaagttgcaattccttgcctccactgtgagacaaaccccacaacaggatttaattaacctcrccttcaaggtgtacaataatagaaaaaagttgcaattccttgcctccactgtgagacaaaccccagccacatctccagcacacaagaacttccaaacgcctgaaccgcagcggccaggcgttcctccagaacctcctcccacaggagcttgctacatatgctggaaatctggccacygggccaaggaatgcccgcagcccgggattcctcctaagccgcatcccatctgtgtgggaccccactgaaaatcggactgttcaactcacctggcagccactcccagagcccctggaactctggcccaaggctctctgactgactccttcccagatcttctcggcttagcggctgaagaccgacactgcccgatcacctcggaagccccctagaccatcacggacgccaagcttcaggtaactcacagtggaaggtaaggccgtccccttcttaatctatacggaggctacccactccacattaccttcttttcaagggcctgtttcccttgcctccataactgttatgggtattgacagccaggcttctaaacctcttaaaactccccaactctggtgccaacttagacaatacccttttaagcactcctttttagttatccccacctgcccagttcccttattaggctgacrctttaactaaattatctgcttccctgactattcctggactacagctatatctcattgccgcccttcttcccaatccaaagcttcctttgcgtcctcctcttgtatycccccaccttaacccacaagtataagatacctctactccctccttgcacctcttaccatctcattaaaacctaattacccttaccccactcaacgccaatatcccatcctgcagcacgctttaaaaagattaaagcctgttatcactcgcctgctacagcatggccttttaaagcctataaactctcgttacaattcccccattttacctgtcctaraaccagacaagccttacaagttagttcaggatctgcgccttatcaaccaaattgttttgcctatccaccccgtggtgccaaacccatatactctcctatcctcaatacctgcctctacaacccattattctgttctagatctcaaacatgctttctttactattcctttgcacccttaatcccagcctctctttgctttcacttggactgacactgacacccatcaagctcagcaagttacctaggctgtactgccacaaagcttcacagacagcccccattacttcaatcaagcccaaatttcttcctcatctgttacctatctcggcataattctcataaaaacacacgtgctctccctgccaatcgtgtccgactgatctctcaaaccccagcaccttctacaaaacaacaactcctttccttcctaggcatggttagcgcagtcagaattcttacataagagccaggaccacaccgtgtagcctttctgtccaaacaacttgaccttactgttttagcctagccctcatgtctgcgtgcagcggctgccgctgctttaatactgttagaggccctaaaaatcacaaactatgctcaactcactctctacatttctcatagcttccaaaatctattttcttcctcatacctgatgcatatactttctgctccccggctccttcagctgtgctcgctctttaagtcccacaatgaccattgttcctggtccggacttcaatctggcctcccacattattcctgataccacacctgacccccatgactgtatttctctgatccacctgatattcaccccatttccccatatttcattctttcctgttcctcaccctgataacgcttgatttattgacggcagttccaccaggcctaattgccacacaccagcaaaggcaggctatgctatagtacaagccactagcccgcctctcagaacctctcatttcctttccattgtggaaatctatcctcaaggaaataacttctcagtgttccatctgctattctactactcctcagggattattcaggccccctcccttccctacacatcaagctcgaggatttgyccccacccaggactggcaaattagctttactcaacatgtcccgagtcaggaaactaaaatacctcttagtctaaatagacactttcactgaataagtaaaggcctttcctacagggtctgagaaggccaccacagtcatctcttcccttctgtcagacataattcctcagtttagccttcccacctctatacagtctgataacagaccagcctttattagtcaaatcagccaagcagtttttcaggctgttagtattcagtgaaacctttatatcccttacggtcctccgtcttcaagaaaagtagaacggactaaaggtcttttaaaaacacacctcaccaagctcagctaccaacttaaaaaggactggacaatayttttaccactttcgcttctcagaattcaggcctgtcctcagaatgctacaaggtacagccaatttaagctcctgtatagacgctcctttttattaggccccagtctcattcgacaccagaccaacttagactgtgccccaaaaaaacttgtcatccctactatcttctgtctagtcatactcctattcaccgttctcaactactcatacatgccctgctcttgtttacactgccggtttacactgtttctccaagccatcatagctgatatctcctggtgctatccccaaactgccacacttaactcctgaagtaaacaaacaatcttggctggcaggactatgctgaatctccttaggcactctctaatcagatgtcctaggtcytcccaattcttagaccttttatacctgtttttctccttcttttattccatttagtttttcaattcatacaaaactgtatccaggccatcaccaatcattctataagacaaatgtttcttctaacaaccccacaatatcaccccttaccacaaaatcttccttcagcttaatctctcccactctaggttcccacgccgccccaatcccgctcgaagcagccctgagaaacatcgtccattctctctccataccacccccaaaaattttcgccgccccaatacttcaacactattttgttttatttttcttattaatataagaaggcaggaatgtcaggcctctgagcccaagccaagccatcgcatcccctgtgacttgcacgtatacgcccagatggcctcaagtaactgaagaatcacaaaagaagtgaaaaggccctgccccgccttaactgatgacattccaccattgtcatttgttcctgccccaccttaactgagtgattaaccctgtgaatttccttctcctggctcagaagctcccccactgagcaccttgtgacccctacccctgcccaccagagaacaaccccctttgactgtaattttccattaccttcccaaatcctataaaayggccccaccccatctcccttcactgactctcttttcggactcagcccgcctgcacccaggtgaaataaacagccatgttgctcacacaaagcctgtttggtggtctcttcacatggacgcgcatgaaagtattataaagccatcatttgttttatgtggttgtttactagttatttacaaacagcatctggttaattcagttaaatcttgtcactacacattcacaactgttctgattattgttaggttgctaatacacctaaaacccaaacgtagaaatagacacatttgtctccatttctattgtttattaagttatgtaaaaacttaaatctgtcatgctttttaggttcctaaaatatatgtaattcgcagactagtttttgtattgtcacctcacttgaagaggaaggttatacttcaattgactcgtgaaaccaatttctggcatcgcctaagttgacattttggtaccagagttgaaaaacccaaagagcatacattctgtcagatgaggacatgtatcctagtatgttctgaaacgggctttctgcttccatggataggtggccacttggaaagtatgtgaagtttccagggttgcagcgagtgggagttctggtttcatggaaagagaaggctggactagaagatagcataattgacatgtgggcgtctgcagctggttggtttaattttagaacatttgtccttgactgtgcccctttaagtgaagtacctacttgtmttagagaagtgtgtctgtcttttgggcagcaccaaaatccttttgcttatactctggagcattcggcaccctgtttcatcagatagcccaccctttaaagtgggaaagtcttatcttctgagataggacaatataacctaataaagctctcaatggagcaagctgaagaatgcagtgcactcaagtgacttacttgtacgataataacctcaatttgtaagtacacaaaagcctctttgcatgtttcaagggcatatttacagttttaaagtgatgcaaaggcagcttcgtaaatatcttcagggaaaagggaaatgacagaactgtaactgaggaatgagaaacaagatagaaaaccaaattgaaaataaagactggggctaaaaataaattttaaaaattcttcaatacatgtggaatcctagcctttttttctttttgccctcaggacttgaagtcaaaggatctgagtgtcagaaacgtccttagcaatcaatgggctagtccaattagacgaaactgaggctctgagaacttgaagtgatttgccaagtgtcaatcaataggttggtgacagagttaagactggaatcaaaatcctaacctccaatctaatgattttttcactatatcccattttatacttgttttagagttagccattcctggattaaaattaaaaacataggattaaagaaaatattatatatgattgataccatcagcacttgtcaaccaaataatggataggatgaactgtgccacctttattctgtgaatggatgtgattaactgtacactggttaaaagtagtaatacctgcttctgcctggctcgcaaagatgtagtgaacgttttcttcaaaggtctgagatgtggaaatgccttgaaaaatcactgccctttataaataagattgattggtgtgtcgctttttgttgggaacctgccttgtttttgtcaatctcccttctttgggactgagtcctcctggggagtacagctcggtgactaggattcatggacaggcctcttggatgctgtgtgcctacactggtaacttcccaatactgatcacctcaatttcctatcaccatgctcggcccacacttaggaataccccactacttcrtcttggatcatcaatctcttgcctgcttgacctctggtggaaattgcctgtatgatctctcttttttttccctgcccatccttccccactctttcttcctctctttgtacccaactttatactccagccataccgagaacccctttctgttcctggaaagctccatgaacttgctgcctgcccagctgttgcccatgctattccccagctggatcacttgccacacctctctgtcattgccacccattccgctcccaccctctacttggtcaactcatgccaatcttttagatgtcatctttgatgtaactttattcaggaagctctcttwatcatccctgttccttctatgtgctacttcaagcacccgttatttcttccagacttagaatataccatgtctatttttaaatttgcttaattgcttgtatttctctctagactgtgagtgagacatgagtgcaggggaccttgtctgcttgcccatcagtgtgtaggcaatgcttggcatatatgagttaacacatatttgttgaaaactcatattcatgcttaataatggcttacattttataaactgtctttatttttatctcatttcatccttatagtaaatctatgatgtgrtattatccattcccctctttcagatacagaaactctgagaagatgttaattaacctatccaacatcacctagctagtaagtggcagagccagtacttgaacccaggttgttggagtccaagttcagtgctattaccattacatcacagctgactttgtttggttatagaatacatagcaagtgatcaggggagtgaaatgaacagaccttcccttcaggagaattaatatggcaaagagaagactctgaaccatggtaaaggcagtttggggaataagagatgtagtggggagcaggggaagaacagccacgtgtgagaggtaaagaaatgaatgttggaacaaaaacagaactaaaggctgagctttgggggccatctatggttagagctcagaaagaagaagagccaaaaataatacaaaaaaaaaaaaagatccgtgagcaatatgggaaaatagtgaaaattcattatcatagaagcccaaggaagtgagaatgcaaagtaaaaaaaaaaaaatgtaattaaaaatggcaaatgcaatttattagaaaaaaggagattacaaaaacctttctgggtttggctggataacagaagactattgagagcttagatggaataagggacagctataaaggattcaggaaagagcatgagacaagtaaatggaagcaagaaagaactgattgaagaattttggcagtttattcattcatcagttgatggatagttgggttgtttacagattctggctattatgaataaaagtgctgtgaacattcacgcagaagtcattataagcatgtaagttatttttcgtgggtacttaggagaggaattgctaggtggtatggtaagtggatatttataaggaactgccaaagtgtttgctaaagttgttgtactattttgcatttctagcagcaatgtatgatgaaaattttagttgctatacctcctctccaatatttagtgttatcagtcttctgaattttaggctttatagtgaaagtgagcagtatctccctgtggttttagtttgtatttccctgttgactagtgatgctgagcatcatttcatgtgtttgacatgcatcctcttctctggtgaagtgtctgttcaaatcttttgctcagtttcaattcttgttttcttcttattgagttatgagttccttatgaattgtgatatgtaaatatatattcagtttgtaatgatttgcaaatattttctatctgtggcttccttttaacactttccttaacagtgtcttaatagcaatagttttttattttattttattttttgagacagggttttgccctgtcgcttgggctggctggagaacagtggcacgatcacggctcactgcagcctcaacctcctgggcccaggtgtacctcccacctcaggctcctgaataactgagactacaggcaagcaccaccacaccaggctaactttttaattttttgtagagatgggatctccctatgttgcccaggctggtctcaaactcctgggctcaagtgatctggtctcccaaagtgctgagattacagtcgtgagccattgtgcctgtccagtttttaatttctatgatgttcagtttaccagtatttctcttttacagtttgtgctgttttgtgtcccattctaagaaatttttgcctaaactcaaggtcataaatattttctcctagaagttgtatagatttcagctcttatatttaggtctgtagttcattttgagttaatttttctctacagttgaactaagtgttgaggttcttttttctgtcccttcacatatgaatgtctaattattccagcactgttgattagaaagactaacgcttcttcattgaatcagcgtggtaactttgtttgatgtgcttttctttacagcttgttttattttttacttggggtttactgagcttcttagatctgtggatttataactttcatcaagtttggaaattttttttttcctgttactcctacaaagatgttttttgtcctcagcttcttcttttagactccgattacttgaatgttagaccacttaacattgtcccacacttcactgatgctctttttacttaatcatcttttctgtctgtgattcattaatagtttctattgttatgcctccaagttcaccaaacttttcctctgcactatctaatctactgtcagtccctagtagtatttttgtttttttttttttttgagatggggtcttgctctatctcggctcactgcaacctctgtctcctgggttcaagtgattctcctgcctcagcctcttgagtagctgggattacagacacctgtcaccacacctggctaatttttgtgtattttagtaaagacggggttttaccatgttggccaggctggtctggaactcctgacctcaagtgatccacctgcctcagtctcccaaagttctgggattacaggtgtgagccactgtacctggccccttgtagtatattttttaaatttcagatattgtatttttcatctttagaagttccacttacatcttttaaaaatatcttccatttctctcttccacatgttcatgttcttgaacatatggagtatatttatagtagatgatctaatgtcctggcttgctaattctaccagctgtgtaatttctggatgttcttattcatcaatttttcttttgkttaggagtcatattttcatgccttgtaatttattaaacattagacattgtgaattttatattgttgcttgatggattttgatatatttctccaaaaagggttagactttgttttgatatgcagttaatttatttgagatcatgttcagctttttgaagattgctgtaaatttttattagggtgaacccagttttgcctttattttagggctaatttaaccctattacaaaggttttctgagggctctaccagatgcctgtgaattatgaggtctttccggtccagacagtgagaaggtgaactattcccagactcataggaatactaagaatggttcaactactactttctgacagttctttcttcactcttttagagtttacctcacacatatgcagctcagtatttagccgaaaacttaaggagacctttgtgtacagatctctggacttctcttatgtagctttctcctccccagtattctacccaacaaattctasctgccytggcctccttgagcactcatctctgtctcctcaacttrgtgggcccactggactctgggttctccttcctatgtgttggcttggaaatgtccaatcagcaaattggggcaattgtagggattgttatgtttgtttcttctttctcagagcacggtcttgtgctgcctgttgccaatgtctgaaaacaattgtatcatcttttttttttttttttttctcgcttaagctgtgtgtttgtagtggggaaagaagaggggggcagtcattcctgtagcagttaatccctcatgagcagaagcagaaatctcatttcaaactgataagttttaagaggttgggacttttggagtgtcagaagtgagacaaaaggaaaaatcaatctgattttaaggagattagtttgaatactaaaatgtaattattctttcttattccttttttactccatctccctttcttccttaaaggggagaggattctacttgagatttattttcctttcagcaaatgaaagtcgcaagaattgcttcctatatagtttgttgtattaggaggtatgcgcagcatataaatagcggaaactatagtgttgcagatatcctttttttacccctgaagtaaatgaaaattacaacagctctgggtagatatttcacttcttgggttaaaagttcttagactttcattttggtcctgctgtcattcaacaggatcagaacaaagctatgtatactcttccatgcttcagtcaattaactctaatatcaaggtattttaatgcagaatgtagaattctgtgcatagtaaaagtgaattttcccgaggcaggacaaaagagatattcttttttttttttttccccaagacggagtctcgctctgtctcccaggctggatagagtgcagtgktgcratctcggctcattgcaacctccacctcctgggttccagcgattctcccacttcagcctccagagtagctggggttacaggcactcgtcaccatgcccagctaatttttttgtatttttagtagagatggggtttcaccatgttggccaggctggtctcgaactcctgacctgaagcgatctgcccaccttggcctcccaaagtgctggaattacaggygtgagccaccgtgcccagcccaaaagagatagtcttataagtaaagtgcgtcaaaagacattagaagagtcacctaggttgtctaatttacctacaaaacctggtcacactaggaaaacgataaaccatgaacacatagttgtgagcacccagaataattctttaagtctacctaattatatctacwtttctattaacacatagtttttttcttttatccccctctttaagagtaagataactcttcagctgtaatgagaccaaatgctagtgaacttatccatggtggcaaaagcttttagccatttttgcctgtttaagtcattaaaattattttattacctcctgtttatctcctcaattaatcttccttataaaatgcatatatatacatatatattattcatattatatatgttaaacacgttccctgactgggtgccacagaaaaccaccacagttggcaattaacttgatgttaaaacgaattgagtttcttgttgaacatgtgtgtgcctactggggatttccaaaatgcaaacttagactagaatgtactttccatttttttcattcaagagtctttatcaggagcaaccccaatgtgctgattaaggtttaaaaaattttcaagttttaaaccctgttaccctggtggagagatcctggctaccaaacagacttcaaaggcacctccaacttgccctaagccacagacaaatatttgctgttactctagtactaggcagcatagggccactttgtccttcacttgtaggagaccttgaggataagtattaatcacatcatgaaaggttttctcagtagagatgaatctcacatatcttttcccattaagtttcggtctgaagtatgaggattagttgcaagagttgaattaagaaagagaactgaaagctgagttagaagaaaagacttgcagaaataaagaccagcaattggctttaaaagtaaaaagcagatatttttctctctactgtgtcctacatgtactgaagtacragcagtgcaactgaaagagaggtgagtctaattcacatgattcgtatagagacagaaaacagtaaatggtatgaaattagtctgtttccttctgctcatggagtagagatttatataggagagctgaaagtacagaatttttcaggatgtttaagctttgggcttgcagagcaagaaagctcacaatagaaattctgggctcgaaagagaaattggcaaacaaactaactctcatttcggcttctaaaactgtttctttcctatacatttagataagaaaaggcatttctaacatgaatcaattgcaaatgtggctcatataaattccgactgtgtctctcatcatcagtgtcatttttgtttttaaataatgacaaagccataattaaataagataaaaatcctaagtttctgtgaccttaagccttttcataaagaaatacttgtttattagttcaaactttacttattgaggaaatgctttgtatgaggcactgagactctggatacaaaaatggataaattaataatgcataagattccaattgtcccctaattcttgaaaattgatctctatcaaaagtggtattagaaacagctcaaagaatttttaataatcaaaaaagaacatgaggccatttaactcaaatttctcaatgcaagaagttcctctataatggctgatgcccattcattctctgctagctcctacagcctcatcaggcagcrtgtttcagttttagaaaggtctaattaacaaaaagttcttctgtgttaagctagagtctgttccctgaaactcctaatactggccttagagctatacaaaacaagtctactttatcttcaacatggaaatccttcaaatatttaaggkcagccatcaacttaacttctattctccaggtaaattatctataatgtctcatatcacatagtttctacaccatttaccactcttgctaagtagcagatgacctctctgtaactcgtaagcacatgttactaatgacggtattttctagacattttcctctccacgatgtcaagcgaattctagcctctatttctgaamctttctttttccaattttattttttaatccaaataaatttcaaagatttttccataatgtaatattcagattttaaaagacctagagtactttcaacacagctgttggggaagaaatgaagctgactgagtggagacagtagcatgagacagaaaaatatgtttttatgagacctattatttacatagcctcttgagcacccacttctaatcatggtaaaactggaatgcaagactgaagttccaatgtcattattttgggaggtgagaaaggggaggaaagagtcacttccacatctgaattagagtgttttgatatgacctgcatatttctataacatctgtcattgcatcatttagttcataagaaaataatatttctggttacatgccaatgatactgacaggcagactagyagtcaaggctgagtcatagaagggtggggttgtggagagccacagctgtaaaacatgtaactgtcccttaagcagctgaagtgatgcaggaggctgactggaaactgagcaggagattaaaatggcctttgtggatgacagcaattggagtcagctctataggtaacagaccctcttggctatactcacagcacctgccagagcatctagaagtagctaactgctttattaagtgggcttttaaagaaggagagctggccgggcacagtggctcacgcctgtaatcccagcactttgggaggccgaggccagcggatcacctaaggtcaggagtttgagaccagcctggccaacatggcgaaaccccgtctctactaaaaatacaaaaattagctgtgcatggcgtcaggcacctgtaatcccagctactcaggaggctgaggcaggagaattgcttgaacccaggaggcggaggttgcagtgagccaagattgcaccactgcactccagcctgggtgagaaagcgagactccatccccccgccccgaccaaaaaaaaaaaaaaaaagctaaaaaagcaccagaaataatacatcactgaactcttggctgtcactttctacctgtgcctggtgcatgttttataaagttcttggaaaatgagtgtgtgtgaaagttttgattacagtacttcaaattgagaatcttttacacgttataactccctaacttgaacaggaccttaagagagatttttttaaagcatattaacctgtcatataaattatgaggagtgcctatccctaataaaagaataaaggcaagtcccgaaagggaagccagaggagggctagaaatctaacttgttcactcactcactgtagagcaacctcttaacagaatcacttggaaattccttcatgartctgaaataccaaccagatgtaggtggatacatttctttcagttttgataagacattttactttaagctcatacttgtatcttaccataacattgctgtctaaaaatatctttaaaaacatagttccttatcttgtacttgacattcataacacagttcaaaaagaatttgtaaagtctcaataaatatgtcaaactaaatatggaatgaagagacaagaattgttctttgtacctctgatttgttcacttttatctaaatctaactcccactctattattgcctgtctaggtagatgactgggctactgctttaatgagaagacacaattcttgtgttcacrttatctacyattaaatgccaagactgatgttgtcctctaactcaatgtctgtccaaaagcactaagcaaaaatgtagaccctcaacgctcttggagacattgacagttgaccaaagttagtactggaagtccctaacttacgactgggttgtgctctaaagatgtatttgtacgttagttgtctgggctttagaaggcattttgtgtccattttgtttacyaccatatccttggagcctcrgaaggtgctagacatatagaggcacccacatatttgyygagtgacaggatgaactggccccaaaagtctacttcactaataatgtaatagaattatatgattattaataatagcacttatatagtacttagccatttataaaacacgcttatatatgctttatcttagtctttctcacattgatccaacttacaaaggaagaatccaaggcccctaaaatacagagatagccttttagggtactttygagatttgagtgtgcaatgagagagatggaactagacagataatagtggaagtggagaaccaacttaagagctggcaccatcagagcctggtgacagactagagcccaactcacacacgcagactgccatattgtgtctagtatcattataaatatagataaaatgtcacccattaatacagagactcagaaagactcagggactyctygcctttttcctctgccttccttttctttggcagttargtgacatccttatgttcagtggctaaaaagggtgctcctcttacagtagcaagaaataagatttccctaaaagagtttcaccaaaattatgggctcctgcctagctagctgaagactcagtgatcttgctaagcagtgtccaacacaagccctcttctattggagtcgttggatgtaaaatattttcttaagtcataatctatattsacagttaaatgggayattcaaaggtcttgacctaagcctctgaatctggacataaatcctctcygtaccttttctcactgtagatcattcagcctttgyggaaacatttcatgggatgagaaactgaaaggaattcatttggtctttggatacaacaagttttttagaaagttatttggtcatactcttgccttttgaaagcatcagagcccatttaatccctcttcaaacatctaaagaatgctagcaattcctgaacatccataaatcctctctcataggcgaaatatcccaagttaattgttcattatataacgaggtttctcattgatctcaccagttctgctcagctttctctaaataggaatatcttgacctgcgcataatattctagctgtgcttgcctagacgggaagacagaagggctcttctcttgtttggagcattattcttccatgaatgtagcctaagattgcattygcttttttggcagtcatggtatactgttgactcacgttgatctcagtcaattaaaaccttcaggtctttttcacatgaatggctgataagtccacctctctggtgtagtacagctgatttttgtaaaaaggaattaatatttatcactgttaagtttaatctcatacattttactcaagaatctttcacactgtcccctgagttttctttcttaaacagttctgattatgttatctctactcagaaaaactgttgatggatctccactacccacaggattgagtccaaactgctccccgtggagcacccagggctagcttcatcttcctctgtctccctttcttccccacccctcaccacaccaccctctccaaccactctcaggattggctttccttacacaggtgcacttttccatggaactccctgctctacctttcaattattacccatcctttaagagacaacaatttaaaggtcccaatcagactaactccttaaagacaggaatatactataatgaggtacaggtaatagggaagaggcacagctcagaaatttctcacaaaaaaaagtttattttgtttgttttggcaaggaaaataatatttaaacctctctcaccgaagaaagttttctcccttaactagtttctcctcccagctccaaaaatgcaggtgaattgaatgtagcttagcagtgcttatggagagaaagtaacaagcttggccatttatcccagtaagccaaatagctgcacaagcttgtccacagtgtcataaggcagttgtttttcagaatcacaaaacaactccccatgcaacgaactcagcattgtgacaaagagcccagctgggagcataaggcacccttcccaatcatttcccatattgatgaaaaactaagcaacgccccccctccaagtgaaccttcagaggcaccttgcactgttttccaggaggtggtgatagatctgtacctttccatctaaatgggaaccctttgtgctaggcctttgcatactgggaatagagcctgtggtttggatttgcagagggatgtaacccatgacatcgtccttgttgagaaatcacaccgaccaactgcctgcccgaggatctgtcatcctcaatggctaacttatgagacgcttatcaaggcatctctccaacacactatttagtgtgtctgcacatcccttattctgccataaaagtgcttgaaaccatacgaagcaatacaaagttgttgtcagtaacaataacaacaatagtggaagagttggtttacttgagcaatagctattgaatatgtcaggcagcacgtgagatgctaaggcagtgtttctccaagtgtggtctgggctactttagggagctygctaaagaatgtggtaagtgctatgacagaggtgaacrtaggatactgtgggtgcacacatgtgatgtacgtgtacactgcacctaacccagaatmttggtgcaaggtgaagtttaagcaaattccttaaggatgagtgggaattatctagtatttctccatctacccctaaattatttsagtgacttaaytaacttaaatgaatgagaggcaggattagggggaggggatcagaaaaggagagccctcccccaccaagccaaggagggtcagagagtgagaaagaacatggcacctgagagtgatccaagcagcycaacagatccagctagaggctacagctcaggaggcagggatgagacaagaggccaggggggcattcagacagggcctagcaagccacattcaagaatgtggacttcatgataatgcacctggggagtcactgaagagtttcaagcaaggaagtaacattttgtatttttaaaatatccttgagaatgcagtatagagaataaattggggagcaagcgagacagaamagaacattcaggagaatgccacaattacgcagaagaaaaataagagtggtttgctctaagatagtagctacagggatggagagaggcatacccactaaagagagacccaagtagcacaatgggataggacctggtggatgatcgaagctggctgaaggagagaaaggaattgagagaaactctcagctttttgctttgatgagcttctctgggttagacagcaatgccatgtatacatctattttctctgtgaagcaggaggcaagctctttagctgagagtsagcagggggtttgyrgagatgtcagggagaagagagaagctttgagagtctctgcagggaagaaagagagcggaagggaagaagaacttccagggaagttttagggcaaacttgagastggaaaacataaaggcatctctcagtatgattgtgttgttattttctccagtagagttcagctgtctagccgaaggagcaagaaggtaaacagtgagattgagctgggattgggatgcaacagaaggacrgggggcagtrgaattgagagaactgatagaagattccagagagaaaatcatgggggcaagctaagtatcatgtccatttttacagacaaataggagccagagcagagataaaataagtggtctactgggacataagttggagtcttaaaagaaaaacttcagccgaattagatttaaaggagtttaattgagcaatgaacgactcgcgagttgggcagcccccggaatcacagcygattcagagatgccmccrcagccagtggtggaagaagatttatagaccaaaaaaaaaaaaaaaaaaaggaaatgatgttcagaaattggaagtgaggtacagaagagctggattggtacaggttggcrtttgccttatttgaacacagtttgaacattcggcagtgcatgaatggttgaagtatggacattgggattggtcaagactcagctgttgttacaggtgcatactcctaaattaggtttcaatctttttttttttttttttttttttgagacggagtttcactcttgtcacccaggctggagtgcaagggtgtgatctccgctcactgcaacctccatctcctgggttcaagcgactttcctgcctcagcctcccaagtagctgggattataagcttgcgccaccacacccggctaatttttgtcttctttgtagaggcagggtttcagcacactggccaggctggtcttgaactcctgacctcaggtgatccaccagccttggcctcccaaagtgctgggattacaggcgtgagtgaccactcccggcgggttttcaatcttgtctacttattaaattaggttacagattgtccacaacgactcagatatagaagtacagagtccttctcaggccatatttagttttctttaacagaagtggaaattagaaagaaaaatggccagaagcaacaaatgggaatgagtaagaaaggtgggatgtaggggctgccaatcacctggttttggtttctgcaaactacactttctcactacactcccctccttcaagagggtgttccagtgggcttacattcttctgagctttcatgatcatcagagagggagctatggttacgaaaggaagagttttgcgcccatttgggtgtgttaggatggagggcaaggatgagggttcctggagagtgaggtgcccggctctcctgatgcagcaccagtttgatgtgacctccattacctttactttttatttggaggtggtggtgggatcaggggctatttactgggacacagaatatgagagaagtgtaggcatctgttacaaaagaaactggtggaaaacctcaagggcctcagaagggctagattggctgaaataaaaagtaacagaagttcttgacatagattaaacagtgtaagagggtgatcacatcttctctcttcaattcaactttaaaacagagaagcctttttcagtagcagccggaagacagtgtcagcacaaatgaacatgacgtcatgtagaaagcacgtgaatatttttcaaaattattttttgtttaaggaactgggattatgaagtgtaaagtaacatcagcaaacatagcagaggcctgggaagacttctgctcctctgccagtggcaggaaggggaagaagagaagagaaatatgacatagaaagaagggtgttgttctgtttttgtttgctcattagcaagatgaaccatccaggaaaagaatttgtttttttttttttttgagacagagtctcgctctgtcgcccaggctggagtgcagtggcgcgatctcggctcactgcaagctccgcctcccgggttcacgccattctcctgcctcagcctcccaagtagctgggactacaggcgcctgctaccacgcccggctaattttttgtatttttagtagagacggggtttcaccgtgttagccaggatggtctcgatctcctgacctcgagatctgcccgcctcggcttcccaaagtgctgggattacaggcgtgagccaccgcgcggggccaagaatttgtttcttagagatacactgagtgtatgcaaactgcctggcacagaaactgttgtattctacgatgatctctcaatgttggttttcccttgtcctccttaacagaacaattaaatattaatatattcaatactaattagaagatgaataaatttttaaaaaattctgcacacaaattgaaattgtgaaagtataaacccttttacttaaatgggattgtcaaagtagatgctctccatcaaattttgtaaatcaaatttcataacattaagcagaaaaatgtgtacaatgctatattttaactttgtttacaatactgtgatagtccaggggcattccaaaaaattgctcctatcgctgaaattttgagagtcaaaaaaggatgaaaagttagataatttcaacatgaatggaatatgaggccctcaaaatctgaaggtctctaaaatcaacatttctctttcagcacagtattttcaaagttttcttcctccttcaatatagcatgccaactattgctccctctcccttttccatcatcatttgttatctgattagtactttgccttctccctgcttgttttaggtcatgttttgaaaatgtgaaattgccattcccaacttctctctcacctgtgattttagagtttgcacccaccattctgactatggtaacccaacataaatcaattcatgttgttgcttaaytgaacaaaagttggacccataaattagtgagattggttttctttcttgttttttgagacagggtctcactctgttgcccagactggagtgcagtggtgcgatcatggttcactgcagcttcagcctctctaggctcaggtgatcctcccacctcagcctcacaagtagctgggactacaggtgtgtgccaccacatctagctaatttttgtattttttgtagagacagggtttcgccatgttacccaggctggtcttgaactcctgggctcaagcaatccacccacttcagcctcccaaagtggtgggattacaggcatgagccaccacgtccacccaagattagttgcaaaagtgttttcaataatggcagcatcaatggactaactttaatcctccccttggctcagtttttagaactttctctttttttaatccatactcactcccttggcaatctcatccagcttcatagcttaaaatctcacacatatgtttggtccagccagcttttctgaactctaaactccagtggcctcctacgtatctccatttgtatgtctaaaaggcaactcatacttaacgtgtctgaaaatgagttcctggtcttcttctccaaatctgttccctggcacatcttctctatctcagtaaatggtcgttgcattcttccaggtgctcaaactaaaaacatacttacttctttctcttacagtctacatccaaactgtcagcaaatgctgttggctctatcaacaaaatagatctagaattcaaccacttttcaccatttctacctctgtcctctgtcccatgcaccatcaagtctagtctgaattattgcaataggattctaaatggtccccctgcctcttccctcacccyccttccctctttggtcttttattaacacacaagccagagtaatcgtactaaaaatagataatatcaccccaccacttaaaatctcaaaatctccaatggcttttttttttcttttttctttttctttttttttgagatggagtttcactcttttgcccaggctggagtgaagtggcacgatctcggctcactgcaacctccgccctccggggttcacgttattctcatgcctccgcctcccgagtagctggaatttcaggcacctgccaccacgcccagctaatttttgtwtttgtagtagagacagggtttcaccatgttggccaggctggtctcaaactcctgacctcaggtgattcaccagcctcggcctcccaaggtgctaggattataggcatgagccaccatgcctggcctccaatggcttctaatatcacccagactaaaaacaaatgactttataagtaagccctgaataacatatggttcaaattggggctcctttgagggaatgctaaaaataatgaacaggattgaattgatctaggcataagtttgagtcatcctgggcacctctttttgagggcccgcatgcccacacctgcccatcactctgatctcacctactacactgcacctggaccccttagctttggtatcaacctcctcgcagactggaaggtgccaggcggacttcctcaaggcctttgctcttctctatgtatgtccacaactcacctctactttcctttgggtccttattcgaacgtctcaatgaggctttctcggggagccccatctcaacataagcctcttctccccatagcacccatctctgctttatttttttttcctttgcacttatcactatgtagcattctacatattttacttatttactttatttagcaccttacatttaaaatatgatgcaaggtgaaatattaatacattagatgasttcattagaaatactacttaaagtaggtactaactagataaaaagtaccttccctccccgcaaaaaccaaaccaatcaaataacaaagcatgctaagtggtactgaagaactgtgatgttcattcccatacagcttattttaaatgatcttggataacactaagtgcaaagagccttcacttgttatatatacttcttctatctaatgtaaaagcagtaactttattatgcaaagtgcataccaccatattacaaattatcagtagactatatgttgtatacaatacctactgattaccagggaaatttagttttagtttttctctcttttttttttwaaaaaaaaaagattggcattataataaagtctaatcatataaataacttcaaggcaaattaatcatcccagctctggaataggttagctcaataattttagctattatttgactctgtgttatttcaactcactaggtttcagtttctttgtctgtaaaacagagttaatattggtgcttaactaaggagcttcttgtgagaataagggatgcagcgcactgggagcacctggcaggtgggaaggcttcaacagctattagcagccatcatgacttgtaactactgctactgtggagataggcatgaacagatttcgccagttgaagactacaagtagttaactgaacagtcatgcttagaaagcattcctactcatataagactttgttttatcttttgagaaattctaaatattgcttaacatatcataaatgtaaatrcccataaaaccccgattaagtaatttatcattttctgcacacttgtgccatactgactttatcacaaggtattgaaacacagccctttccatggcctagrgacaaatgaatacttggatcttgaaaggcatattatctacaccacatatttgggggattaagcatgcactatctcatataatttaatgaatcagtccataagttatcatgtttactctctcacccagtaggttgtaaggagtgtgaaggaacggaatgtgtatagtttttgtatctttcatgctacttgacttggcacaaaggcatttcaacttagtatagtggaaatagcactgggctagaagtcaggaaacacagatttcagctgagtaattgaagacaagtcacttcaactatctttaggctgcagattactcatgagtaatattcttttccattaacaacatttagattccttttcaaatgctctcattctaaggaacactagcaaaaggggtttttatcaatgaatgttggtttaattaatatccaacatcattttcccataccttaaaacataccattactgaggcttggttccaagatggctgaataggaacagctccagtctacagctcccagtgtgagtgacacagaagacgggtgatttctgcatttccaactgaggtaccgggttcatctcactggggcttgttggacagtgggtgcaggacagtgggtgcagcgcactgagcatgagccaaagcagggcgaggcatcgcctcacccaggaagcacaaagggtcagggaattccctttcctagccaagggaagctgtgacagatggcacctggaaaatcgggtcactcccaccctaatattgcgcttttccaatggtcttagcaaacggcacaccaggagattatatcccgtgcatggctcagagggtcccacgcccacagagcctcactcattgctagcacagcagtctgagatcraactgcaaggcggcagccaggctgggggaggggtgcccgctattgctgaggcttgagtaggtaaacaaagcagctgggaagcttgaactgggtggagcccattgcacctcaaggaggcctgcctgcctctgcagattccacctctgggggcagggcatagccgaataaaaggcagcagaaacctctgcagacttaaatgtccctgtctgacagctttgaagagagtagtggttctcccagcacggagtttgagatctgagaatggacagcctgcctcctgagtagcctaactgggaggcrccccccagtaggggcagactgacaactcacacggccgggtactcctctgagacaaaacttccagaggaacgatcgggcagcaacatttgctgttcagcaatattcgctgttctgtagcctccgctgctgacacccaggcaaacagggtctggagtagacctccagcaaactccaacagacctgcagctgagggtcctgactgttagaaggaaagctaacaaacagaaaggacatccacaccaaaaccccatctgtacatcaccatcatcaaagaccaaaggtagataaaaccacaaagatggggaaaaaacagaggagaaaaactggaagttctaaaaatcagaacacctctcctcctccaaaggaacgcagctcctcaccagcaacagaacaaagctggatggagaatgactttgatgagttgagagaagaaggcttcagacgaccaaacttctccgagctaaaggaggaagttcgaacccatcgcaaagaagttaaaaaccttggaaaaagattagacgaatggctaactagaataaccaatgtagagaagtccttaaatgacctgatggagctgaaaaccgtggcatgagaactacgtgacacatgcataagcttcagtagccgattcgatcaactggaagaaaggatatcagtgattgaagatcaaatgagtgaaatgaagcgagaagagaagtttagagaaaaaggaattaaaagaaacgaacaaagcctccaagaaatatgggactatgtgaaaagatcaaatctacatctgattggtgtgcctgaaagtgatggggagaatggaaccaggtaagaaaacactctgcaggatattatccaggagaacttccccaacctagcaaggcaggccaacattcaaattcaggaaatacagagaacaccaaaaagatactcctcgagaagagcaactccaagacacataattgtcagattccccaaagttgaaatgaaggaaaaaatgttaagagcagccagagagaaaggtcaggttacccacaaagggaagtccatcagagtaacagctgatctcttggtggaaactctgcaagccagaagagagtgggggcaaatattcaacattcttaaagaaaagaattttcaacctagaatttcatatccagccaaactaagcttcataagtgaagaagaaataaaatcctttacagacaagcaaatgctgagagattttgtcaccaccaggcctgccctacaagagctcctgaaggaagcactaaacatggaaaggaacaaccagtaccagccactgcaaaaacatgccaaattgtaaagaccatcaatgctaggaagaaactgcatcaactaaacagcaaaataaccagctaacatcataatgacaggatcaaattcacacataacaatattaaccttaaatgtaaatgggctaaatgctccaattaaaaggcacagactggcaaattggataaagagtcaagacccatcagtgtgctgtattcaggaaacctatctcacgtgcagagacatgcataggctcatataaagggatggaggaagatctaccaagcaaatggaaaacaaaaaaaggcaggggttgcaatcctagtctctgataaaacagactttaaaccaacaacgatcaaaagagacaaaaaaggacattacataatggtaaagggatcaattcaacaagaagagctaactatcctaaatataggatagttccacccaatacaggagcacccagattcataaagcaagtccttagagacctacaaagagacttagactcccacacaataataatgggggactttaacaccccactgtcaacattagacagatcaaccagacagaaaattaacaaggatatccaggaattgaactcagctctgcaccaactggacctaatagacatctacagaactctccaccctaaattaacagaatatacattcttctcagcaccacatcgcacttattccaaaattgaccacatagctggaagtadctcctcagcaaatgtaaaagaacagaaattataacaaactgtctctcagaccacagtgcaatcaaattagaactcagaattaagaaactcactcaaaaccactcaactacatggaaactgaacaacctgttcctgaatgactactgggtacataacgaaatgaaggcagaaataaagatgttctttgaaaccaacgagaacaaagacacaacatactagaatctctgggacgcatttaaagcagtgtgtagagggaaatttatagcactaaatgcccacaaaagaaagcaggaaatatctaaaattgacaccctaacatcacaattaaaagaactagagaagcaagagcaaacacattcaaaagctagcagaaggcaagaaataactaagatcagagsagaactgaaggagatagagacacaaaaaamccttcaaaaaatcaatgaatccaggagctggttttttgaaaagatcaacaaaattgatagaccgctagcaagaccaataaagaagaaaagagagaagaatcaaatagacacaataaaaaatgataaaggggatatcaccaccgatcccacagaaatacaaactaccatcagagaatactataaacacctctacggaaataaaagagaaaatctagaagaaatggataaattcctggacacatacaccctcccaagactaaaccatgaggaacttgaatctctgatagaccaataacaggctctgaaattgaggcaataattaatagcttaccaaccaaaaaaagtccaggaccagacggattcacagccgaattctaccagaggtacaaggaggagctggtaccattccttctgaaactattccaatcaatagaaaaagagggaatcctccctaactcattttatgagtccagcatcattctgataccaaagcctggcagagacacaacaaaaaagaattttagaccaatatccctgatgaacatcgatgcaaaaatcctcaataaaataaaggcaaactgaatccagcagcacatcaaaacgcttacccaccatgatcaagtgagcttcatccctgggatgcaaggctggttcaacatatgcaaatcaataaatgtaatccagcatataaacagaaccaaagacaaaaaccacattattatctcagtagatgcagaaaaggcctttgacaaaattcaacagcccttcatgctaaaaactctcaataaattaggtattgatgggacgtatctcaaaataataagagctatgtatgacaaacccacagccaatatcatactgaatgggcaaaaactggaagcattccctttgaaaactggcacaagacagggatgccctctctcaccactcctattcaacatagtgttggaagttctggccatggcaatcaggcaggagaaagaaataaagygtattcaattaggaaaagaagtcaaattgtccctgtttgcagatgacatgattgtatatttagaaaactccattgtctcagcccaaaacctccttaagctgataagcaacttcagccaagtctcaggatacaaaatcaatgtgcgaaaatcgcaagcattcttatacaccaataacagacaaacagagagccaaatcatgagtgaactcccattcacaattgtttcaaagagaataaaatacctaggaatccaacttacaagggatgtgawggacctcttcaagaagaactacaaaccactgctcaatgaaataaaagagratacaaacaaatggaagaacattccatgctcatgggtaggaagaatcaatatcgtgaaaatggccatactgcccaaagtaatttatagattcaatgccatccccatcaagctaccaatgactttcttcacaaaattggaaaaaactactttaaagttcatatggaaccaaaaaagagcctgcattgccaagtcagtcctaagccaaaagaacaaagctggaggyatcacgctacctgacttcaaactatactacaagtaaccaaaacagcatggtactggtaccaaaacagagatgtagaccaatggaacagaacagaggcctcagaaataatgccacatatctacaaccatctgatctttgacaaacctgacaaaaacaagaaatggggagaggattccctatttaacaaatggtgctgggaaaactggctagccatatgtagaaagctgaaactggatcccttccttacaccttatacaaacattaattcaagatggattaaagacttaaatgttagacctaaaaccataaaaaccctagaagaaaacctaggcaataccattcaggacataggcatgggaaaggacttcatgtctaaaacaccaaaagcaatggcaacaaaagccaaaattgacaaatggcatctaatgaaactaaagagcttctgcacagcaaaagaaactaccatcagagtgaacaggcaatctacagaatgagagaaaatttttgcaacctactcatctgacaaagggctaatatccagaatctacaaagaactcaaacaaatttaccagaaaaaaacaaacaaccccatcaacaagtaggcgaaggatatgaacagacacttctcaaaagaagacatttatgcakccaamagacacatgaaaaaatgctcatcatcactggccatcagagaaatgcaaatcaaaaccgcaatgagataccatctcacaccagttagaatggtaatcattaaaaagccaggaaacaacaggtgctggagaggatgtggagaaataggaacacttttacactgttggtaggactgtaaactggttcaaccattgtggaagacactgtggcgattcctcagggatctagaactagaaataccatttgacccagccatccctttaccgggtatatacccaaaggattgtaagtcatgctgctataaagatacatgcacacatgtttattgcagcactattcacaatagcaaagacttggaaccaacccaaatgtccatcaatgatagactggattaagaaaatgtggcacatatacaccatggaatactatgcagccataaaaattgatgagttcatgtcctttgtagggacatggatgaagctggaaaccatcattctcagcaaactattgcaaggacaaaaaaacaaacactgcatgttctcacttataggtgggaattgaacaatgagaacacttgggcacaggaaggggaacatcacacacacaccggggcctgttgtggggttgggggagcrgggagggatagcattaagagatataccttatgtaaatgacgagttaatgggtgcagcacaccagcatggcacatgtatacatatgtaacaaacctgcacgttgtgcacatgtaccctagaacttaaagtataataaaaaaatttaaaaaaccataccattaccataaagcaaatgtgacccttaattataggttttgttcactcatgaaaacttgccaggaactcatagtccttgtcactgtccattctatcaaacacaaatccttcaatctgttttaaaaatagcaaacctgggtgggaggagggcgagcatcaggaagaatagctaatggatgctgggcttaatacctgggcaataggatgatctgtgcagcaaaccamtatggcacacatttacctatgcaacaaacctgcacatgctgcacatgtacccctgcacttaaaagttggaagaaaaaagttgttaagcttgattctctcatcttaccatgtcatttctatttctccatttgtttatgttccccatttcttttttctgctttaattgaataaaagtaataattaatttaaaaaaatagaaaaataaaaatagcaaaccttcccctgccagcattccccatcccctcccctgttttgttttctctccttagtatttaccacactccgacataacacagattttacttatttgctctctatctccccatccccacattagaatctgagtttcatggatacagggatttttatgtgtttggttcactgccatgtctatgccacctggaatgggatctgacacatagtagcttgaaaattatttgaataaatgggtgaataaacatcatttaagatcctctattggttgtgcttcccataccataactaatctcatatgaactaccaactcagcttctccaggttaaccaaggtttctgatcctcatcccctgcccaaggcttattcatttatcccctgtcatttctccctgcttgtcatatcactcatttatttattcagttacagatttattgactgcctactgtgatccaagcaatgtgctaaatgctagggacatacaggtaaataaaactgacaygagccttaccctctttaataatcctttactttttttttttcttttttttgagacagagtctcactctgtcgcccaggctgaggtgcaggggcgtgatctcgggtcactgcaacctccgcctcccaggttcaagcaattctcgtgcctcagcttcccgagtagctgggattacaggtgtgtgccaccacacctggctaacttttttgtatttttagcagagacagggtttcaccatgttggccaggctggtsttgaactcctgaccttaggtgatctgcctgcctcccaaagtgctgggattacaggcgtgagccactgtacccagcctaataatccttttctattcaaagattactttgagacccagctactccctctgttcttggcttctctgtactgctgactctgactttacagtcctgcctttgaatggtacattttcataatgccctggagaaaaattttaaaaatctgtgtgctttggttggttgctatccaattttgaatagagttcttttaatagagagttaatagagcagggagcaagtcgtgctcccttctaaggagacagtaactacatccctttagagttacttttgggccacactggaacagatgctgtttcctaacagtgatcatcgcaattccagtgtcatgaggcctgactgtgtggcatctaagacggtttgctacatctccccacttccttgtgtttgctgtatccagaggtaatctgagagtgcttcttttacatcctgaaaaagcctaattaacctatcatttttagcctcaaggttattattattgactgctccaactaataggaggctaagctcccaatggacagagtcctgatatccagggatgcctagccccaggcctgtctgtgcctttcaccagagttttgggagcacttaaacctccaccccagcatttcccasgctgcgctctgtggatcattagggtcctgaaagatagtaaygaattctgcaaaaagagggtttcatagccaagtaagtgcaggaatgtcacatcctaaatctcccatttggggatacagggtacataatgagaatattaatgtatttataaatgtttcaatttgttaaaccaagtcagtgtttcccagcctaagttaacaatgcyatcttttattctcagtataccactgccatctcagaggacattactgctcaggagaaaactgtttggcaaattccattttaccttcatgtcatctccaaatgaatagcagcaaatggctttaagagagtgagagaggagggagatataagatattccccaccagtagttcttgagggtcacaaatagagggagagaacttgattttatggaacaaatactagacttcaggtcagaagacttgtgacttagtcctagctctgtcacgtaactaatggtatgytgttgggcaaatcattttagctcaagcctcaatctcatctcccaggaaggagacacgttttaggatagccataccccattctttgaaagagctgggcagtttaggaagtttctatatagcaggtttaatgtctatttaaaaagtgttcttctgggtgaatttttgggcccatgtttttgaagtcctctttcagatgactggtgccttccactctgttgatggaggtggctgactctttagacatgaagctccaggctctcaaaacccaaagcagtatttctgaatgaacattggaaacaaattgagtctggcatatatttatgttagcctaattaataggataatacctagagaagtcttaagccttatatagaatggaggaaaatataggtctataatattgcaaataagccataaatgaaatttgagacttcttatttttaaactagattgactagcttctttttctgagcacacaattttcaaagatggaaattggtgacatggagttgaaactgcraaataaatttgtagtactgcactgatttatatatattctaacatgacaggggagaggaaggcaataatcacttctggggaggcttcctgtagtccttgagttagagaaagactcttccattctttaactcaggagagaaagattagttctcaaacctgtcctctgtaaagaagaaattctataatgacttctttacactttacacttgcaaataatgctctagagggaactaggtcacacttgatgcttttctcaccattaaaatatgtctgctgaggccgggcgcagtgactcacacctgtaatcccagcactttggcaggccgaggagggcggatcactaggtcaggagttcaagaccagcctggccaaaatagtgaaaccccatgtctactaaaaatacaaaaaaaagctggatgtggtggtgtgcacctgtaatcccaggtactcaggaggctgaggcaggagaattgcttgaatctaggargcggaggcttcagtgagccaagattgtgccactgcactccagcctgggtgacagagcgggactcagtctcaaaaaaaaaaagtctgctaaaataacaactacaattaaaaacacttatgaactaggtttagaaggtatctgtacactgaaataacttacataaatgttagtctctatctgcttggaatttgatataaacattgatgacaataaatagttggttttaaaaaagacaagactgtatttccatataggttagttcaaagttactgtagtcatctccaaataattgctggactgttgcaataaatttgcaataaattcaacgtgatatttgctaaatgagcatgcctgccatctggttactcagactgtatttttgcaatttcatagataaacaaggcccagtagagattactatagtcatctttaaataattgctggactgtggcaataaatttgcaataaattcaatgtgatatttgctaaatgagcatgcctgccatctggttactaaaactgtattttttcaacttcatagatacacaaggcccagtagcactgagatgtaaggagccaatatgagcctgaggatcaattccaaagcaatttgagagttcaagccattcatttgttttcagcacaaagtgttctccacataacaaaacaatgagactaacttatctgtctctttcctgtcgtggtatctttaaaaatgtccatcatgacaggttgcaaatgggcttacaatattcagccaactttggggaccatgaagaatggaaaacagtcagtgtgctgcttgcaccatgtcctacttggttctggtgccagcagcactattcttgctggtctcttcaaggtgcacacagaagaagcggctgaatgacatggcaaaagtctccatgtatctatggaagtggggaaaggaggccccaaacyaaccttttcatcaggcccctggcaagcacctccccataccacaccaaaagcagaattagtagcgttgaatacagtgcctgagggggtcaatacatgctgattatacacaactacctgggaagtctgagaatagttatataaaggatgctagaagagtgcttaccctagtttctgtagccatggtgatccatgtattggatatatgcctaatcgtccaggctgtctcaacctcggtacattgacattttgagctagataatttttggttggggatggggtggggaacgctattttgtgcatcgtctgaggtttagcatcatctctggcctccacccactagatgccagtggtgttcctccccctagcaaaaatgtctccagatatttccaagtgtcccaatgtccccagggaagaggagccaaaaatcacccctagttgaaagccacttatctagtctgtatattcatgacatggaccagaattagaatgattatactctcctctctttttcctgaatcagtatttcttcatctacttattgaagtattatattctcttaatctgcttttattcagttttctctgttctcatacacctgagggttggggggagcctttcaaggtattgccacataagttaagaagagctaaaaagagacctgtttctcccttaggagaaaggaatattaaagagaaaacattccacatagaaattggatcagtagctaatgaggctgttttgcagaatgagtttaagatggcctaagctgaaattcatgtgtctgtgagcccagaagaacctttgtatgttaaaagaaactactttcatttgtttgctactgtcatacaaaagtatccttctgtcaaacagatttttttttctttcttggctttgtttttatttacttcctatttatattaacactatcaggaagatacccgtgtgggctccaggaacagactgtctcagtaactcttcccccttcagaagcacagtaagtagtcccgagaactgaagcaatgaggagcctctagagtgatgatttgtgtctgctcttttttatatgtgaaaaatttgaatcttagaatactgacttaaacccagccagtgggcaatctgcttgaaaatgactacacattcatatgtaagggtaagaaataatttatgacaaataaatctcatgaaaaattctaatttcattcatgttgctacaagtatagcttcatgctttaaaaaaaaatgcgggctggtaacatttttctatcttacttacagygtagagttaaacaggtgcccttacctctcctccagtgcatggaaaaggactggagtatttagaagtacaaatagcgcccttcttgacaacatcatcttccaggccaaatgtagcggagcagttagtcgcaaagtacttataaggcttccatgttttcccaaagtcctgggagcggtccagcaccatggcagcyggcctgggggacttgaacatcacaattaggtgagtgaagtagaattcagcttccaggtctaactggatcttttctctgtgcacatcctccgcagactgccaccatgtgcgaggaaaccggaaggatgagtctgccatggcagatggcaggtgagccaggtgaggataggcagcattgcacttgtcacatttgggctgccracaagtcagatccgtgttctcactgtagaagcagtacagttcggtagcattctgaccgcaggtggtgtctgcccagagttttcgccccaaagccaaatttcccatccgagggttgcaggctttttcacagcgggaactcactmcagctactccactcagtcctaagaaagggaaagcatgcatgatgcaagacaaacccatctggaaagctcttttggccacctagtccatcaacaacagtcaaggatctccccaaaagcgcttgagactttcgataaatggcaaattctaccatgctccaccatgttcctgtttgagcatgaacactgttctgcattcacaatgcattcgtgtatgcgtgtgtgtgtgcgtgtgtgtgtgtatttgcttttcatgttcagatgtaaaattcacatcacagaaacaaacactttaggcagagggcaagaggagggaaaatagaaccaccagggtgaagattattggcctaaaacttttcaagtactttgccttataaatgttttctgtatttcaaatacattgatgtgtttttgaagtcatgactattgaaaaaccataatgtttttaagaccacctaagttagtctttcaaatttaatgtgagtccttcacatgatttaacatgtttattatgagaatgtatttagaaggaaatgtggaattctattttctttatatttttaagccagggaagggataaattccctaggaaaagcaatatgagatatttaataaatatacaatgggtcctcatttagarggaggcaaagctagagacctttggagttcagatgtgcactatcagtttctaacattacrtaaacataactaagaaaaaaactctctgaactgccaaatggcagaaaagcttattttacatgctgtctcttcagggtttctacctgtgacaggttatagagtagttaactgtttgcttaacaggagagtgtctacagtctggcagccactaacagcacctttaaatattatctgtgaactacaagaccttctttaaaaaacacacttttcctcccaaaggtccaacagactttaatgttttaaaatgacttaaaatgataaacattatccacttattaacattctgagtacatactataatcctttgatttgcgtttgtcattttaattgtgaataccttaagcaaaaatcatctattttaaaggttaaaacagagggggaaagagggaaaaggaaatcaacccttaaattctggctaattgaatgtttctgctgcttaagaagcagtacctctgaactgttgtcatagtaaggattggaggaggccaaatgacagcttaggctgcaacagagacatttcacacactgacaatggccaaccccacgaagccttgcaactaaagggcttccttaggcattattttttaaatgtcaaattaaagtgtgcattatgcctgggttctgtttgccacttttctcattagctggggcaacagttgcttgtggccagaagcacacaaacacacaatgtgctatgactcacctgtaaaamatttcaaggaaaatcatatactgcctgtacaagtatttttgacttgaaacacttgccttgtgatgtttatttacaacctttcaatggcttgcatgtttttgccataatatggtttgagaaggaaaaggttttttttaaagctcatattttaagagtgcaagaattaaagtaaaatcttaggcctttaataggtccctgggaaaaatatccaataattttaaatgcccctaaactcctaagtccagaaaagatttgagccagataaagaatccatggggcaaaatacttggagtcactcaagggactattcaatgatactaaggatgctcctgtgacttggactggtttgggatgcagactggaaagcctggattttgctgggtgccagcggccctcagggaagagtggaagcccaagggaggagatgcgtgctacaatgttctgtagccaccagcgcatccctctagcccaggcgcccctttctgaagcagtcaagatccgcacgagagactggatgtctgcagactccctcacatctctccccctcacctacagggctgcgcttacgcctaactggaaaccaggtgacccgcaagagggagggagaggagcagaaggggctcccgaatacagaaaccacgagccaggagccggtggcctagggcagcccaagaaagccaggatgggagtgggagggagagggcatctgccgacgccgacgccggttgtccagttaccgagccagggagcagacccgcctccgacctccsgcagagtctctgccagggtaccaattccccaggggcggccagccagctcaatgcaagcccggggtgatcaccacctatcgtccaagccaggagtcccactgcgttccagtcactgctccggggagagggcgctcagccctgccccaggtgtccttacctggttctctagtacccagcaccaggtcagggacaccagcgatsggcttctaccagagaccggccccagcccacgcgcgcccagggtcgctgggccacccctcctcatcattccttaggccatgaagtgccgggggatggcgagctgggtcctttgttccctcaccaagtggaaaagcagttttttaacaagccaaaccaagaaagaaaccccggtcgcagtatccccggcagggcgcacccaggatagctggttatccaagcgcatgtgtatcccagttgtaaaaataaatcaatagtatttgaaactgcggagcccsggggaaaggaggcggaacatggccactcatttcaccctcgggagcagcgctctgcgctcgcagccctggctcccctgcacccccgagtcccgagatgggttagagaagcagcgagggaaggggtgggggccccgccgcgtcaccacccacctgcggccaccaccgtgcagccccagagcagcagcagccgcgcgcagctccccatggccgggaggagccgggagcagccgggccgggcgggtgccggagggagccgagacctctgggctgcgggatgaagcgccgccgtcctcgggagggaacggggccctggtttcttcctcctcctggggcgccgggctcggtcagcggtcgccggcagctgggagccaggggccgggaccgcgcggggaggtggggtgaccctcgcgcaccggcctggcgggtcccgggcacctggggggcggcgggagccccgggaccatagccggcctggctgcgctgccccgcggagcggccctgcgggctcgtctgccgctagcccggggctcggcgcccgcagccgccgctgaactttgcgagacctttcacttcccggccgccgccgccgcctcctcctgggcgtcctcctccgcttttcccacctcttctggctgccccggctccgtcccgtccttctccacgggcagttccatgcgatgcatttttattgcaccgacgccgcggcgctccggtgccagccctcctcccctcgcacctccaccccttcctcccgcccgccccccgcgcttgacagcccgggcggcgcagcccgcgggatcggatcgccgctgccgctgccgcccggggggggggtcccccgcgccccgaccgacgcccccgacgcccggctgcccgctggtcccggtcgcctcagcctggcccccggctgccctggcgcccctcctggcccgcgccctgcatctccctagtgacccccctggtgccctgcagcacccacaggcctcccctgggaagcaatctcccaccttctcccggaacattcctaagagcagtagactccctctagatcaggtcagggcatgccaaggggcttaaaaaaccgcgaaacaggctagcgcctacttcccacatcccccagcgaaacaagccctccctcctcctccagccaccccctctcggggagtcccacgacccggggacggaacaccccaacccagccccgcgtcacccgcactgagagcgcgccaactgctaagcggcgttcgccgcttctctgctgccttttgcgggggtagggggatgtctcggctaaacaatcgctgcctacatgatccgaaggtgtgcccactttggtgtaagaggtattgcctaactcaaactcaaggtgctgaaagaaaagggtcacaggattagctagtcggcagtgtaagaacatcgttgtccagaggcagggcaagggcacgacaaagggaactcttcggtccttccaagcgttctccctttatagagtatgccgtgctgtgaaacagtgttaggaactaacttatggggagcaatttagtagcaaccacacgcagctaattgcagataggattgctcagggctggtgcttctggaaagagattaaatagcagccgagtctgagatttttgcaagttctgtgaaaatataattctacttacacatccagggaaactggcaaaagttaagtcgacagcaattttgtattgcagtgctcattttgttcctttgaatattttccagaaaattaactacgttccagataccatttagtcgttgtgtctgttacagatgaggataattcagagctttgggatacatgtagatattatttacaatgacccagccaggaacatataagaagtttatatctcccagggggatctgggttgaggtcagcataatccatttgggcgacattaaaattattcttctggccaacagaggaaagtagcagaaggtgtggacagcaattcatgtagcatcacctgctttagaaaataaacgctttgagttcccaaatactggcaatggtggggctttcttcatatctcctaatggagccattgaaacacctctccaattaatctttttaccaaataaatgataggaaactataacagccaaaggttcttagcataaatgttaacttaatagccaaggcaaattaaacaaaggggtggatgcacatttattattaacttctgagtctagtatatttaggcagaactaatccatttctgttttttaattaacaaataaacttgtatgtatttatcatgtacaacatgatgttttgaaatatgtatacagcgtggaatgactaaatctagccaatgaacatatgcatttttgcatattaacatgcatttaagaatacactcactgtcttagcatttttcaagagtacaatatattgctaaaaatatagaatgcttcacaaatttgtatgccattctcatgcagaggccatgctaatcttctctgtattgttccaattttagcatatgtgctgccaaagcaatcacagaactactccatatctcattacaaatttcaaagccatttactgtctgcacgaatcctgcattgataatatatttctttgctgaataactggctcttatttcctttaacaagacagaaagctctctaatggtagaacagtctttaatattcagtttatacaaaacattactatgtttttctgatattcttccttattcttagccaagaacacctacaataagtgttcattacatgtttttgactgagttgtgttaaaactattgttatatactaaggggctaaggagactaaggactaaggagaaaaccagttatatcacaatgatttcccatattcaaaaggaatctgcacattcgacaccaatactatctatatgaaaagctcaggagagaaaaatagtcagcattctaataaacatcatttgcttatatagtccagtttagttacaaaggatattttcattttgaagaagctatccaagaaaaggttacctacataagaaaaatcttggataagtatattattgcctatgattttgtttttgaaaacatcagtcatggattcagaatattttgtaattttatgaattagtaggaagcttagcaaacttacagaatttcaataacaattcccagaaaccacaaaattgataagttaaatctagaatattcctgagaacttgaaaggaagttaaaagggtctttaaaaagtaaaataaatggcatagccaggcgtggtggcatatgcctctggtcccagctacttgggaggctgaggtgggaggatagcttgagcctgggaggtcgaggctgcagtgagctgtgttggcaccactgtactccagcctgggcaacagagtgagaccttgtctcaaaataaataaaataaaataaatggcaaaactctttgcaccaaagactttactcacaggagagcccttcaggacctcacttaaatcattcatgtatttttattaagtttggttatgacatctttctagatcacagcctattagaagtaacagattagaatggagcaggatgttattaaagacaggggataaactgaggcaatccagtaatgagaaggatgggaaaactctaaaaagcagccataagtacaaaaacaaaaccaaaacatccacagcagtctgaggccttctagtgcagaaacaaaggacgaaaaagctataaaggcatcactctccggtaacttagtagagtaagtgaggttcctagtggagcgtaagacattcagaatcaggagggacccttgagcccaacttctcactccatcaaaacccctttccacaaagcctctgtccaaaggtcatccagtttctgttctaaaaatctccataaacaagagcctcaaaggcaattctgctcatttttggcactgttgttctatttaagtgggatgtttctcttcttaaaattctgtgtttataggttagtcatctgcaaccatacagaataagtccaatttctcttctggtaggtattcaatgatttaaagtaaagttttaataattttcatcttaactatccttttagtttaaacacccatatgacaggattcccacacttttcaccatcttaatcacctcttttcagatataccccagcttgtcttacactgtgcatgtagaactcaactccaggtttgtctgatcaacatagaatagaactaacattttccttaacttagctctatggcttatatttctgtaacctaatgtgatgttggctggtatatttgaagtcagctaaaatccttttttcatatattggtatcttacagagtcatcaataaaaggtaaaatatattttgttttaccagagggaaatatttccattaaaatacattgcatgtagtaagcattcaataaacatgaatttgaagaataaatcaacaaatttaagctgctaagtttgaaaaatggttacaaattttaaaagaaacttttagttttcaaagaactaattacctattttctgaaaaggtgatcacttttatggaaaatttgactcttcaacaataccatttgcaactggcattattatacatttccaagaaaaagaaagactctgaaaatagtgatatttttagtatacctagtgttttttctccatggaagtataaacatgatcttatttatcctcacagcatcaatgtgtgggagggaacaggaatagttgtgcccatttatacaaagagaaagtgagatgaaagatgtaagtgccaaacttagatcatacaataaatacacactgaagataggacctgggttttcagataaaaaaaaaaaaatcattgcttatccatcaattttccatgaatacaatcttctctctctttgaactagaagactactgggagaagataaaatggagaattgttttcattaaaataatcctagattttgttttctacctggactgtgccctttgaatgccctttaaaaacatcatcttgggaatttccttaagctttaacttaagcctcctgccatgggcgctctttcttatttcatgtgcttcctggcttcagctgctcattcctaggaagggagggagtgagaggctttgaaaatacacatgctcttccaggaaggtaaccatacttttctaaaaaaaaaaaaaaaaaagcacgcatgctctctcatgttgaaattaattatatgagggcaagaaatttttttaaaaaaacaaaaacaaaaaccaagaacagttgtgttgttattacagatatagctaccattgacagcattatattgacacacatttctaaatggctcttagctaaaactttctgtacctattgctatttctgaaattgatgaaaatccaactcagtagcttaaccaaattgagattgatttttcttacaagacaagaagtcaggaggtagacagtccaatataaatgcagctactcaaggaagtcatccagatttgtttggtgttctccctcatgggcacaagatggtttttctgcctccaggacgggtgttgttattctagaaaagagaaaagggtaaaagatacatgccagctggccttaaaacactttcccagtaacctcacccatctgcttatatctaattgtctagaactgggttacatggcctcttcagaccatgaggaagtctggagagctaagcattttaactgggcacattgacacccttaacaaaatcaggattctactggaaagaaggggaggttggatatcaagtagacaactacaggagcagtatatgtcatccaaagttagcaatttcactgatgtgtttggcccaagcacctattaacatattcagtggcttctcatcattggcacataaaatgcatgttgcttggcttggcacccaaacctataatgtcccggttccttgccactcacagtgaacaacctgcactcttgaagatggacaatactgcttcatgcctctcgcttctgcacaccctctcctccttctggctacctctggcaggtccttggaaattcagttctgacaatagctgctgtgacacctttccttcttaggctcctcttccaacagggttagtttcccctctgtcctctcatggcaccccctgtatcactttattattctcagttatacttttttttctcatatactgggtgaaagaaaattaaaagcaaaattgtatatatgctttcattattgtttttggtttctgttttgttttcaaacaggtctcactctattgcccaggctggaatgcagtggtgcaatctcagctcaccgcaaccttgacctctgggctcagatgatcctcctgcttcaagtcttccaagtggcagggtctataagtgcacaccaccatgcccagctaatttttttgtttgttcgtttagtgatggggttttgccatgttgcacaggccggtcttgaactcctgggctcaagcaatccacccgccttggcctcctaaagtgctgggattacaggcatgagtcacagtgcccagccactttcattataacaacagaaaacatacatatgaaaaaggtctggaaagaaatacatcaaaatattagagatgactgttcctctggcctctaaactttcagcaataccataggattgttataattccatttt

SEQ ID NO: 97998 - DNA, 112061 bp, Homo sapiens
  misc_feature (1)...(112061): n = A,T,C or G
ttcatctgataatgtaaatttaaatgcctctacatttgatacgaaacccacattcaggtgacactgaacgaggtggcttttgtcccaccagtgcctcatcagtgtgaggcgattcctctctgctttaggaaaatgatttttccccctaaacttgtgccaaccatcaacaacatctccatagatcttatggattgtagaactgttggctgtttcctaaatttattccaagttctcgtagaggcatatagatttcagtctgtgcttgtatgggatagatgatctgagtggctttctggcctcttttttgagtttaaaatccatatgaggttgacgtgtcatactaaggtaacatgtttgtgaggttattccactagtactgtgatcacgtgggtgtcagtatctttaacggccttcattcttggttgtgagattttatttgatatgcccactcaccctcgacgaatctgcccgctttgggctgtggtgcctgtgtatctttgcccgtctggtctccagttggtggaattaccttttttgtactgccacttctcagcatctttgaaatttgacataatgttgcttcatttcagtttttttagttctgtaatttgttgattgtatttaactatgtgagttctgttgtgatgtttactgtattgtaaagcacctcattcatgtgatgagtgctctataaatcaataaatgatgacttagaggctgtatcacgagctattttggttttaggatgcaggtctcaaaagcaagttgtgggactctttctgtataaacagcacatgataccaaaggaaccacagggaaaccttgtattttacagactttaaagaaggaaccagagaagttaacttgccttccaacctgataatgatgctctttagatttccagtacgtggccatgcaccgttttaactcagagtttgtgtgcactgtgatttataaccttcgagtgagcacttattagaacattattggggattttgtctttggcctaaactggctctaccataaaggtaagctgaaaggtgaggaacccagactcaaatgtgaactggaagagactgcaggcaccatctcagtcaccacctctgtcctctaaacagacgggaaaatgcgccaatacctgcccaggggtcatttagtaagttactgacaaaagaggcaagactgagtagagaaccttctttacaagatacacaagatatcaacatccagctttttatcctgaatccttacaaatagttcatacggagttagtgttagatgttgaaagcttgtttgtccttgatataaatcactagcgactattaagggctcttccttacaaactcggagaaaggaacatggagtcagacctcttattcagctaaattatgaacaagaaaatcccccgagaggagttttgggaagattagggattatttctagagtgcaaatacccgataaatatatttggaatgaactgttgtggaagggtctagacaatatatatccccaaacttacatcagttttagacataatcagctactcaaggtatagagccaaaacgttttatttgcatgctgcttccagtgcagatgaacaggttttcgatggtgtgtgcaaggcacgaggctcccaggaaagatgtggatctcccgctccctctcatgggacagggctaataaccgcctttcaaattgaaccctttctgccttgaggaggcccggaaccctcacaggattcagttcacagatcaaatgattttctgggtatggtatttctggtggttcaatttcagatgtgtgtaatctggctgccaacgtaggattaggctttttggcttgtggagttgacactcctcactgagctttagcgaaatgatgaaagaattttgaattctgttcacacaggtaaataaactgaaggaaaagcctttcacaaaagggagccaaacacatcttctaagacataggagctgcacagaaagtcctaggcaagaaacttgatttttttcctcttctcggcagtatgcaatattcacagtgacttccatttattcccaacaagagcgctggaaatcaagtttttctatttgttgagcctctcttctgtggcaagcttgtgctatgtgtttttcctaaaggttctagtcacattgttagaagcagcttccaaggtaatcatttctcatgaggaaacaggctcaggttaacttgccatcgttgcacagcacacaagttgcatggctgggattcggttccaccgcctgccttgcatactgggtgttattagcccttcttcacaggtgaggaaaccagagctcacagagcgtggatgtgttgagaccggtgcttgacccaattcatcggactagcactggaggtgtcctcctcttcctgccctgccatgataccgcactgcctcctgagtctgttcccctgtgctcttgaagctacggtagacagcatttattcccttcctgttcttcatgttccttgtctgagacagcaccacactaagtccctctgaatctgactgcaaaacctgaagtgggtctaaaatggaccatgctccagtgctcagctttttcaagacgtctgtatttctggttatagctaatgttatagctccatccaaacctggtgggtgctgtagtttactgagtactatgagtgctttatttcataggctttactaccttctctctaactcaggggttacaggtcagtaagagtcccctcaaaagacaagggctggccgggcgtggtggctcacgcctgtaatcccagcactttgggaggccgaagtgggtgggtcacgaggtcaggagttcgagaccagcctggccaatatggtgaaacccccgtctctactaagaataaacaattagctgggcgtggtggcgtgtgcctgtaatcccagctactcgggaggctgaggcaggagaatcgcttgggcccgggaggcggaggttgcagtgaaccaagatcgcaccactgcactccagcctgggcaacagagcaagactccatctcaaaaaaaaaaaccaaaaaaaaaaacaacaaaaaaaaccagacaagggcccagggataccgttaagtcatttctaagatgggtactttatcctctggtagagggctccttagagcgaggttgtgatgaggaggcagtcaagcccccgagttgatcaatcccttcaggcgagttgttctttgatcatggccatccagtccaagcacactgaaacggcacacatttgtgtgctactcaaacggagagggtctctggttttcatcaaattctcaaagggggtcatggccctccaaatctttaggaaccatggattctagtccaagttcttcgtcaaataggtagaatctgagatgcagcataaggcttgcaaggacttgcccatcatcaacacagcaagtagctgcagagccaaacttgaactcaggtctcttaattcccagaatagcacacagtggaaacacctcatcaaacattttgagtgcctgctatattccagaccctaggctggtgctgctgaggtaacgatagtcatcatgcaaaatcgggagtcagctgtgacagtactttacaacaactttcatgttgcttttacgttatggcccaggcaatattcgcagggtactccaccataaaaagatgaggctgcttgcatccagaggagcctggcctgcctggccactctgaaggccccaaagactcaccattgggcacccctataaaccattctcaacagacagggacgctttaagcgatggccttcccatggtagggaaagttctcccctaccatcttcgtgcctttcgtctcctgccacaacaaaaaggcttacacgtttcaacaccgtctctcatctcccaggtacctggcagccagaattcctactcttcctcaaaaattcagtgcttgactctatgttcccacgatctaagctccaaattcctcctccactccacctcactacccactaatgcttatccttaacagcacctaaagcttctccaactttaaatcctccttttcgtttctgacactcttattctgttctcagattcttctttttaaatttcttttctttttcttatttaattttagagacagagtcttgctctgtcacccaggctgcagtgcagcggcaggatagagctcactgcagtcccaaactcctggactcaagcaattctccagcctcagcctcagcctcccaagtagcgacaactaaaagcctgcaccaccaggtatagctaattcagatccttccttccaaccttttgtctcttactcctggctgtcctccaaggccaccactttccctgcaatcctgaactattgatgcattcttttgattctcccttgagtaaaagtcttttttgaaaggtctcatgctgggccgggcatggtggctcatgcttgtaatttcagtactttgcgaggttggggtgggaggactgcttgagactaggagttcaagaccaacctggccaacagagactccatctctgaaaaaaaaaaaaaacaaaaaacaagaaaggtctcatgctattcagctatgttactgtttagccctccattttgcaattgtcttaactaatcgtatagtcctccccacattcaccaaagattttagctcctgatgctcctttcctttcctacctctaaatcccaacatctaattttcctgccttctcacttccacttcagccactctattccgtggctctgtcctggactttttttttttttttttgagacagagtctcactctgttgcccaggctggagtgcagtggcacaatcttggctcactgcaacctctgcctcccgggttcaagcgattctactgccccagcctcccgagtagctgggattacaggcatgcaccaccacgcccggctaatttctgtatttttagtagagacggggtttcaccatgttggccaggctggtcttgagctctagacttcaggtgattcaccctcctcggcctcccaaagtgctgggattacaggcgtgagccaccacgcccggcctgtcctggacttttctcatctcctagtgctacttcactatgaacctgtttgccactttaaccaccaagctctcacaacattgcctgcactgcactggccttcaattatcagagacctgcagtttcgtggctcctccatcagtccctagccagtctgtatcccacgtttgatggcctgggctgtcgtctcatagcaccctcaatttattttgggcaatgcaatcccaagccctggataaatgctataattcaaaatatctgctactgcagcctggtggctgagttctagaaaaaagtgatccatcaacacatacatgaggcacatgaaaccaggccttccaacttcagcgtcctcttccaaagtttctttgctcttcttggtctccttccttgtctcataacttcacccataaaatcgatgtcatcaaacgatctccctgattttcttcccccctatatatctgcacgcatgttcttgtttcctaccgttttagtggaataacaggtgacctgcctctagtctaaatttaatccgttttcctgagttctgcatcgcatgcagagcatcctacctccccagggacctctccactgactcctttctcccagcctctcctttctttacaaacctaaggaccaacaaaccccctctctcgaccctctcattgccaagcttctccagagtagtctgcattcgttgtgtcatccttttcggtgccctgccaaggacgtggaatatgacagggctcagtcagtgcttaataaatctcgagcctcaaaaatacccggtaaaaagaaacccggctctccgcttcccccagagtccagcaaccccctccgctttcattcacccactttcctaccctcggctccgccttttgccgcgcctcccgcgattctcgcgagacttggtgattccgttccgcaccgccccggttgagccgcgcacttctcgcgaggttgcaggcagtgccgggccagacatggcggaaggtagggtttttttgtggagccgcgcgggaagacacggagctgtgggggcgctgctggccgtgcgaagctgccgtgggaggggaaggccgggcgtggttgcatgggggctccgcgggtctcgcgagccttcctgtctagcctctccggagcttctcgggccggggtccggagcgcggttcctatgacaacgtccctcccgcgatgccgaccccgcgggactgcggccggctgcggagccgggctggcaggtcccgcgccggtgctgcgtgcagccgcggggccccgagggcagcacgggaggctcttgattgccggcggtgccgggacgccgggggaagtaagccttctccttaggaaatcgaaactgctgtcctggcacgttctgcatccggaaggggtccatccctcgcttgcggaagagcrtgggtctcctcgggctgggttggggtgaggtggggtggggtgggggcgaggcagcagcgagctggcccacgcttcaggcgggcgcactggcggctccggctctgctgcaaccccagccttcaggccaggcgtacagatgaagacgggaggaaggggtttgcgggaagggagttggccaaggtcacactgctcacaagagggctgctcaaaccagacctctgtgcctttgcctccccgtccagtgcctaccctctggtctcgtgcacttttcatgacattgcagcttaaggcactctggtctctcagagtctgcctgtcttaatgtagcagtaattagaagccttcattgtcaaagccttattgtacacgtagggggaaagaaggcccagagacggggagttacctgtcaggaatcgtgcagsgacattgttggatctgggcagcctggttctcctcttcaccccattattggagaacagtattccttatttgacctttgtttattgagtgactgcagtgtgcttggccacgacctttcctgttggttttgagctttgactgaacccatcacttgatggatcttagatttgggcagcacctgacagttggtcggcttttctcatttgcattagacttcagataacctcgtgaaggaggcctggcgtgtgtatttgcctttattgataaaggaatttaggcaaagttacagagatagctgtgactgacacccagttggttttggggggtgtgtgtgtgtgttttgagatagggtctcgctctgkcccaccggctggagtacagtggcgcggtcacggctcactgtagcttcagtctcctgggctcaagcratccttctgcctcagcctcctgagtagctgggaccaggggcgctcgccaccacacccggctaattaaaaaggggtgtgtgtgtgtgtagacaaggtcttggccccgtgtggtggctcgcgctagtaatttcagcactttgggaggccgaggtgggaggatcgcttgaggccaggagttcaagagcagcctgggcaacatggcgaaacctcgtatctacaaaaaatacgaaagttagccaggtgtggtggcacgtgtctgtaattccaggtactcgggaggatgaggcacaagaatcgcttgaacccggaaaacggaggttacagtgagctgagatcgtgctactgcactccagcctggagtgaatggagtgatggcgggtgcctgtggtcctcgcagtaatactagggaggtgggaggatcatttgaatccgggaggcggaggttgcagtgaactgcaccagcctgggcgacagagtaagatcctgtcttaaaaaagagagagactaggtcacactatgtcacccaggctggtctcccaactcttgggctcaagcaatccatccgctttggcctctctaagtgctggggttgcaggtatgagccatcgcgcccggcaggcacccagtttttgtctttactttttctaccatatccctggagggggaaactttaggtgaatattgcctgaaggcagaggagtaagaaaaggagcaaaaacccaagggattccctgaagttgctttttgagtaaatcacggaatgttgtacacagcagacagctgttgctcacaggagtgaggcgggtagaaaggttcaggaaggtcttctgtgaggtaaggggtagtctggcgcttttgcacttaggaaggtaagttcggtgttttgggaatacattagcaaggttgagattgtggagggctgctggtttttcattcagcagctttactgagcacctgctgtgctttgcagtcgggttccagccctgaggagctcatacaggctgagtcagcatactcatcatccggcaagcgccttgagagacatctcgccagtggggtgtctctccataaacacacgaagaagacatcctttcagggttaaattagcagggggatagctaggtaagcagtcatgaagttctgacttcacagtctttctttccttcccttcccctttccttttgagggagtctcgctctgttgcccaggcgggagtgcaatagcgcaatcttggctcaccacagcctccacctcctgggttcaagcgattcttccacctcagcatcccaagtagctgggattacaggcacccgccatcataccyggctaatttttgtagagatggggtttcactgtgttggctaggctggtcttgaactcccaacctcagctgatctgccggcctcggcctcccaaagtgctgggattgccggtgtgagccaccacacccggccggccacagtttttcttttacctcttttgtgtcccaactttttgttgggatttaagctttttagaaacgatgttgcagacttcaactaggaggcattctgggtcatttagcttattaatctgaaggtgcttgctatgcaaaggaaggcaagattaggtagaaaatgtttcttgggatattaatactactgcttgtgctttaatcagattctcagagcctgctatgcttgtttggagacagttatttaaatataaataaatagcagatatctgtgtcatataacttgaatgatctgtaaacacactatgggaacttccctgataatggttggttggccatgtgagaatgtgggagatagtgcctaggaatagtaaataggatcgtgagagactgaggatacagcttcttatgtgacttgtttagagaacaaccttctttccttccatctatccatggctattcatttgaccatatatatttagctaaagtctgtcctaaaattagttttattccccaactctacatctctgtggctatcctgcttaatctaagcttcatttgtgggtttttttttttttttttttttttggagacaggatctcactccgtcacccaggctggagtacaatggcgtgatcacagctcactgcaatctccacctcccaggctcaagtgattccctcacttcagcctcccaagtagctgggagtgcagatgtgcatgccaccacattggctaatttttgtattttttgtagagttggggttttgtgatgttgtccaggctggtcttgaactcctgggctcaagccattcacctgcctgggcctcctgaagtgctgggattacaggtgtgagccaccgctcccagccctaagcttcgtttgtaagtgaactacttcaaaaggttccaattaaaagtttgcttttaacttttcctcctagattttgctctctcacagcctaatttcacagtttctagtgttccctttaagacatcaatcagatcatgtctctcctactcttcttaatactcctgcccctcaatgcccaactctcacacttctccgtaatcttaaaatatattccagttctctgttaagtattaacagggtgtgggccccacttaacacttcgagcttatttcctactttcattcactgtgcccctgccacactgacttttttgcgttctttgtgtgtgcccgacatgctgctacctctgcgtctttgtccctgcagtttccttggcctggaacagtcctccgctgtttctccacacaactgacccactttattcactcagtgtctgttcagttgtcatctcattagagagcatccctcactggaatataaaccccatgagggcaggaacttggtctgttttgctcactcctgtatctcccagcttagaatcatggctgtggttgaaggaatgtatgaatttattgagcatcacctgctagccatcaagaaaagttgcctggatacatccttagcctcttgtcaagcaaactggctggtccaccttttattatrctctgcataacctaagtctgctaggagctacctaacctacttttcatccagcccatttttgttttagcaactaaaatacaatgtttaaggccgggcacggtggctcacgcctgtaatctcagcactttgggaggccaaggtgggcggatcacttgaggtcaggagttccagaccagcctgaccaacatggtggaaccccatctctactaaacatacaaaaattagccaggcatggtggcatgtgcctgtaatcccagctgctcaggagacytgagtcaggagaatcacttgaacccggaaggtggaggttgcagtgatccgagatcgcgccaccgcactccagcctgagcaacagagactgtctcaaaaaataataataataaaataaaatgtagtgtttaagagctcagactctgcagctggacatggatttaaatcctagtttaagctgtgatcataagcaagtcaattaattgctgtcagtctcagtgtcctcagctttaaaagggggatcatctgtagctcacaagtagctgtgggaatcctaggatatttctcagttgcaggaagagcctttttccacagcgcctaatgtttcttccacagcgactgatgcttttcccacagcgcctgatgctttcaccctggtgcacagtctttctcttgagtctcctctaaaatcactctccatttcttttcctcagtaaaagtaaaaattgaaaaaaatgtaatttttttgtaaatagtatattgaacagaaaatttatcataaacttttgttagcttgatggaatttgatcagaaaaatacttttgacaacaacccaagcaamatggggaaaacattccatgtcctgggtattcattgaccaacacaatagtcactagccacatgtggctacttaaatttgattaaaattaaataaaatttaaaattaacttctcagttgtactagtcctattccaagtactcagtagccatgtggctagtagctccccctaatggacagcacagattaatagaacacttgcaccattgccagaagtgctttggatagtcctgttccagaaaatgcttcattagtggaggctggtagaaataaggaaagaaggaactttgctgtttccactttttttttttttttttgagttggagtctggctctgtctcccaggctggagtgcagtggtgcgatctcggctcactgcaagctcccctcccaggttcacaccattctcctatctcagcctcccgagtagctgggactacaggcgcccgccaccaagcctggctaattttttgtatttttggtagagrtgaggtttcaccgtgttagcaaggatggtcttgatctcctgacctcgtgatccgcccgcctsggcctcccaaagtgctgggattacaggcgtgagccaccgcgcccggccctacttctgaaatttatctgtttattgttttacttattgaacaaatgtcccaggtcattgataattatatatagtccagagacctcttaaggactgttccttttataccattcttttcttttctctccctttcctggtgactactgtcaccagctgtagctgttagctttctccttgtgaattatttttactgagaaataaaatttatccattagtggttatgtcaaagtaaagctactgaattgtgctgagatacacaggattctgtcactggcaaggtgatttgctgtaggcaatttgagatactatcatgatttacagccttgctgaaccaaatgagaaattgctatgtccccagaatctcctgttgaacctgtggtatttattgaactccatctggtaaggtactgtcgggaggaggagataaccatggaatgggtatagagggagaagtaattgatagttaaatacgaatagccagaactaaagcttattcacagggagttctgaagtctaggaggggagataaaagaaattgtatatgagaaactatattttaaggtgaagggtaaaaaatgcttaggagttactttgaaaactcagggagagattttttaaggaagtaatggggaatgtattttggataatcagggaaagtcttgttgcaggagacattgcttgaactgagctttgaaaaatggccctcctttggacatggggacatgagattgaggagaggtcactgttctaggtggaaggaattagtgggatgtgaagttggaagagtatgttaagggccagattattaagggcattggttcagcatttggattttattctgagactcatggagcgatactaccgaaaggaatcagccacggtagcgacagaacaggaattgtgtgaggcatggcgaaatgactgcagtgtagaggatggattgggaagaaaggaagtcagagagcaagctgtagcagttgatggtgagccatttggtagaggctgtggggctggtgaggactgatgggagaaagaccacagaacgtatgaaagacaggacttttgaaacctggttgaatgttgatgagagagaatcaaagatgactcaagttctaggtctggatgactcagacaaatggctgagctgctaagaggtagaggaggaatagattggagaacaagtattttgacctcacttttggacatatttgctttgcccagtatacttctatgtggtgatgtctaagttggaagtgtttccagtcaggagtttggggtggaaatggctagttagctaatatttgttatgcatctcttatgaaaccagcccaattgtcactgctatacacggtgagcttttgaaagatgtgtaagtcatgccaccaactgtaacatgaggcagacgaacctagcagagttgaattgcattcaggaaaaacgtatttcacggtaggtgcaagctactgtgccagagatgacaaaatgagcaagacacaaccttaaccttaatggaacttgcagaacagagaggggaaggcaaagtatttcaaataagcatgcatgttgctttctagttataccaggttttctcttctatattcatgattaatggcactacttttcagccagactctcaagtcagtcaccaaaaagttatctccgactccccccaagatctgcatcagtcaccaaatcccccggatgctgtacacctctcacatctgtgctttcctctctccctcgttccattagtacatagttctcaacctggagaaccctgcacagtacagttaacctgggagttttttctttttttgagatggagtctcgctctattgcccaggctggagtgcagtggtgcgatctcagctcactgcaggctccacctcccgggttcacgccgttctcctgcctccgcctcctgagtagctgggactacaggcgcccgccacnnnnnnnnnnnnnnnnnnnnnnnnnnnnnnnnnnnnnnnnnnnnnnnnnnnnnnnnnnnnnnnnnnnnnnnnnnnnnnnnnnnnnnnnatatttgtgggctgggcgtggtgcctcacacctgtaatcccagcactttgggaggccgaggcgggcaggtcacaagatcaggagtttgagactagcctgagcaacatggtgaaaccccgtctctactaaaaatacaaaaattagccaggcttggtggtgcactcctgtaatcctatctattcgggaggctgaggcagaagaattgcttgaacctgggaagcggaggttgcagtgagctgagatcgcgccattgcactccagcttgggcgacaagagtgagactccgtttcaaaagaaaaaaaaaaaagaaaagtagtagtggtggtaattaatcaccagtgaagagcttttctaatctgatgccaaggaagatagtattttctgggaagctgacactttaatgaaatatttttttgtggaagatcctaatataagcctggaacaaaaaattattcttgtagttctccaaatagaatgttatcacagcctttacaatcatttctcttttatctaatggacatagttaaagcagaataggtataaagtcatttagtcattaaagaattacatgaagagactgggcacggtggcttatgcctgtaatcccagcactttgggaggccgaggccagrggatcacctcaggtcaggagttcaagaccagcctggccaacatggcgaaatcctgtctctgctaagaatacaaaaaaattagctgggcatggtggcaggcgcctgtaatctcagctgcttcaggaggctgaggcaggaggattgcttgaacccgggaggcagaggttgccatgagccaagatcacaccattgcactccagtctgggcgacaagagaaactcttgtctcaaaaaaaaaaaaaaaaaaaaagaattacatgaagaacactaattcattgctaaagttttggctagaatagaagaactataggagtgtagagaaaggaaatgccagggtgatgtgaatctagaaagactgaatacagtgtgggttagaactggagtggctggaggggagtagagtgcatttactataggaaatgaaggagctcatttaattcctggattaattaatgactaatcttggtgttctgatactggagctgaaatctggcatcatggtgttaatgggatgcgttctggcttaagaccacaaatcttgagtctgtcttctgctaattgtgtgattttaggcaactcacttaagtgagtttcactgttagtatattactttttcaatatagttagaatctgagatgatgaatgtgaagaacttaactgccataggagacataaaaaatattaattcccactttctgtcttattgcaaaatattacaggaaagtgtacatttccttttactccatagaatgatgttgacactaatctagcaaaaagttactagggcattaaaatcttttactatacagaattttttgtttgtaagtataggtgttttagtttcatgtggctgctgtaacagatttccacaagctagatggcttaaaacaacagaaacgtgttcttatgattctggatgacagaagtctgattgaaatcagtatcactgggctcaaatcaaggtctcagtagggccctattccctctggaggctctaggagaaaatctttttcctgattcttccacctgcaagaggctgctgacattccttggctattggctgcatcattccagtcttcaaggacagcatcttcaaatttctctctgttctgtgttcacaagacctactctgagtgggtcagactccctctgtgccttccttttttttttttttttttttttttttttttgagatggagtctcactctgtggtccaggctggagtgcagtggtgcgatcttggctcattgcaacctccgcctcccaggttcaggcgattctcctgcctcagcctcccgagtagctgggactacaggcgccygccaccacacctggctaatttttgtatttttagtagagatggggtttcaccgtgttagccgggatggtcttgatctcctgacctcgtgatctgcctaccttggcttctcaaagtgctgggattacaggcgtgagccaccgcggccagcccctgctccctcttacaaggatacatgaacagttacgtgctgcataatgatgttttggtcaatgcagagacacttagttgttgttgttgttgtcatataaggtaacattcccaggttccagggattaggatattagtatcttatgggggtgtcatttttctgcctgccatggtaggtaaagtcgtgtagtttattaagtcagaagatgtctgaaattcctctgtgtgcagtttctgaatgctcaaagaccacgcatgccacatggttcaagatactaccagtgaagtgaataagatggtttctgggctcaagaaacttcttcagtgaatcagaatgccacattaggaaactggtacttttgtagacagtggggaaccagctgaaattgtttggttaggtgagctgtgttttaggaagattaataacgatgtgtgtgggatagaatagagaagtagaaggatgagaagggcaacaggaatgatgctaaggcctcaaggaaatgttggtgtgatcagcaaggaatagaaagatgtcacggtacatcccagaggaaggagtttgttgttagatttattgaggtgtaattgacaaacaataaaatgtaccaatttaaactgtcagttgacaaatatatacagtcatataaccaccagcacaatcatgctagaagatttctatcaccgtaaaaagttcccttgacctcctttgcagtcagtcccattcccctggcttctggcaatcactgatttgctttctcttgctatagtttgcctagtatggtttgttgttgttgttgttgttgttgagatggagtctggctctgtcgcccaggctggagtgcagtggcttgatctcagctcactgcatcctctgcctcctgggttcaagcgattctcctgcctcagcctcccaagtagctgggattacaagtgtgtgccaccctggtccggctaatttttgtatttttagtacagacagggtttcaccatgttggccaggctggtctcgaactcctgacctcaagtgatcctggtttgcctactrtgaaactacactttcatatggggtcatacagtatgtagtcttttttgcctggctcctttcacgtagcatattgcttttgagatacrtctgtacctcatgtgtctggtatcagtcccttctgttttattgctgagtgctcttccattatatggatgtgtgacagttgtgtctgtttaccagctggacattccggttgtttccagttgttatgaataaagcttcattgaacatttaaatagaattctttgtgtttattttgaggaaataactgggagtggaattgttggccataaggcaagtatatgtttagctttataagaaaccatcaaactgttttccagaatggttatgccattttgcatttccattagcaatgtatcaggcttctagcttctagttctccaattttttttttgtttgtttgttttttgttacccaggctggggtgcagtggtatgatcatagctcactgcagcctcgaactcctgggctcaagcagtccttccatctcagcctctcaagtggctaggactgcaggtgcacaccaccacacttggctaatttttaaaatttttttgtggagacgggggtctcactctgttgcccagctgttctcaaactcctagcttcaagctgttctcccgcctcagccttccaaacttttgggattataggtgtgaaccactgcgcttggcctagttctccagatctttgccataactttttaattttagccatactagtaggtgtgtagtggtatttcattgtgatttcaatttgcatcttaattactaatgatgcacatcttttcatgtgcttatttactgtacatttatcttgtttggtgaactctccagtttttttgctcttttttatcgggttgtcttattgagctgtaagagttcttaatataatctgtatacaagtctttttttttttttttttttaagacggagtctcgttctgttgcccagggttgagtgcagtggtatgatctcagctcactgcaacctctgtctcccggattcaagtgattcccctgcctcatcctccctagtagctgggactacaggcgcacgccactgcacccagctaatttttgtgtttttgtagagacggggttttgccatgttggccaggctggtctcaaactcctgacctcaagtgatccatccaccttggcctcccaaagtgctgggattacaggctgggaatgaggcgttttttgttggatgttttgcacatattttctcccagtctgtggcttgcctttttatttttttatgacttttcaagaacagtttttaaaatttggtaaagtcaaatttagccatgtttcttctgtaatttttttttaacagtttatctttgtttaatctgaggtcactaagatttttgctatgttttagtctggaagttctgtagtttttgttttttttttttttaatttttatttaatttttaaaaattttacctgtcaatgatttgaagctcatttttaaaaattgttttctttttgtttttgtttttaaagagacaggaagayggggtttcccaggctggagtgcagtggctattcacagatgtgatcatagtgctttatagcctcaaactcctgagctcaagtgatccttcctccccagcctcctgagtagctgggacttcatctgactctagaagggctacagttttaacccttacgtttagatatgtgattttgagttagtttttatatgtagtggtgtctaggaatagggatttgcgttttcatatggatctccaattgttctggtcccattgttctttcctcattgaaatgccttcacaccattgtcagatcatttgtatacgtcaaagtctattcctggattctgttattttccattgctctggatatctgtcttgatgccagtttgatgctgtcctatttactgtagctttatacacagccttgagtcaggtaaatgctaaacctttttctttcccctgcccagaatttttttggctattctaggaactttgcatttccacccaaattttagaatcagctgtctgtggttatgcatgcatgtaatcccagcagtttaaaagaccaaagtgggaggatcccttgaggccaggagttcaagaccagcttgggcgccatactgagaccctgtctctacaaaaaaattggccagatgtggtggtgctcacctgtagttctagctgtttgagcctaggagttcgaggctgcagtgagttatgatcaggacactgcaccccagcctgggtgacagagggagaccctgtttctaagaaaaaaaaaattagaatcattctttcaaattctacaaacacagtttgctgggatttttattgggaaggtattggatctatagaccaatttggagagacctgacatcttaacaatattgagctattgagccttccaatccatgagcgtagtatataactctctgtttatttrggttgcctttcatttctgtcagcagtgtttttatagtttcagtgtgcatgcattgcacattttgttaagtttatctctaaatattttgtatgtttggtatactattaaaaatgcattatcatagcccgtacattggtaacctagagctttgataacatgaaatgaagtaggaagaagactttgatttgaggaagatatgaagtttgattttggacttgtcgagtttatagtagcagtcagtcattctttcagcaggagctgttgaaggaaagagagatttgggtccatttttatagcagtgacagtaaagtatgggtatgcatgagaccatgttcagggaagaaaatttagaaaaagttcagatgtaggtctgcaccttgcagcactgtgccgttttagaaagtgggtagtcagaataggaggtgaagggtctgtaacaaggttaggaagaaagctagagtacagagttaggaagccaaaacaagagttttaagaatggggtggttgagagtcggaggctacagagaggttgaggagcttgaagaataaggaaaaggtcatcaaagtgggtgatttgatcattgtgactatttagtagagtgatgtgggttgaagccaagtttcagaaggttagggaggtaaggcaggaagtagtgaccaaagaggactcttaagaaatgggtggagaaggcaaagtgtatgatagactgcgcagtcaagagcataactgtggagaagagatgtttgtctaggggtgggaggcattactgtgagcctgtttctgagggtgaggaggtaagcttggagacaggcatatcttgaagatgcagtggctgctgttgtggattagagtttggtaagaagtgagaggttacagaattctaggtgttccagatagataaactgctttcttcccttttcatttggctctggctgtcattttaacgttctaattctttaaaatcaccagcagggggacagggcttgtatggcctctcagccaaatctgacctgagacctgtcgacttgtttttatgcagtccttaagctaagaatttatttatatgttatagatgtaacatataaaaataacttataaatattaactatattttaaatattttaacctggttgaagaaaaatcaaaacaatgtatcatgatgtgaaaattatatgaaattccattttcagtgttcataaataaagtatttttagggaaacagccacattcattaatttgtacttttgtgttccaactggcagagttgagtagtgccccagagactgtatggctcccaaagcctaaaatatttgctatgtggccctgtacggaaagtatgccaactcctgacctagaaggaagagtgttctaaaaatcattcttggtttctcttctgactgtgccatataacttctgaagaggtaatttgctgattaactacttttttgcagtagacattgcactctttattttaggctatttgtaatgaatgaagatttttttgtcttaagcatgttttgttaactcaagagtgatgaactatcagaaagaatacttattgaaagtctgatcatagactgcactcatggagaacagataggtattatttggaaagaaatatgagaaaattggaagttcctggcattcttcactgatacttagcgtagcttttttggtgaaactctaggttttatctattatttaaatttctaggtttgctctcctctcctctctcctctccttttttgagacagagtcttgctctgtcacccaggctggaatgcagtggcatcatctctgggactacaggcatgcgccaccatgcccggctaattaaatttctaggcttgcttttcaaatgaaagttggaaggggacaaagaaaaaaccacggctgaaaactggtcacttgatgaagaataagtaggcagaggagtagcagcagcggtaagccttactaaaccagacactgttccgagtgatttaacctatcctaatgactttacacgtacttctctgacagtggtccccaatctttttggcaccagagactggtttcgtggaagacagtttgtccatagatggggtagggaagggagtagtttcaggatgaaactgttccacctcagatcatcaggcactggagtctcataaggagcatgcaacctagatccctcgcatgcgcggttcacaggagggttcacgctcctgtgagaatctaatgctgctgctgatctcacaggaggcggagctcaggtggtcatgctgactcgcccgcagctcacctcctgctgggtgtggcccagttcctaacatgccacaaactagtacccgtccacggcctggaggtcggggacacctgctctaagatagtatcattagtctyattttccatgtgagaagactgaagcacagagaggaagtaagtaacttgcccaaggtcacacagctagtaaatgggtaagctggggtcaaacccagtcagtgagactctggaatgcgagctctgggctatcagtgtgcagggagaatcttgcaacacaggactgactaccccgggttgcctttctaagaattgtaataatagctaatatattttgaccacctactgcagagcaggttgtattctaaggttattacatgtattagtactttcagtgtttacaacatccttgcaggtgaagagaatgagtcacctgcctaaggtgtatcaaaactaggcagtagtggggctgggcttgatcccagtcagtctggccctagaacctgcacactgtaaattctctctccattttgctcagaataatgttgtactttttcttgtaagaactgtacagcttggtgacacttcaaggacacatttgcattgctgtttgtaagcagacagtattccccacgggctggtaatgtctcagccataagcactcctccattatactgtgaaatggtatggcaattgaagtagygctggtaagtgctcataagctgcctgagtgcattagtgatcctttgggtttcccccgacaaaagctgccgggtgggggagcatctgtaattttgtgactaagagccccaaatcatgctaaagccctscttttatctagcttcttctctgctcattaccttggtagtttatatcttgtgtcattgtccaggcagctgctacatatttgaatcaggaattctgtagagagactggggctgttgctgtagattttggaatttatgtgtataactgatatttaaggaaatgtgtatggtttcctagagagcagagagggggaagatggctgaaacagagctttcaggatctcctccatttgaagscttagatagaggaatcagcaactttgcagtcatttttttttctttttctttttctctcttttttttttttaagacagggtctctctctgtcacccaggctggagtcagtggtgcgatctcagctcaccacaacctctacgtcctaccaggctcaagcgagccttctgcctcagcctcctgagtagctgggactaccggtgcccactaccacccctggctcatttttgtatttttttgtagagacggggtttcaccatgttgcccaggctggtctcaaactcatgggctttagagatcctcctgcctgggccccacaaagtgctgggattacaggtgtgaaacaccacacccagcctagattgcccttttaactcttaaaagaggcacctcctaatctgccaaaatgcttaatgcataaatatttgcagatcaacagtttaagtgaaatggaaatggaaattccccagccagctatagtcatgctgggttggaggtcttgaggagcaaaagatttaggttggctagaatatggtgtgattgaaaccaaggttagagggttcaggttgcttatggaagaaaaggttaccactgtggaaacttgggggctgtctcttggcaagtgggatataattttgtagccaccaggttgaactagcaagatgtggtatatactatagccatccttttcagctgacttgcatagcatctggtgagtggctgatactattgtcagtgaactcttggaggagagggcgaggcttgggctcataattatttgtatttctcgtagagaaatatactgtgtttatgtactttgtctgtttgacaaatctgttgactgatacaagcttaaaaggagaatctgaccaagaaaataaaagatcgaaaccttctcttgcattttctgggtccagtatgctacaaacaaatacaggctttatttaaatcttttgaagtaagatactacttttctggaacattttctttacactagcttaaaccaggaggtctcctgccacactccatttgtatcccctatcagagtgctctcagggtttactgcgttggcttaattgcctgtcttctctattactcataattttttttctttggttgttttttgttgttgttgtttgttttttgagacggactgtcctctgtcacccaggctggagtgcagtggcacgatcttggctcactgcaaccttcacctcctgggttccagcgattcttctgcctcagcctcctgagtggctgggactacagttgtgtgccaccacacccagataatttttgtatttttagtagagatggggtttcaccatattggccagactgatcttgaactgacctcatgatctgcccgcctcagcctcccaaagtgctgggattacaggcatgagccaccagacctggctggttgkttttttttttttttttttgagacagggtcttgctctgttgtccaggctggagtacagtggcacaatctcggctctttgcagcctgaacctcctaggctcaaggggatcctcctgcctcagcctcccaagtatggacacctctggtcctagctactctggaggcagaggcaggtgggtcgcttgagcctgggagtgcaagacaacgtagccctggcaacatagcaaggcccatctctccaaaaaacttaaaaatttatagccaggtgtgatggcacacacttgtggtcccaggtactagggaggctgtcaggaggatcacttgagcccaggagtttgagaccaggcctggcaacatagtgataccccatctctacagaaagtttaaaatgtagccaggcatggtggtaagcacctgtagtcctagctactctcgaggctgaggtgggaagatcacttgagttcaggagtttcaggagtttgagttcaggagtttgaggctgtgatgagctaggattgtgccactgcgctccaggctgagtgacagagaccctatttctttaaaaagaaaaagaaaagattgggaaaggatgcagggaagcacgtgaaagagacagagaaccagaatcagaggatggtattgtggttgctggagtaagagaagggatggacaacagtgcaatgtggtgtcagaggtctaggaggagaaccactggcaggagtccattggacttggcaactagagggtcataggtgagaggagtttcaaggggatggtggggacagaagagggaatggcaggtgagacagtggtgtatggtagctagagatggcggggctgaggatttcagatgtgatgtggaagtgggatgctttaatagataagagacttaaactggctcgtatgctgactagcaggacccaggtgaaagagagactggagttcggagatggggtggttgatgataaagaaaggtcctgaggatcgaggagagcgatcagatttagggagcacatgggggattaaacttgggtaggaaggagataccctttctgaggaagcaaaggggagatgggaatcattgctgggatggtgggagttattggcagtagctcagttttctcagggtgttggcatggaatgaggcaggttggatgggagatgggcttgagggcagtgtcaagatttggaatgtctgtgatgtggaagagggaggggtgaagggaccaaggcccggaggatgattgtagcagcagtgtggagccgtagagaccttgattgataaagctgccagtttgcatggttgcataaaccccctatctcatcccttctcaagactccagagctcaggtgaaggagaagtttcatgacggcttcctcagggaagcctttcctgaccttttccattaacttgctttataggctctcatagctgtttttaccttctagctctctaatgtagagttgtaattttgcatttgactgttgtaattattttaattataaattataacaaaagttatttgacttatggctgggcatggtagctcatgcctacaatgccagcagtttgggaggccaaggtgggtggatcacttgaggccaggagtctgagaccagcctggccaacatggcaaaaccctgtctctactaaaaatacaaaaattagctgggcgtggtggtgcccacctgtcatcccagctgcttgggaggttgaaggaggagaatcgcttgaacccaggagacggaggttgcagtaagccaagattgtgccactgcactctagcccaggcgacagagtgagactctgtctcaaaaaaaaaaaaaaaattgtttatctttgtttttctcagtaactcagggctccagtgacaggtatgtcagagtgcacttaccatcgtgcagcgcccagcgcctcgtgaacactgataaatgcttgttgaatttagttaatcaaatacggtggttctcaaccttttaacctgccccagcgcacctgcggaagatggcatgcctccatctgaaccattattgactgccctgatcctcacctgaaggaggataggtgccagggttggagagcatagttcatatgattacagaccctggaataagaatgttgggctcagatcccagcccgtcctctcaccagccttgcaactcaggggaaatctgtaacctccctgtgtcccagtgtcctcctctataaaatggggctggtatacagcagtacctacctcataggcttgtcatgaagatgacatgaagctgggcacagtgggatgtgcctgtggtcccagctgtgggaggctgaggcagggggaacagttgagtccaggagtttgagtctagcctgggcaacatagtgagaccctcatctgtttaaaaaaaaaaagaggctgggcgcggtagctcatgcctgtactcccgacactttgggaggccgaggtgggtggatcacaaggtctggagtttgagaccatcctggccaacatggtgaaaccccatctctactaaaaatacaaaaaatgagctgggcatggtggcatgtgcctgtagtcccagctactcaggaggctgaggcaggagaatcgcttgaacccaggaggcggaggttgcagtgagcccagatcgcaccactgcactccagcctcatgacagagcaagactctgtctcaaacaaacaaacaaacaaacaaaaaacaaaaaaagagagagagattaaatgagggaatttatgtaaagcatttagaagaacatgtgaaaattaggaaattgttgttactgttagtggtttcaaaaaatctaggtgattttggtagccttttctcctggagaattcctggctttatggtgaaggattttgtggggcaagtgcctgtcagcatctttaggtacatctcttcattgtcatatactgtataatattgagcttctgagaggagaaatccctgtaaccatgatggtcttcctggttcagtgaccagcaccctgaaacaaagccattctttttttttctttttaatgaatatttaaaaacgtggagacagtacgttgcccaggatggtctcaaactcctgggctcaagtgattccccctgctttggcctcccaaagttttgggattacaggtgtgagccaccgtacccagccgtcaaagccattcttgatcctgtaggactatcactaagaaagagtggaacggtcaagtggccagtcactttgggagctttcctgtctrtgggatgagggattagtgaatgccacctgctttccagcagccayggtgaacttgattcttcgttttccttgcagaggaggtggccaagttggagaagcacttgatgcttctgcggcaggagtatgtcaagctgcagaagaagctggcggagacagagaagcgctgcgctctcttggctgcgcaggcaaacaaggagagcagcagcgagtccttcatcagccgtctgctggccatcgtggcagacctctacgagcaggagcagtacaggtgggagagctcctagacacagaaggccctttggctttattcctgggccacactacagcttttctcattcactttcttccaaaatttatttatctctaatgaggatattagcaaatcgattccctagaatagaagctccttgaggcaagatttttttttttttttttgagttggagtcctgctctgttacccaggctggagtgcagtggtgagatcacggctcattgcagcctctgcttcccaggttcaagtgattctcttgcctcagcctcccgagtggctgggactacaggtgcccaccaccgtgcccggctaattttttatatttttagtagagacggggtttcaacatgttagccaggatggtcttggtctcctgacctcatggtccgcctgcctcggcctcccagagtgctgggattacaagcgtgagccaccgtgccgggcccgaggcaagatttgtgtctctcgttcactgcttatcttcagcaaagagtgcgggagtcatggtgatagcattgctaatcaagcaggaattgacttacctgtctaggaattcagagggcaaaggtccgtttctcttgagatgatcaaagcaaaacagtcttggaactagttggagagtgcatcatgatggttgaggttgaactctggagtcatacagcttctgttagaagctcagggctgggcacggtggctcatgcctataatcccagcactttgggaggccgaggtgggcagatcacgaggtcaggagatcatcctggctaacatggtgaaaccccgtctctacaaaaaaatataaaaaattcgccgcgcatggtggtgggcacctgtagtcccagctactcgggaggctgaggcaggagaatggcgtaaacccgggagatggagcttgcagtgagctgagattgtgccactacactccagcctgggcgacagagcgagactccatctcaaaaaaaaaaaaaaaaaaagaagaagaagctcagctggcgacttattagctatgtgacttcaatctatatgacatacctcaggttcctgatctatcaaatgaagttactgctgctacttacctttgggctgttgtgaggatcaaatcaatagatgcatgttcagcacttggaacactgcatagcacatagtaagcgctcagttgttagctgtcgtttttctttttaaaacttaaattgttttcactggttatagcggcaacaggatgttagcttttgttattaagtgagttttgaggtagatgttaaaggctggatagggtttaataggtaaagacagtggtattacaagtaagggcagtaactgagaaaagcctcaaagatgaggaaatacagaggatttagatgacagggagggggccagtttagggtacttgcccatgtagaggagcagtgagaggtgggaaaagcagggtagattgcattaggatgctcaggtgaggagtttggacttggtcttctaggaagtaaagctgtgtgttttccagtttggggactgtcataatcagggtggcgttttaagaagattaacatgtgcctgggcgcagtggcgcatgcctgtaatcccagcagtttgggaggccgaggcagatggatcacctgaggtcaggagtttgagaccagcctgaccaacaaggtggcaccctgtctctactaaaactacaaaaattagctgggtgtggtggtgggtgcctgtaatcccagctacttgggaagctgaggcaggagaattgcttgaatctgggaggtggaagttgcagtgagctgagattgtgccactgcactccagcctgggagacagagagagaccctgtcttaaaaaaataaataaataaataaataaagattaacatgctaatgttggccaggcatggtggcttacgcctgtaatcccagcacttaggaggccaaggcgggcgggtcacctgaggtcaggagtttaagaccagcctggctaacatggtgaaaccccgtttctactaaaaataaaaaaaattagctaggtgtggtggcgggcgcctgtaatcccagctactcgagaggctgaggcaggagaatcgcttgaactcgataggcggaggttrcagtgagccgagattgcgccactgcacggcagcctgggcaacagggcgagaccctgtctcaaaaaaaaaaaaaaaaaaggcatgctaatgtcatctaggtgaaattgtaaagagaaaagagcagggtgagcacctgtgatgttgcgtrtagtccaggacagcaatgatgaaagactgaattggggtgctggatgtggcaaagaaacacagatgtgaatgtacataagaaggaaggacttgagccactagggggatagaagctcagtctacataagacttagtaaaatttccacataattatgacattttaaatagatcgctcacacctgtaatcccagcactttgggaggccgaggcaggtggatcacctgaggtcaggagtttgagaccagactgaccaacatgaggaaaccccgtctgtactaaaaatacaaaaattagccacatgtggtggcacgcgcctgtaatcccagctactcaggaggttgaggcagaagaattgcttcaacctgggaggtggaggttgcagtgagctgagattgtgccactgcactccagcctgggtgattgagtgagactgtcttaaaaaaaaaatcaaaatttcgaggatgcaaataacagtaaaataactcaggattcaaaactgctatcaacttagccctttctaaataaaagaataatctattacataaaaaaggaagtatatattctgagtaaaggatagttccataaattgaatagatgtagcttcttgtgaaatataatccatcgtcttttttttcctcttcttccatgaacaagtgaaaactttgtttcttactggcccagggaagcctaatgtttttctgttacagacacatctctcctactctttgaggctctttcccattagaatgcccatcatttagtttctcaattacttatcaattgattagtaattttattttgcattcattgtgttgaagtccttctaggagacaatgggaatgagactgggcagttttcttcctgtcaccttttagctagttatggtatgatcttaggactcccaacaagtctcccttcagcttctaaaacctgccctaggccgggcgtggtggctcactcctgtaatcccagcactttgggaggctgaggcaggtggattgcttgaggccaggagtttgacaccagcctggccaaatggcgaaactctgtctctactaaaattacaaaaattagctgggcgtagcggcacatgcctgtaatcccagccactcaggaggctgaggcaggagaattgcttgaacccgaaggtggaggttgcagtgagctgaggtcgtgccactgcactccagcctgggggatggagtgagaccctgtctaaaaaaaaaacaaggctgggtgtggtggctcacacctgtaatcccagcactttttgagaggttgagttgggcggatcaggagttcgagactagcctgaccaacacggtgaaactctgtctctactaaaaatacaaaaataggcggagcgtggtggcgcgcacctgtaatcccagctactcagcaggccgaggcaggagaatcgcttgaacctgggaggtggaggttgtggtgagcctggattgtgccactgtactccagcctgggcaacaagagtgaactccatctcaaaaaaagaaaaaaaaaaaacctgctgtttatctaaagaagattgaaactctatgttatctacagttaaatatcagatagggaatggagtcttcataggggactaagctgtcgagatgtggtaactgaaactgaggaatcagtttctaaagcagacatcttttaccaacgtaggggaaaaaatacctttatcccataacatgcattttgttgaaagatttaaatagtatttttatgtacatcttagtagccggaatgactgatgtgtaggttttaaaattttttaagttgagaaatgtggaagaaactggtagccttttttttttttttttttttttttaawtaaataagagacagagtctcactctgttgcccaggctggtctcaaactcctagtcctggcctcccaaagtgctgggattacaggtgtgtgccactgtgcctggcctacatttcaagttcaggagaacagttttgtcccataaggtagttaaaaacgatggctatgtgtagtcatttactgtactcattcttttaccaaacaaacctatagtttttcctattgaagtgtctgaraaactaacaagaaactctttgcctcctctccagttacaacattctggtttccatgttttaaaaggaaatactctttaattgagtggaatcaagttttttaaaaaaattactaggtccttaattgtttcaacatagaatcctcatggactggacttgtttgattttctggttttcatttgtgttttaaaaaattattattggaaattattgatgaaatccttatctttatttccctttgatatgtcagattacaaaagatagaattttgacctgacattcatgaatgtggtagaaattttctagaaacattcatttttgtaattttgtggctaaaagttatactcgtggttgaaacagtacagactgaaaatctgtttaagttattaggatgtaatactttataaatatatatagaatttaaaaattatttgtactttgtaggtaacttcttgttttcattaaattgtttacactttgtcacaggttgtgctgatacagtttgatgttctgttttgcatagagtattctgtttcttctttgacmattaataatgttctactgtgttaacagcagtttgtaataatttgaaataataaatactctcttaatcttgtgatctaatatccattggttatagcttggtctttgatagaactagaattgccgatactttcaaatgatgattaagtgtattctagacaatactcttgtagcgtagaatgtgtctctgtcaagcattatatacaaacaatattctgtttgggtttcctcttttttttttgagacagagtgttgctctgttgcccaggctggagtgcagtagcgcgatctcggctcactgcaacctctgcctcctgggttcaagcgattctcttgcctcagcctcctgaccaactgggattacaggtgcctgctaccatgcttggctaatttttgtatttttagtagagacggggtttcactatgttagccaggatggtctcaatctcaacctcgtgatctgcccacctcggcctcccaaagtgctgagatttcaggtgtgagcccccacgcctggcttgggtttccttttaaatggatgggttaattcatgtaatggtatttttttttctttttctttttttccatatagtggtttttgtgtatttagtttccaaagactttccaacctagtaaataattttaaagttgaatatgaaaataaaacatataactacaagcaggatgatgacagtgactttggattcctgccagcatagccatacggcatgtgttcgtgtcagcctagtgggtcatcttgacgtttttgttaactgcccagatgctctcctccagtagtatttgacatttcagagttaaacataaatatctatttgggaagatcttttcatataatggcatgtcataattatggaaacatgttttgaaaagaaagctttttcctcaccccattttttataagtagttgagtaaaaaatggtcaatattaggactgaatgtttctagtgagaacaggagtccagatactgggtttcatgttcatgactgcttgttagtttgttcacggtttttctgtttaaccttgcttgagcgttactgtggagcatagtagcactgtagtctcagagttgtcatcaccatctttaacctttctgtctttctctccctgatggtttagcttgttttagtctatataaaatatcctctactttttatgtgaatattaatcatcctacttaacttgtaggttcaccaccgtaagaatcccatgagaagatgtatttgaaagcagcgcatgccatgtgaattaaagccagaatttatcaatagaaaacatttctagcaacatactayaaagatgactcaccagaattcagtgctagcatataggaataattcttcgctgtaattttttcttttgcagatgtatgttgatgaatactcatgtgtttatcagctgtgaatcctagctatacctagttatgatgacatttttctaatatatgtggatctttttcttcatcagcgatctgaagataaaggttggggacaggcacatcagtgctcacaagtttgtcctggcagcccgcagtgacagctggagtctggctaacttgtcttccactaaagagttggacctgtcaggtgagcctttgagtgatcagggacacaaaactgctagcggaagggctcttggcagaaggttgtggtgtctcattttgaaatatttgtgatttaatgaaagtaaaataattaagcaattgatggcaaccatgaactagttaaataattaatgaatcagcaggttgtacttttaggtactttgtgtacctacctatttaggaggtaatacctggctaacaaatcgtaaatatttgagtatctgcaatgtccttatgatttataaaatgtaagtgtttttccgtacactcatttcatgaaaaaatatgctgtaaataaggattcatgtccagaaaaaaattttccctcaagtctaataaaaagtcctgctgtcaaattgcttaaaacttcatgctagatgccaaaggactttttttttctttttttttttttttgagacagagtctcactctgttacccaggctggagtgcaatagtgatctcggctctctgcaacctccacctcccaggttcaagygattctcgtgcctcagcctcccgagtagctgggattacaggcacccaccaccacacccagctaatttttgtatttttagtagagacagggttttaccatgttggccagactggtctttatctcctgaccttaggtggtccacccacctcagcctcccaaagtgctgggattacaggtgtgagccaccgtgtctggccaaagtactttttctagtttatcagaactgaactcagaatagttactctgaagaataacaatattctttctttaacatcaaaagatgaccattagccttcagaattttaataggtttgggttactatgtgagatggtggatatgttaatttgcttcaccatagtgctcattttactatatatgtatcccacagcattgtgtcgtatagcttaaatatacacaatacaayttgtttttaaaaaaagaattttaaggccgggtatggtggctcatgcctgtaatcctagcactttgagaggccaaggtgggaggatcacttgagcccagggaattcaagactagcctgggaagaccctgtctctgcagcaaattaaagaaaaaattagctggacaggatggcatgtgcttgtagtcccagcttgttgggaatctgaggtkgatggatttcttgagccaagagtttgaggccacagtgagctatgatgtcaccactgcattcactgcattccagcctgggcaacagaacaagaccctgtctcaaaaaaaaaaaaagaaaaaattaatagctacattggcctatttaatgttacttgttttatgtcacatttttttgtgtaggattgaagcaaatagggtggcaagtagacttgaaaacagtcattttcaaaagttgacctgaaggttgcattttcatttagtacttgcctgactgctattggaaaaaaaggggcaaagagcaaaattttaatttaattctagtattaatattcatcagaattatatggtgaggagaataacagggatgtgttctgagaatgtgtcattacgtggttttgttgtgggagcatcatagagtatagttacacaaatctacatggtatagcctactacacacctaggctatatggtatagtatgttgcttctaggctacaaccctgtacagcatgttctgtgtaactgtacagcatgtacagcatgttactgtgctgaatgccataggcagcagtaacacagtggtaagtatctgtatatctaaacatagaaaagttcagtaaaagtacaatattataattttacgggaccatcatcgtatctgcagtctgttgttgaccaaacatagttatgctgcttatgactggacttgccgaagtgattgtgtgaattatatctttgttcagaaggtttgtcagttgagaaggtactgttttccatgcgcagtgccaggaacactgagatgattataacacagtccctgccatacggagcccgtactctgctggaggaaacaggccattcacaaatcatttcagaccagggctgtaaatacagaaatgtagttagcttatatataaggttgagaacagactaagttggggtgataaaggaaggtttcagaggtggctaatacctgagtagtgttgtaaaggctaagtaggcatttatctcatggattaaggggaacatatatcagtgtttcccaactgtgagcgaactctgtctctttatgataatttctaggatttaacttgaggtccataactaaaagttgtagatacaaatgcacatacacacctacacatgtgcagatgcctgcatgccagtaactaaaaacatttgcctgggaaatagttttttactgggagggtaccagtccacgtgatcgaaatctcgagggatagctttttttttttttaaagcatagtgttttgaaaccatgtatctttgacctcatatataacagaattatgaagaccttataagatcatgtagtgttcttcacaaaatgtgtgataggatcttgattatatgaacagaatgtttatgaagactagaaggtaataaatatatggaaaatattcgactttgttagaaaaaagttaagaataagctaccatcttttgaaatctatataatcaaacattggtgatcctagtagctgtgaggctcatgaaggtggtattcttgtacatttgccagtgacgttacaaataggtatgacagttctagaaagcagttaggcagctgagctgtgaaatattcctacttttttttttttcttcattatctgacttctgggatactrtcgtaggtcactcagacagtgttaatgttcctcagttttattttaattgtgaaatatcgactgccaccaaaatgaatgagagtggcaaaaacgaaacatcgctgctctctgaaacaaaacgacacaacacagaaaattacatcaaggaataaaaagccaattttaacattgaattaaaaaattttgctttacactgaaattttttagtacatccaaacgtttagagctttaattcagtgctgtctggccttaattcagtgctgtctggccacaagattgcatcactgtgagtcaggaagttttctcgagttcaggaaaatagaatattaatgtctttaaatgtctctagactctcctccagttgtaaataataagcgtgttttgattctactataaggtttgctttcaggagtgatccgcttcaaagtaaatggtttttgtggctttcacagatcaagcacctgtgaagatagcagataggagaacatgtggcatttttactttttatgacattttaatgaaatgtatctttgaaatgtgttatgggggagaggtccaaggtggtagtggcatgtgtgggcctgttcctgttgaattgtgtgctttgcccagcagtcctgctcattgcctaaacctgggcttgcagttgctgagactgcctgggaagcctgtgtgttatgtgatacctggaagcactgacacttcatggcagcaatttgaggaagattggaaataggttcttgtaaacaggtgtataaatagcataaaagctgtattttaaaggctcaaatgttttccacaccaacaggcttgataaaatcatttaatgaatttattggtgttttgttttttcaacattaatccattcatataaaaaacattgagtggtaagcgcttttcaaggtgttagggatacaaagtgtacaaaattaaattcttgcttgcataaacttacatcttagaatgtaagaaaaactccacatttttctttttgatgttcttgtctaattgatatttctttctttcttttttttttttttttaaacaggatttcactctgtcacccaggctagagtgccatggtgcaatcacggctcactgcagccttgacctcctggcctcaggtgatcctcccacctcagcctcctgagtatctgggaccacaggtgtgtgctaccatgcctgtctcattttttatagacatgagattttgccatgttgcccaggctggtcttgaactcctggactcaaggaatcctcctgccttggtctcccaaaggcctgttgggattacaggtgtgaggcactgcacacagccttgattatgagaattttagcatatgttgatgaaatacaacaggcattatatacactttaaaggtgtttggatatatgaatcataccttgttcaaaaaagtgaaatgtttgtacctgatatgatccactgatgaaggcacaatcacttctgtaggattctttttttgtttttgagatagggtctcactgtgtcgcccaggctggaatgcagtgacactatcgcggctcactgaagccttgaactcctgggctcaagagatcctcccacctcagcctctcaagtagctgggagtacaggtgttcaccaccatccctggctaattgtttaatagagatgggctcttgctgtgttgccaaggctggtctcaaactcctgggctcagatgatcctcctgccttggctacccaaagtgttggaatttcaggcatgagccactctgcctggctcttgtataggatttttgccattaatgcataacctcaatctactcatgagaaaacatcagacccaaattgagggacatttctcaaaataatcagccagagtgtttctcaaacatgtcaaggttatgaaaaacaagaatggtttaggaagtattacagattgggtgagactaacactgaatgcagtgtagaatcctcagttggattctggccataaaaagggtattactggtaaaattggcaaaatagggcctataattagttaatggtattggtattgtatgtattacgtagttacctaattttgatcattgtactatggttatataagctgtattaataataggggaagatgagtaaagggcatatggggatgctctgcagcttttctcraagtatgaaagtatctgaaaatgtaaacaaagtagaaatttgcttttttatttcttactaaggtatctttaaatatatgaagtgatatgttaattagcttataaccatttcatagtgyatayatatatcaaaacatgtcatacattaactctatataatttttgtctgttaaaccctaataaaaaagaataaaagataaaagtttataaagatactgattgaccaagtgggaagagaaagaatatgactgttagctcagcaaagyataacaaatctgagtccacaaggaaagtattatatttacttcttggtgaagtaaagcaatttgcttctagcaaaatgatctgtttatggcctctctgtagcactttaccagtagcagctgacacgatgagaggttccaatggattagaatggctgttttgaagctagagtttgttgcatactttctcaagcaaagatcttacagttccttggcataagggctcagggtatgagtcattcagctctcctggaatgtgtcctggatagtgtcaagccattccaaacagcagaaaacatcctcctttattccttttcactctggttgggaaagctatcccctgaagcaccatctggaaagcttgcactctgcagtggaaagggcatagtttcccaaactgtgtactcggggagctgtgtgctatttaaatttttaagagaagcacagcaatattcaacatctkttggctactgtgtgaactactaggttaaggctgttcagtttcagtattaaatcatactgtgttccttcgatgacatccacgggaagtttagaatatgctcacaaaaaggagtaaaaaagaatatgctcacaaattctttgctatttctccctgcaaaggtggattcaaattctcctcttcagtataggctgattcacctctaatgaatggagtgtggtagaagtggcagcatgtgacttgagagatggcttcatcgaaggcactgtggcttcttcctagctctctcttttggattgctcattttgggggaacgttagcggccatgtcatgaggacactcaaacagccttgtggcctcctgccagcagctgagtcccatgcccaaagattctctcagagctcaaaataatctattttatctgcggttatattctttacttaatcctcatactgcttttgggtttttctcaccaatctttggttatgttaagtttgtgtttgtgttggcttattgcagatttggtttaggttcattgttcttttaatttttatttatatttagccaattcaataatttctttttatctgtattaaatctttctttgaaattcctttgaattattttttctttttgagttgaattactatcttttatctcattttcttttttttttttgagacagagcctcactctgtcacccaggctggagtgcagtggtgtgatctcagctcactgcaacctccacctcctgggctcaagtgattctcctgcttcagcctcctgagtagctgggattacaggtgcccgccaccacgcctggctaatttttgtatttttagtagagatggggttttgccacgttggccatgccggtcttgaactcctgacctcaggtgatccacccactgcggccccccaaagtgctgggatcacaggtgtgagccaccatgcctggcctcattttctaataaggttaagactatgacttttttttatagtatgaatctgactacattgcaaatattttggtaggtactgttttcattgtgatcaatttctaaatagtctattgtaataatagcaagtttttacatagcagttactatgtggtggtggtgttttgagtgctttattatgtattaactccacacagttagcaaggattggagccgggatttgaaccctaggtagtttggctgcagaattcgtgccattaaccacagtgccgtgctgcctgtcagtttggtttctttttcctccaaattgaggtgtaatggaagtacagtaaactgcccacattaaaagtgtgcaattggataagttttgacatacgaatacacctgtgaagccactgccacaatcaacataaacatttctrtccttgctgggtgtggtggctcacgcctgtaattccagcactttgggaggccaagttgggtggatcacttgaggtcaggagtttgagaccagcctagctaacatggcgaaaccccatctctactaaaaatacaaaaaattagccgagcatggtggcacatgcctataatctcagctacttgggaggctgaggtaggagattgcttgaacctgggrggcagaggttgcagtgagccgagatcgcgtcattgcactcccgtctrgacgacagagtgagactctgtctcaagaaaaaaaaaaaaaactaacaaaaaacatttccatccttaaagctttcctcatgtctctttgcaatccatcccttttgccatccacttctgcagctaaatgctgatctgctttcagtcattatagattagtttgcagtttctaggcttttatagaagtgcaatcatagagcatagagtcccttttgtctggcttctttcacttcttttagcatatagattttgacattcaccccacaccttagtatgttgctttgtgttttaattattcattccttgttattgaatagtattccattgtatgaaaataccacactttttttttgcatttacctgttgatggacatttgtgttctttctgggttttattagcaagaaaattacctgtattcagttgtgtaaggcctttgtgtagacatgtttttatatctcttgagtaaatatctaggagggactgtttaatgttaagaaactaccaaactgtcttgcaaaatggatgtaccattttacattcccattagccgtggatatgagagctccaggtgcttcacatcctgactaacgcttgatataggcaggttgttttggtttttgtttacaattttagccattctaatggatacagagtgcatggcagttttattttgcattcccctgataataatgctgaaccttctttgtgtgttattgacaattttatattttcttataaagtattcacatctttggccttttcaaaatgtggcattgtattgagttttgagtattgagtattaacagttctgtatataatttagatacaagtcatttgtctgaaagcaagcatcctttgttcttgatctcagggagaaacaatgagatcttttatcattttgtatagattagttgtaggtttttcttggatacgctttatcaatttgagtattcctggttttctagataagttacctgaattggtttttgaattttgccaaacactttctttgacatctatagaaatgattatataatttttgatgaattacagatgttaaactaagattgcattcctgctgtaaaaacctgtttggtcattatatattacccttttttatgtatgttgttggatcctatttgccaatattttgttmaaaattttacaacagtaatcatgagggatattggtatgtaattttttttaatgtctctatcagattttactattagggttatataggccttatatgatccttcattgtctgttttctgaaaatgttttctaagattgatgttattgcttatttcttgaatgtttgatagaattcaccactgaagtaatctaagtccagaatttgctttttgggaagctttttgaaaacaaatttttaaaatatgtattttgtatagatataggtctattcagatttgtttcttctgtgtcaggtttgggaagttttgtttttcagaaatatgtctatttaagttgttgaatttgttactatgaatttgtttgtagttttctccttttaatgtctgtagcaataactcctttttcattcttgggtattggtgatttatgttctcactctttttttcttgataagtctatagaagtttggcatttttattatcttctcaaagaatgagctttggctttgttaattttctctgttggttgttttctattttattgatttctttttttttttttttgagatggagtctcgttgtgtcgcccaggctggagtgcagtggcgctatctcagctcactgcaacctctgcctcccaggttcaagcaactctgcagcctcagcctcctgagtagctgggattgcaggcatgcgccaccacgcccagctatattttattgatttctgtcctttttttctttctttggattactttgctctcccgttctccttttttctccctagtttctcaaagttgtggaacctgagataatttattttagatcttttctaatacaagtatttaaagctttgaatttccttctagctgcgtcctgtgaattttttagtagctgggactataagcgcatgccaccacacttgactaattaaaaaaaatgtttttttgtagagacagggtctcactgtgttgccctggctggtctcraactcttagcctcaaattatcttcccacctcggcctcccaaagctctggattcacaggcgatatccactatgcatagcctagttctatcaattccttaaaggagagtggtaacatctataattttagaattgtctagttctccttttaatttttgtcagtttttctgcatataatttttagcctctattatgtacatttacatttataattatgacttcctaaggaattgttgcttttatcattttaaaataatttttgccaagttcagtggctcacgcctgtaatcccacacttggagtggctgaggcaagcggatcccttgagcctaggagtttgagaccagcctgggcaacatggcaaaaccccatctcttccaaaaatgcaaaaaaattagccaggtgtggtggcactcacctgtggtcccagttacttagaaggttgaggtgggaggatcacttagcctgcaaggcagaggttgcagtgaactgagatcacgccactgcagtccaccttgggtgacagtgagaccctgtctcaaaaaaaaattatataaatatatatatacacacacaccgaagccataggagaggaacaaaacggggaaactcatccagtgcagttgctgcttcaagtttcgcctccctctcagttcagctgcttttgttgacttttccaaatctttaggtcgttgttgttttgtactctgtccagaatttttagctataatcagttaaaatgggatgggttgttccactgccataacagaactagaacctctgtccttttatttcattttgacccagagattatttagaaatatggtttgaggtttaattttatttccaggaggttatatttaaggatacatccttaaattgactaaagaggatgttatttattgataaaaatgatactgtctaccaagattttttaattctatgaagcaaaaacttttctttttgagacagaatctcgctctgtcccccaggctagagtgcactgatgtgatcttgggtcactgcaacctctgcctcccggcttcaagagattctcctacctcagcctcccgagtagctgggattacaggcatgcaccactacgctcggctactttttgtaattttagtagagagggrgttttgccataattggccaggctggtttcaaactcctgacctcaagtgatccgcctgcctcggcctcccagagttctgggattacaggtgtgagccaccacacccagcctaaaaagtttttttttttaaatataaaacaaatcctttaatttttcaagtgtttaaaaaaacaagtttatacttaagccagccttgaagataagcacaaaatttaccagtttatttwaaaaaaaaaaaaaaacgacaactcaagcacccactctgtgcatagcactattctaggtgcaataaacgggaatcttaaccttagaaatatgagtccactttctggaattgtattgtctccttttccagagagtaaaaataaataaaatcaccattatttactacagatctgcctcaaaccacttctggttcacagaaaagctaatttccaccaaattaaagatgcaatgaactcagttcctgctttcccaaaaacacgaaagcagaattccttttcactaaaaaaaaacaaacaaacagttttccatgcaagggcagtttgcttctaataagtattaaaaaaaattttttttcctctagcttttctttaaattttcttcctctcatattgccttttcttgtacaagacaaaccaggtatctttttatgctgtttttcctttcctaagaaaagtattgcatcttgaagacaggccatttccaagagtagtgataaaaaataacattaaaaaaacttcaccatcctggctaacgcagtgaaaccccgtctctactaaaaatacaaaaaattagtcgggcgtggtggtgcgcacctgtagtcccagcttctcaggaggctgaggcgggagaatggcgtgaaccccgggggcagagcctgcagtgagccgagatcgcgccactgcactccagcctgggcgacagcgagactccgtctcaaaaaaaaaaaaaaaaaaaaaaaaaaacttcaaaggtgagtcacttacatcaccttgatgaagtaaaaaaaataaaaagcagttggcactaagatagctacttccaaatatctgtgtctgaacaattttaaaaactgttcattttgtaacaatgtacctctagtccaaggtaactatgttttaaaaaattttggccaaaaaatttacaaaaaccctttcagttcaacctaataaaagtgatatctagaaaatatgccacattattaagtctgtcttaaaaagttcagattctaaagcattgctgaggcacagtgttctggaagacaaatgtgcttctgttggcgtggtgttagatacaaagcatccatgacaggcacctttctcctgatgctgtgggattgcgagagaagagtcagacgtaggcccccaggcctgcatgaaactgtgagacactgtaccagctgctgaaacttgggcctctcccccggatctaaggcccagcaacaggccatcacagcaaatggttcatcaggacagttgattggctgggctattcggtaaccatctttcaggtatgcggccatctcgaaggggtcagtgtccatgtagggcgtctggcccagagtcatgagttcccacagcatcactccaaaggccccacacatcactagtgctagaaaactcgttattaaccagactttcaagagccatccaacaaactggcctgttttcattgtcccccagacagtgatagtccatgagacggcattgtctgtgatcttaacttgaagtgtgtcatcagtgatacagttcctagcagccaggtctttgtggatgacttccgttctggccaggtagctcattccacaggcaatctgaatagccatgtgtaccaggtcttgttgagaaattgcctgtggattattggcctctactaacttgcactgccgtaaaaacaagtgaagattccctcagttcatgtaaggcagtgtcaccatgggcttttctcgtatacacccatgagtaataggaagaagatttctgtgatgaagactttgcagcttacgactttcagtgagcatcattgtcacctgaatttcagaagcttgatctttgtttcgaccaatgcttgtttttctttatttggatcttttttatctattaaaatcccatggaaaatatgcccaagagtaccttcttggagtacatcttttattagagttatcctgtccctggatattgctatatccttcaccttggctttggcctccaaaagagtgacacttctcaagtcgttcttctctatccgcaaggtaggataacctgaggagctggtgataggagttggattgttgggtgtgtcagctytcggatactgagtcgtctgggtggatggctgagacaacccttgggaactcctgctggcactaatgctgtcatccagttcaacccttttcataytatgaaggtgcaaaacagctaatattattgctacgagaaatattactgcacaagaaaccctaccctaatataaaacacgcgtagaagtggttggagctgcgtgtcagggccatttttggtgcacattttccttggtttaaaatttaagacggtaaaattctttgaagaattgactgtcaagttgagctgcattagtatcataacttcagaatctactttgccagtacaggaaagctctacccgaaatactgataaagtgcgtagaacttctccctgaacagaaatgttgccctggggcaggtccattgccaaaacattgtccgcttggaatcccagcttacattcaaccttggacttcgaatgccaggtgaagtgcaggaaatttgtctcactgggtactaacagaytaaaggacagagcgtagtgaataataaggtcatttgtcacataataaagttctgcatcaagaccgatcagccggtgcacctcatcctcactcaggtagaggctcacgctgggccccgcggccgccgactgcagctccggggtccgcggggcggcgggggcggcggcgccaggcgcgggcagcaggggtagcagcagcggcggcggcggggccttctggccgcggggcaccccagccacgcctcccggcgcctggccgcccgccgcaccgccgcctacccctggccccagccgctcacagccctgagcctagggcggctgcccaattcatcaagccgctagcctgtggcagccagcagcggcttcagacctccagagcgcgccgccacctccttggcggcatcgtccggaataggggaagcaaaaaattttatgtgaagtagattgagaaaacaatagggctgggcatggtggctcacacctgtaatcccagcactttgggaggccacagtgggcagatcacctgaggtcaggagttccagaccagcctgaccaacatggcgaaacctcatctctacaaaaatacaaaaattagctgggtgtgatgacgcactcctgtagtctcagctacttgggagtctgaggcaggagaatcgcttgaattgggagatggaggttgcagtgagccgagaatgtgccactgcactgcagcctgggtaacagagtgagactctgacccaaataaaaagaaaaaaacagttggaaactcagagaatttaattaaaccagagtcataataggagattcaagacacctttctcagctttttacagattaaaaatagaggatttaaaaaacaaagtcagccaggtgctgtggtttatgcctgtaataccagcactttgggaggccaaggcaggagaattgcttaaggccaagagttcaaggccagcctgggcaacatgacgaaactctttctctcctaaaaatgcaaaaattagccaggcacagtggtatgtgtctatagtcccgtttactcggcaggctcaggtgggagaattgattgagcctgggaggtcgaggctgtagtaagctgtgattgcaccattgtactccagcctgggcaacagtggctctgtccctaaataaataaagtaaaaaacaaagtcagtttactcagtatgtttcatttaatggttaattgcatacagatcagtttattcccatccatttcagatgtcttggaaaacatttatttaaaattcaaaccaaaacaaaaaactaggccacatagaaaatcctaaagtctccaaagtgtatttacatgcatcctggcctgcagtgaaacgaagtcagaagtttcagtgttattttacttttcatccttgaagtcagagatttttctggcttgcatgcagggccttctgagagatgattacctccctcacgcaggactcggaggccaactgctttctcttctgagtctactccttttagagagaactcgtgctttatgcagtcatctgacttttacaaccacttgcttaagtagattggaagcagacagtgtggacgatttacccacaagtacccagttgcagcacacactgtccttcctgatccttgttctctgcctacccttataccactggctgcttcgtctgagtcacaaagtgaatttattctcagtgtattttgtagatgaggggaagagtcacggcaggagtgggaaagcttgtaaatcacttgaacctcattttgtttgaaatatsaagccctcccaggaaatccctactgaaagtagtttaaaaaagttttttgataatctaggtttttgtttattacttgtacaggtcaagattaaccgggcaagtttgcaaatagtatttaagaaactgctactgtagggaaggtgtttgagggtgttggtgctggggattctctcagcagataggaacgagctgtcttcaagatcaggccatgtgagtctagtaggatgtgttttgggatttttggttgctgtggacaaatcacatggcctacattttttttgttgttcattacgatgactactgaggtattgaacccaatttacaaagcctgcttagaaatttggcctacttccaagatctactatggtgatcttagacagcttagctgaagcacctaggttgtttaaataaatctaattagctttctgtctggtgttaaaatgttttctcttttaaaacattttaaaagtgctactactggccgggcagggtggctcacgcctgtaatcccagcactttgggaggccgaagcaggtggatcacctgaggttaggagttcaagaccagtctggctaacatggtgaaaccccatctcaactaaaaatacaaaaaaattagctgggcatggcagcaggcacatgtaatcccagctacgttgggagtctgaggcaggagaatctcttgaacccgggaggcagaggttgcagtgagctcagatcgcgccactgcactccagcctgggtgacaagagcaaaactctgtctcaaaaaaaagaaaaggtgctattactatattattcagtgagagaaaaaagaaaaactttaacatagtaactacaatattatcattttagtgtatttcactttttctttttctttttcttttttttttacttttaatatctggttgttttaggagatggtgaattaacctggttgcaggtaagtcggggtcttcaagtccactcacttgacattgcccccttcaagctgctccttcccactctagttggaaaggagagtaatcagagctaatgagccaattcctaattatgaagttaataaggtgttcctggtccttgttgcacctttcctaggtaatcaagaatcaagtacggtttctgaaaccttagtgagcatcagaatcacatagaggacttgttaggacatgtgctgggccccatctctggtttctcattcagcaggtctggggtaggacagagaatcagatttccaatcagttatcagatgaggctgaatctcctggcccaggacaacaccgtgagaattacttgcgttgaccatgattttaagtattcctctgaccatcactcttcttattctgactaatcaagagttaactctggttgaaataatagtttagatattttatactatgattctcatcccaagcatttccccaagttgctgtacagtctttattttaacttaaaaagattgcacaaataatgcatgttccttaaataaaaataaagctaaaagtaaaattaagctaaaagaaaaattagttataaattccacctgggttgatattttagtatatatccttccaatctcttgagagacagacacagaaaaatgtgtgtctgcctctctatgtgtgtagtgtgtagtgtgtgtaggtattatatatatatgtatgcatgcatacacacacaggtgtatcttaacaaaaagcaagacctatttttttttctttttctttttgagacagggtcttgctctgccacccatgctggagtgcagtggtgcagtcacggctcagtactgcctcaacctcccggctcaatttctcttcccacattggccccttgagtagctgggactacagacacatgccgccactaatggcatgtgcccagctaatttttatattttttggttttattttgtttaatttttttcttctgtagtttttggggaacaggcagtgtttggttacatggctaagttctttagtggtgatttctgagattttggtgtaatttttgaatttttgtaaagacagagggtttcaccatgttgctcacactggtcttgaattcctgggctcaagccatccgcccaccttggcctcccaaagcattgagattacaggcgtgagccactgtacccagccaatgagatcttatacaagtatttttagcctacttttcaaaaagcctatgtagtaaatatcttatgttgaatatatatctatctagttttcattgcatttgttcagtgtgtatgtatattgtaatttatttaattagttctccattgttggactcttacgatttttgttctagttcttcattaataatattgtgctgagcatcttagtacatttttctttatctgtccagttattttctttggataatgtctacatatgtagttgctgtgtgaaaggttatgttctttaaaaaatctttgctagtctgagagataaaaaaatgtactctgatttcagtttgtatttggttatcagtaaggtttactagccattatttatctttgtgaattacctatttgtatccattgcccatttttccattgggtatccgtctttttatttttatttgtaaggtctttttatcataaagaatgttaactcaggctgggtgaagcggctcacgcctgtaatcctaatgctttaggaggccgaggcagttggattctttgagcccaggatttcgagaccagcctgggcaacatggtgaaaccgtctctgcaaaaaatacaaaaattaacctggtatgctagcatgcacctgcggtcccagctactcgggaggctgaggtgtaaggaccacttgagcccagggagttcgaggcttcagtgaggcatgattgtgccactgcattccagcctgggtgacgtagtgagaccctgtctcaaaaagaaaaaaaaaataatgttaattctttgtcatatgtttcaaatattttccccaatttattygacatatctttagtaggtttatttcctcactcactgcccactgcgaaagtttagtcagatgttgcccagactgctgagtcaccttttttttgagacggagtctccctctgtcacccaggctggagtgcagtggctcaatctctgctcactgcaacctccgtctcccgggttcaagcgattctcctgcctcagcccgagtagctgggattacaggtgcacgccaccaggcccggctaattttttttgtatttttagtagacatggggtttcagcatgttggtcaggctggtctcgaactcctgacttcgtgatctgcccgcctcagcctcccaaagtgctgggattacaggcgtgagccactgcacccggccgagtccccatttttaatgactgtgtaatattcctttaagttgggtatactgtcatttactttattagsctcaaattttagggatcccttgagaaagtctaagcatgtcattctatgctttttcagttgttctctctttctttaaccagatgctaatcctgaggtgacgatgacaatgcttcgctggatctatacagatgagctggagttcagagaggatgatgtgttcctgactgaactgatgaaactagcaaatcggtttcagctacagctcctcagggagaggcaagtcacagcagatatattcaagcacctcagatggtggtggctgagctttaattatgccgagctctgggaaaacagcttcttctgctaatgtaaataacttggcaaggtgttcctttaaaggcgatgctggggacagatgttacctcccttgctttgtgttatcttgtagctaaattttgctaaagcttttgctattctcttttctttcactggtctgttacctgaaattacataatcgtataaactgaaaaattaaatatgaaataatataatccaatgtycaaactttcagctttccttccctttctgtttcccttgacattttactctattttctgatatatcaagttgaatgaaatccttagtcatagtctctttgttggaaacaatgagtgcctaaatgaatatgtgaaaatattgtccaaataagtgtcatagccagtgttccagagatctcacttcatttaagttactgcattttaggttgtcaaggagatagcatgctgtgtttttatattacattttctctgttgctctcccaagttggcattttagaacaacagaaaacaaaacgttcactaaataatgtcagacgagatgtccgggagcgtctttctattggagctgtggctcttggtaatcagcttgctgatggagtggctttttacagcatttagtgatctttgtattcccttgggtgcataaagtaatggcttttctcctgggtgagtgaagggatggtttcagtcatcaggaggcactccacctattgctgtgttttccctagagagactttgctgcctagagctgcttgctgttttcgtcatgggctggtgttttcccaggagggctcactgtgccccacatgaaatcagtggacggcttactcctgtctgttattgatgtgggtttgagtgcattttaatatctaaatcctataaataaaaaacaaaagcaggtccacagtctataggtgcatacagcattaggctattagcaaagctgatttgattattgaggacattcagttaactgtttctttcatttgtttgtttgtttgttttggtgaggagttttggtgatagtgaaatcagactgattttaattagattgagtatgatttatgtctttatatgttttccagacttcctgagctttctcctgttgaccttgtcagacttgcttatgtaaattaaattgcttttgtaaaaatgtcttggggttggagtagttgagataattgtaatctgtgtaatggattctttaattaaactgtttgttgtttgttgaccgagtaggcttcataactgtcaacattaccagatgcttaattttgtattgttagatatgagtatcgagttattatctgtcatggctttcttaagagctggagtggaagacaccgggagtggagtcaagggttggcttttaaagggtcacagagtgccccctgctgtccttggaaggaattacatgcttgagataatgaaagggtgctagcgacgggtgcggttcagtgtgaagcagccgttgctctttttgtaatgtggggatctcgccggttttggaatgctagcactgatttgatgaaaaggaagtttttatagtaagcatcaggaaaatctyttctttttttttctaccacggagggcacactgaagaaaatactcttaatttttttttttttttttttagaagacagcctcactgtgtcaccctggctggagtgcaatggcacagtcttggctcactgcaacctccgcctcccgattcaagcgattctcctgcctcagcctcctgagtagctgggattacagacgactgccaccacgcccagctaatttttgtatttttagtagagacggggttttgccatgttggccaggttagtctcaaactcctagcctcaggtgatccgcccgcctcagcctcccaaagtgctgggattacaggcgtgacctaccgtgcctggctaatctttttaaagagataattaatgtatactaaaaaaagacagttaatctttttctccttacaaaagtataatacatgttcggtgtatgatatttggaggatacagaatgatataaagaaaaaagtcatttgtaactaaatcattgtttaccttctgtcatttttcttttcaataatttttttttcccacatccactcaagagtgatatgaaaactatacagcagtttgtgggacgtttaaatatatgcttgatgttatactttaaaagtcaccaacatggtgaaacccagtctctactaaaaatacaaaaaaattagccaggcgtggtggcgggcacctgtaatcccagctactcaggaggctgaggcaggagaatcgcttgaacctgggaggtggaggttgtggtgagcctggattgagccttgttgctccagcctgggcaatatgagtgaaagtccatctcaaaaaaaaaaaaaaaaaaagttaggtttatcgtttttgtatctctgtgtcctttctgtactctaaagttaaaaataataattaaaaaattcccttcgggtgaaagtctgtctgtcttgctattttcaaagagaatataggaaccgagaatcttaatttctaaataagattacgtgttccttggttgcgtaaatcatgtcagttactatttataatctatccaaatggcaaatggcactctggagatcctagaattggtgacagtgaaatgtctgccagctttaataaaagatctgctttcgtgaaacatatttgagtcccttggtgcaatgtcatttgacagtgaaaaggaggagagtggaattttcaggttctcagcaaatgctgtaaaggtgctttgtaaagtgctctgcaaatgtgagttattacttcctgagatcatactgtgtattaggctgcctggtgttaggatgttaggaaggcagattgaatattagttgtaaaaatggtaaaagcttctgaaagctatctgaaaagaggtttttttctgctggaatgctctgatttcatggctgaggttagagtgactttgtcagacattgctgtggtgtgctacaggtttggagaaaccaatggtacrgaaaactgaggcttagaaatataatgctgttgactgggtgtgatggctcacacctgtaatcccagcactttgggaggccgaggtgggtggatcccgaagtcaggagatcgagaccatcctggctaacatggtgaaacctcatctctactaaaaatacaaaaaattagctgggcgtggtggcaggcgcttttagtcccagctacacgggaggcagaggcaggagacaggagaatcgcatgaacctgggaggcggaggttgcagtgagccgagatcgtaccactgcactccagcctgggcgacaaagtaagacttcatcttggaaaaaaaaaaaaaaaagaaataaatataatgctgttgtatgtaacttacattcttgtttattattgtaacttaacttactaatgtaacttacttagatattgtaacaacatgatttttaaagtgccctgggagagatgcttccttacaccaagtcagtaatgttaattaaaaacaaagcacccagtctgccatggtgaaaccccgtccctactaataatacaaaaattagccggtcgtggtggcgggcgcctataatcccagctactctggaggctgaggcaggagaatcacttgaacccaggaggcggaggttgcagtgagccgagatcatgccactgcactccagcctgggcgacagagcacactctgtctcaaaaaaaacccaaagctttgacagatcttagtgtaaagcaggtgcctgcatttactgctaaacagagaaatgactccaagattttattcttgctcctagcctctccttcgtgatgttttgaaagtgtgttgtgaggtggggtgcggtggctcacgcctgtaatcccagcactttgggaggctgaggcgggcgggtcatgaggtcagaagatcgagaccatcctggctaacatggggaaaccccgtctctactaaaaaaaaaaatacaaaaattagctgggtgtggcggcacatgcctgtaatcccagctattctggaggctgaggcaggagaatcgcttgaacctgggaggcggaggttgcagtgagccaagatcatgtcactgcactccagcctggcgacaaaggtagactccgtctcaaaaaaaaaaaaaaaaaaagtgtgttctgcattctgcccaggtctttctcatgaccttccttctttcttctgccatcacccattcccatggtctttttctacgtctgttacctaaagcccatctgttaagattgggaattatctgctagctagttatggttaacagtactgaaatccactaatgtggattattaaaattaagtgatttccttttgtgatttttccttagtaaaggaatttcaggttttagagacgagaacggctagtagagggacctcaaacttccgagcatatttactacatacctcaagctgtgctgagtgtaactagttctcctccatcttgacaaacacacaagtattcctcaaatatctgaagtagagtaacatctttattttatagaggaggagagaggggcacagagagctcaagtaatttggcccctaaaatgtaatgggtctccactcrggtcttttttacctcattgtttatcttgctctgtccaccacattctgcctttgtggttagaaaagagttttggtggaggctgctggcagggaaaacaatggtggatgtcaggaaatctcgtgaaaccatactagtcgtctgtgactgcccttggaggtgaacctgatttggagggagcagtggaggcgagggaggtgaagggctgttccctggccaccttttccccatgggcctggtctcatgggagactccctaaggcttccaggaattctggcatagaggaagtgtggtctttccaatgccatatcttccagactacaatgtggtcctgcttttgctaccagagacctatttgcctgccttcagctctctcttctctgatgtagttgatgtttttttttgtttgtttgtttgtttttgttttgttttttttttgagacagagtctctgtctgtcatctaggcaggcgtacagtggtgcgatcacggttcaccgcagccttgaactcctgggctcttaccgcagccttgaactcctgggctcttacttcagcctcctgagtagctgggactacaggcacatgctaccatgcctgcctaatttctcaattgttttggtagagacagggtcttgctgtgttgcccaggctggtcttgaactcgtggccacaagtactcctcctgccttggcctcccagagtgctgggattacaggtgtgagcctttgcacctggccgtgtttccttattaatgattctgaaagagtcttgtttttattattatgcggctttatgaggacatccattgtagccagtttttctctattttggtgtactgtggttttgttgttacagtagaaatctgatttttttggtgtggggggtgtactatgatttggctattttttctaatttttttttttttttgagacgagtcttgctctgtcacccaggcttgagtgcagtggcaccgtctcagctcactgcaacctctgcctcccgggttcacgtgattcttgtgcctcagcctccccagtatctgggactacaggcagcccagctaatttgtttttgtatttgtagtaaagacggggtttcgctatgttgcccaggctggtcacgacctcctgagctcaggcaatctgcccgccttggcttctgaaagtgctaggattataggtgtgagccaccacacctggctgatttggctgtttttttcaaaacattatagatattttaggtgagttttttcttttttctttttttctttttattttttttgttgttgttgttgatggagtctcactccgctgcccaggctggagcgcagtggcgtaatctcggctcactgcaatctccgcctcctgggttcaagcaattctcctgtctcagcctcctgagtagctgggactacaggcgcctgccaccacgcccggctaatttttgtatttttagtagagacagggtttcaccttgttggtaaggctggtctcgagctcctgacctcagtagatcctaggtggggcttttaaaatacagctttattgagttataattcacatatcatacacattcatcttataggagagcttttttttttttttttttttttttttgcgacagagttttgcctttgtcgcccaggccggagtgcaatggcacgatctcagctcactgcaacctccgcctcctgggttcaagcgattctcctgcctcagcctcccgagtagcttggattacaggcatgcgccaccacagccggctaattttgtatttttagtagagatggggttcctccatgttggtcaggctggtctcgaactcccgacctcaggtgatccacccacctcggcctcccaaagcgctgggattacaggcgtgagccactgcacccagccgggagagcttttaaggaggtgttaattattgagcatagagcctcgtatttgaaactatttctaagacacactgtttgcatcatgcagttgtgggaactaaagtggtgttccacacagttaaattttctttgaaggacagaggttgatccattttgtgcttgattcgacaattacctgtctgtgtgatcagcgggtgtcgtatgtgtgctgttaaggcagttggggtattatgcttaatcagtttatttgcatgttattttgattctgaccagaatggagcaatgaaatattataatgaaattctagtactttttaaatatgggagaccaactgtaatttattcataaccctttgcttaaccttatcccatagtgttattaataggacatagccagccagtacaaagatgatcgctttggtttgttcgtttgtgaattatttgtccagtaatactcctcatgatgaatactctcttacagatgtgagaagggtgttatgtctctagtgaatgtcaggaactgtattcgcttctaccagacggcagaggagctgaatgccagcacactgatgaactactgtgcagaaattattgcaagtcattgggtgagtgaggttgagggtgtcaacaaagcactctagctggcagtcaggagaccgccgctggggacgtagttccatggaaagtgacctctctggcacctggttttctcttgttacacaattgaagaataaatagtttgattagatgatctatgagactcttttcaactcaaattctggtagttctgtgatttcggagccaaaggacaaaagatagctcaggtctggccaggcgcggtggctcacgcctgcaattccagcactttgggaggcccaggcgggcagaccacttgaggtcaggagttcgagaccagcctggccaacatggtgaaaccccatctctactaaaaatacaaaaattagctgggctcagtggtgcgtgcctgtagtcccagctactcaggagactgtggcaggagaatcacgtaaacccgggaggcggaggttgcggtgaactgagatcgcgccactgcactccagcctgggtgacagagcgagactccgtctcccgcccccccaaaaaagatagctgaggtccagaaacaggcttggaagcatcacctgccttcaccctccatctgtggaagctgctgctgagctgcaggagtagggtgtggctccacggccagcaggccctgcagcttcagcagcacagtttcagagcttgcccttgctctcctaatcaggcggagagcatctttcagtttagatttccctttcttaggttgtttcatcataaagaacagtgtttacatttttttttttttgagactgagtttcgctcttgttgcccaggctggagtgcaatggcacggtctcagctccctgcaacctccgcctcccaggttcaagcgattctcctgccttggcctcctgagtagctgggattaccggcatgcagcaccacgcctggctaattttgtatttttagtagagacgggggtttctccacgttggtcaggctggtctcaaactcccaacctcaggtgatcgatccgcccacctcggcctcccaaagtgctgggagtacaggcgtgagccactgcgcccggccagtgtttacattttgttgttgttgtttgcagttttagaatattagggctggtgctaccttttgcaaattagtttctgcgaattgtttggtattcaacaacactgtgggaaaagccttagagtttcagaaaaggcggctaaagaactggattttaaggcattgaaacaggattggtaacctttcttttaaaataggcagaaatatagagatctgcaataatagggaccagctgcgactcagtggagtgacttgtttgtggaagttggaattgattttgtaactgccatctttcagggggtgggaggaggactccctgctctcatgtgaggctcccttggggygcattcctgttagaggtatgcatggctggtgttttgccacctcactgggaggcacagtaatgctggaggagagtgaggctcggaacgtcagccttctggttccccagccatttaaggactgtctgaacttgagcaagttatctaatctctttatgccataatattttcttctgtaaaatggggatgttcaagtacttacttcattgggttttggggagaaataaatgagttgggaaaggttaagcccttaaagaagggcctgactgatgcatttgagaggcttgctaaatggtggttggattcattgccttgtgtctgttctgcttttcactgtgttgtgaattctcaggacgacctgaggaaggaggatttcagcagcatgagcgctcagttgttatacaaaatgatcaaatccaagacagagtacccgctacataaagccatcaaagtggagagagaagacgtggtcttcctgtatctgattgaaatggattcccaggtactgtagctgccttttccattcttcatttcccgaaactctaatgcacttgtctttctccgtggtacttctcacttccttccgagccatgactggcacagtctttaacgtacggatttctactaaatagtttgttcaaggcaatctgagctttttctaacatgtttctcaaaattcttccagccttagcccattgcccaatttaaaaacctcttaaatgcttttaggtagtttttttttttttttaaacgcttcttaacttttaggtgccaaaatctgtgttagtttacttttgctgctataataaattaccataaacttaatggcttaaaacaacacaaatgtattgccttacagttttgtaggttggaagtctaggacaggaatcactggcccaaaatcaggatgtcggcaggctgtgcttctttccagagactcaagaggagaatccatttcctgcttatttggatctttggcagaattcagattcttgcacttacaggatcgaggtccccattttcttgctggctgtcagccgagggccattcccaccttctagagccctccacacattccttagctcatagcccccggcttttgtcttaaaagccagcagtggtgggtcaggtgcttctcatgtcacatctctctgacttactcttctggttccctttttcactttgaaggacttgtgtggttagatagatcgggccctctgtggttagatagatcgggccctctgtggttagatagatcgggccctctgtggttagacgggtcgggccctctgtggttagatgggtcgggccctctgtggttagataggtcgggcctcctggataatctgggatactgtccccatcacaaggtccttaatcacatcctcaaagtgccttttgccatgtaacgtggtatgtttataggttctggggattaggacatgtccgtctttggggggggtgataattctgcccaccatatgaccttgaaagaaatgtaatggctcttgacagatgggagcgaagtatgttttatcccgggtgtccagtgtatggggagacattaaactgctgggaagaatgaaataggaacgccactgcctttcatgaaaacattagctgttcaccgtaaaactctctgagcctctgcctggcactcgtgccccacagcactctgtccacattttcctggtggcctttaatcrtctcccacattgtttatgttggctatgtggtccccattaattctgtactccctgaaaacatgtaccctgaggaagcctgatagaagtttgtgaataaagttgaatttggggagtaagcagtgttggagcacttaaatttgacatttgtataagagatgatatttaagggtcaaggtgggagaaattaaaataggtcgtattctctactcactgggcgctaatttacaaacttgtttgtgtagctccctgggaagctgaatgaagcggatcataacggagatctggcattagatctagccctytcacgacgactggagagtattgccaccacgctggttagtcacaaagctgatgtggacatggtggacaagagtggctggagcttgttacacaaaggaatccaaagaggtaggaagaagtgtgtatgtttccctgcaggcaattttatttttatccgagtaatttttgaagactttctgaccttgttcccaaaattctcaaaggcttctgtagtctgtactcacaggctacatgatctagaatttgatcattgggtcagaggaagcactcaagagctgttgcctatgccgtgttagtttggccattcaccgtgccaacagggccccagaaagaaaggctacaaagatggtacttgtgtgaagaagtaccttttacttgtaagcacttgatatgtttgcttgttcaatggatggctttctccaggaattgtgctaggaaggttttgcttttgtattctaccacagatacaaggatagtagcaaaaccataaaccttgaaacatgttcttagcttcagggttttcactttaacaggctaggcctctattatgataaattgatagagtttcattttgttctagcagagttatttgaaattgtagctatattttgaatgcattgttaatagttggaagaatacagaaatgatagacttgagaacaaaacatttaaatcttttttttttttttgagacggagtcttgttctgtcgcccaggctggagtgcagtggtgcgatcttggctcacggcaagctccgcctcctgggttcatgccattctcctgcctcagcctccccagtagctgggactacaggtgcccaccaccacgcccagctaattttttgtatttttagtagagacggggtgtcaccgtgttagccaggatggtctcgatctcctgacytggtgatccacccacctcggcctcccaaagtgctgggattagaggcgtgagccaccgcgtcctcccagaacattttaatcttaatgaattaacttgtcaaaggaaaaaaaaaatactaggtttttgtttgtttttttccatagtcttactaattcatgagtcccaaatggatcygggctgattttgctttgcaatggtcattttagacagagtgaaatctgtatagaggtagagttccagtgagaaatgaaagctttccaaagtgtcaaagcgttagttttgtggagggatggttgacttgattgaagtgcattgccatggccacttttttttacttacacgtagacatcaaagagagaatctacttgtttcgttccatcttaatcatctatattttccccttttgatgatgcattgttatactattattgtctgtgctacatttttgccattcacaaattgctcctagttggtggaatgtagttacatcaagatgtggtcctgtgccagctttgtcctttttgggccaaggttttaatacaagtatccttataagccatgtgctggagtgctgagcttgctggctggtagagaggaaaattttgctcatcactgggtaggaaatccttcgagtatgtcagtgtcaagagcagatgcatcttcctcaagcaccgttatgtgctgtgcaaagccagcgggtgcttagcactgagtgtgattcagtggggaaatctccaccacgtagggaatgattctttsccacactgtttcgtgtctgagatgtttattttggaaacagataccctgttactaaaaaaaaaaaatctgagaattttgtttctttcctcccagggagttaattcttatgtttgatgataaatcatctttgagttattaaatattttggtgattgcttagatacaagaattgccaagaattagtgatacatttttgatgtttattttcagatgatttaaccttccactctgagtttattaattgcttgcaagtatgtggattacagcgtgggtataataaacttgattttgctaactttagagtgttgcatattacggtagacagagcactggctttatgaagctggtattcaccaaggtttgaatctgagctcatctgtttactctgtggccttggacaagtcacattctacgtcttccttatccataaagtgggaattacttttgctttattggtttgttcagagaatgcgaggcaatgttagtagtacacccagcagtgattaccaggggaatggtggggtcaaccctgccattcatcgcttgcccctgcgttggaaatgccataaccaggtccagttcctgtaggagtttttttcactttaactgttaaagagtgaaagtctttaatatatgagattttggtttagtctgagcacacattagaatctgtcaacaaaatagtcagtgatcatcctaataaccaagtataccagtcattttatctaaagagtggaacaggcaggcagtgtcttgggggagtccacagggggcacatgtttggccagagggatgccatctccttggattagcctgatctgagcaagaagatgagtcttcactttataaaaacagttcttcctgaacttttttaccttaataaccaacatcagttgatgggtttcttttttctttctttctttctttttttttttttttttgttgttgttgttgagacggagtttygctcctgtcacccaggctggagtgcaatggctcggtctcggctcactgcaacctctgcctcccaggttcaagcgattctcctgcctcagcctcctgagtagctgggattacaggcacctgccaccacgcccggctaattttgtatttttagtagagactgggtttctccatgttggtcaggctggtcttgaactcccaaccttaggtgatccgcccgcctcagcctcccagagtgctgggattaaagacgtgagccactgcgcctggccgatgagtttcttcagtagattgttcctgttatttttagtaaatttgaaaatgatgccaccaactggagcagcatgaaatatggtttgtattaattgaataatgaaggttactggctgaataaaaccatcaagaagctgcattgaaagaaatattatatatggatttttttagtgtgaagttttttgttaggaatatttttatatggacggattgtaatagtcaatagtcatgcctcatttacctggcagtgtcagtgaatgaggtgatgaagtaactgaaacttttaagcaccagcttttattttaactgtttctgatgatttgaaatctttctaaaatgtgttaaccattttcttattgacagaaaccttataaacggtgattgtgacattttctgttccctccctttgttctgctcttctgatatcagttgtccttttcctttatgtaccctctgggctttcttttaatgtaaaactttattaattttctatttctagtaatttctaaatagcttctttgtgtggggtgaatatatatatatatatatatgtgtatgattataagtaaaaagaactttatatttggatcttattaataaagtaaatctgatccaaagtctataattcttctaagaggacttaaggatttaagatataaaatttttttttatcatgctatccatctgaatccagtcattcataggttttcatatacctgtgcagtattgcccagtttatcttctgtatgtttggtgtattatacatttttcattaacctatcttttcttagctttactgtgtatttatctctctttttttttttttttttttttttgagacggagtttcgctctgtcgcccaggctgaagtgcagtggcacaatctcgactcactgcaagctccgcctcccgggttcacgccattctcctgcctcagcctcccgtgtagctgggactacaggcgcgcgccaccatgcccggctaatttttgtatttttagtagagacggggtttcaccgtgttagccaggatggtctcgatctcctgacctcgtgatccgcccgtctcggcctcccaaagtgatgggattacaggcgtgagccactgcgcccggcctcttttttttttttttaagacacagtcttgccctgtcacccaggctgcagtgcagtgctgcaatctcggctcactgcaacctccgcctcccgggttcaagcgattctcctgcctcagcctccctagtagctgggattacaggcacatgccactacgcttggctaatttttctatttttgtagcgattgggtttgccatgttggccaggctggtctcaaacccctggcctcaagtgaamtgcccgcctcggcctcccaaagtgctgggattacagtcaggagccgctgcgcccggccactatgtatttgtgtcttagtttggaatatattttaagcttaaaggtaatgaaactacattaacccttctcccctgagtatctcatattttggacttttcattaaggccctttgtcctaataattctaaagtttctttctactcccagaatgtaagtggccgtctctaggatatttagttgtattgctaatatattgttgtctttacatattttttcctataccaaatccgtgtggagtttgttcatgctacagagtaggaccctctgcgtatatgtataaatggatagcaaaagcctgacctagcctagccccctatatgcatgttacctgctgcctgcagtgctttactgcctctgtactgtgaagaaatctaagctttgatactgggaaagattgcaaccttctgcaccccttaccccacccaaaacgggagcagaagaatgaaaatatttcaagagaagggacttactggaaaattgttaagttacctgaagtcatgattcattcaaataagagcctttctgataaagtagaacccaatagccctaaccagtcaaatccattttcttctcaaacatttcccaggttctgttttgtataagacagtgtgaatacaaaaaaaaaaaaaaatcagacacaggccaatctagcatctgaggagcgagtcagcatctgaggcctcttgtctgccccagtgccagagcccacattctctagcaagatggtctcttggaagaaagcatagagcagatgggaagtgttgaaaaagagacaatcggcctgggcgcagtggctcacgcctgtcataccagcactttgggtggccaaggtgggaggatcacttgaggccaggagtttgagtccagcctgggcaacatagtgagacctcacctctacaaaaatattttcaaatgagccaggcagggtggcatgcgcctgtacccctagctacttgggaggctgagkcaggaggatttcttgaggctgggaggctgaggttgcagtgagccatgatggtaccactgcactccagcttgaccaacagagtgagaccctgtctcaaaaaccaaaaaccaaaacaaaagcaaatgattttctaatttcatacctactgagaaccagatgaaacctgtatattcaaatgaaaatgggcacaggaatacaggcaacagacctgagagagctttaccactcctgaaaccccattctagatattcagactgtagatatgtagtcgaaggagatgaaatgatatcgtaagatatgaaaggaaaactttggaagagagagaaaatcatcgtctcgagttgtgattcaaaggagtctgcactcacaattctaacaattaggaaccgaagcatcctgatgcaaagacaaaagcacatcctatggaaagatccataaattaaagaagttccaaggcagcttcaacaatctagcattcatcgcaaggtcacccacacatttaaggagtatagtcaactctcatgggaccagcaaatcaaactctaggacgttgttctgcatgctggggatcatccagctgaagaaggatgtgatttgcaagaaattcatcctgtagaccttggtgaaatggagacggaatctgcagaaagtacctctgaatcccagctcttgggttaacttgctatcacccatcagagtcacacatggggacttcaagttgcaagttgcaaatgatttttatttggaagatgtttaactgaacccttgaaagactttccaggccaggtgccgtggctcacgcctgtaatcccaacactttgggaggctgaggtgggcggattgcttgagcccaggagttcaagaccagcttgggcaatggtagcaaaacccacctctaccaaaaacacaaaaaaattagccgggtatgttggcgtgcacctgtagtcccagctactcaggaggctgagctgggaggatcaactgagccctggaagttgaggctgcagtgagccgtgatgatgacactgcacttcagcctgggtgacagagtgagaccctgtctcaaaaaaaaaaaaaaaatccccaaaacccaactttcccgatatgagctcattgatgccacctggaggctactgagagcaattgctttcacccagcaaggcgtgatgccccaagcctttgtaacaggtttctgttctgtgtgttatgatgctttgctattcttgccttgttttcttaagaaacatacattttatatatacatggtgtttgcgtgttttaaatgttaaatataactaaatccaagaaagactgaacttttaatcttacaacaaatttaattgcttaatccttgtcatcctccaagttaacttgacaagtaaactttaactggtttttcagaagtattttttaacactaaatggccacttgtcagattgcttagttccgagtttaaccatgtatttgtagaaccaatctagagtcaatttctctttactagtgtctgacaaagtattttcacaaatgtgtaccattaacattttcatcttaattcttggccttttgtcaacatgtcaaggtagtttttttcactcctacagagcataaatagtcaaagatggtaaatgaaactattaaaattaatgaattttggccagacacagtggcttatgcctgtaatcccagcactttgggaggctgagacaggtggatcccttcagcccaggggttggagaccagcctgggcaacatggtgaaaccccatctctactaaaaatataaaaaataagccaggcatggtggcatgcgtgcctgtagtctcagctattcaggagactgagttaggagaatcctctgagccaagaagttgagtctgcaatgagccgtgatcgtgccagtgcaccagcctgggtggcgggggtgagactctgtctcaaaaaataagaagaagaatggtttttctgtaagttactcagcctttgttgagtcaggatctctctctgtcacccaggctagagtgcagtggcacagtcatagcccactgcagtctcraactctggggctcaagcgatcctcccacctcatcctcctgagtagctggaaccacagctgttgtcaccgctccttgctaagtttttttttgtagagatggggtctccccatgttgccaggctggtcttgaactcttgggctcaagtgatcctcccacctcggccttccaaagacctgggatgttattcagtcttaatttgatatctgtaaattgtcctaggtagactcttatctgtaatactccaagaggtaagtcaatggaagggatttagaaagaaattttgtttccacaacaaggttatttaccatgtgaaatttttgtaaatagtaatgtgtacagatactctgttcaaatatttcattgtaaacttcttattaagtcagttatgtgtatataatgagattacaaaactaaaaagaggccgggcacggtggctcacatctgtaatcccagcattttgggaggccgaggcaggtggttttcctgagctcaggagtttgagaccagcctgtacatcatggtgaaaccccgtccctactaaaatacaaaaaattagccaggtgtggtggcacatgcctatagtcccagctgcttgggaggctgagacatgagaattgcttgaatttcggaggcggaagttgcagtgagctgagattgcaccacggcactccagcctgggtgacagagcaaggctctgtctgaaaaaaaaaaaaatctaaaaagaaaataaattttataataataaaacagacatgggattactctgagtaggaacgtgaatgcaagtacagcagaatgggggtaggtgttgcttagttaggtacaagctgtggtcaggaaataagaaagaaagagaaagagagagagaaattgtgtagggagggatcctggaaacccttctgagagatgaccgaaggaggcctttgaagagtagaagcctagtgttcttttttttttttttaagacggagttttgctcttaatccccaggctggagtgcaatgatgtggtctcagctcaccgcaacctccaccccctgggttcaagcgaatctcgtgcctcagcctcccaagtagctgggattacaggcgtgcaccaccacgcccggctagttttgtatttgtagtagagacggggtttttccctgttggtcaggctggtctccaactcccgaccccaggtgatccgcccacctcggcctcccaaagtgttgggacgacaggcatgagccactgcgcctggcccagcctagtattcttaaacagtgaaaggatactgaggtgaggaggcaggacaagtggtaacaggtaaccaaaaattgagcagagccttttgaattcgtctgtaactccatgatctcaatgagtttccacttacagatgccccaagaggttccttcagacacatctagttatcgctctcctttgtctgcagtcattttctgctccctcttgaagaagcactggccagaatactttgccctgacactgtttcttctattatttcttttcaaggagatctctttgctgccactttcctcattaagaatggggcctttgtcaacgctgctacactgggtgcccaggagacaccactgcaccttgtggccttgtacagttcaaagaaacactcagcagatgtgatgtctgagatggcgcagattgcagaggcccttctgcaggctggtgccaaccccaacatgcaggacagcaaggggaggtaagctggggagcagacactgtgcccttagcactgttctcagaagatatcttacagtagcatgtaattggcatacggggagttcatgttctttagtttggcattattcagtcttattttcattaaagtcacagacatcgatgtgtagtagtagtgtcactactaaaaccagaggcatttggggaaaacatttctatcctgggtaactgaagtcttcgaggttttttttgtgtgttgtttgtttgtttttaattgtgtcagcatctcactctgtcgcccaggctggagcgcagtggtatgatcttggctcactgcagcctctacctcctgagcacaggtgatcctctcacctcagcctcctgagtaggtgagactacaggcacacgccaccccacttggctgatttttgtattttggtggagacagggttttgccatgttgtccaggctggcctcgaactcctgagctcaagcaatctgcccacctcggtctcccaaagtgctgggattatgggcgtgagccagttttcgagcttttaagcaatttgtatctcatgtttgaaggaaccagagtggtcatctagtccagtgcctccaaggaaaccttgtagcatttcttagagttgcttggatagtttgaagaactattgaggtctaattgttagaaaattctaattgttagaaaattctctatattaaacccaattttaccttctcgtaaacactcccactttatctgcacagcttgctacctttgtccatagcacggccctttgcatatttaacaatatttattgtgttcattttgcccctttccagaaatagttgaggattccttgtggtaggatctgagaaaaggctacttgtcttgggacagtggtgtgaggggctgtgaaggatagttaagtcacctgaatcactgaccacagttgggacccgcttgtcattagaacattctcagtattttatacctttgaaaaacctctcaaaaaaaagattttttgtaaagtttggttgtcagacaggagaatgtatttatgtgatagataagtacgtaaataagatgtagcttcatgaaatctcagtatcatgtgataattaccttatttcctaaaataattgcatccctttccctgctgttgattctttcatttttttcctccaacggcaataaactcgcagtgtgtgtgtgtgtgtgtgtgtgtgtgtgtgtgtgtgtgtgtgtgtgtagtagatgcagccttgggctctgactcaaagtgtgtgtttttggggggaggtggggggcggggtaggtgcagccttgggccctgactcactgtgtgggtggggggtggtggggggggtgggtgggtaggtgcagccttgggccctgactcgggggtgtgtgtgtgtgtgtgttagtggtggctctgcagtgccagtctcctgcagggctcccgagtgctaaatgaaagcagtgaaaggggttaaatgccgctttcatcagttctttcctgttgctgctctgagtgtgtttgagaagaatagaagattatgggggagagtttccttttagaattgatggagaagagatgagggaaaatctgcacacctgtggcagaaactgctgttctcaagaaaatcctgtctgtgccttcaggaaggggttgggattgagttggggagtayttgagatcacttccttgagctgattcttgtccattttggccgctgaataatggtcacatataagcagatccgttttcaggttttgatactgggtcatggttttagaagccttgtagaaatgtgggatttcttgcgggtggtgattctgcctgggattctggttgcgtcttgccgtgagtcatcctgaacaggcctgtcctgaactgacccctcttcttttggatcccgcaggactcctttacatgtgtccatcatggccgggaatgaatatgtgttcagtcagctgctgcagtgcaaacagtacgtagggagacacgcacaagtgagaaggcggttgtgaggggggattgtgagtgaaaaatcattctttttaaacatctttagtgttgcatatattaagaagttaaagtkagctaaaaaaaaaatgtgtcattgaaaaagggtaaagagaaagaaccaggttgttgtcagtatagagtgtctcaaaaagattgtatgtgctgttgacactgcttctgcttttcagactagatttagaactcaaagaccacgagggcagcacggctctgtggctggcagtgcagcatatcacagtgtcttctgaccagtctgtgaaccccttcgaagatgtccccgtggtaaatgggacttcatttgatgagaacagctttgcagccagactcatccagcgcggcagccacacagacgcacctgacacggcgacaggtaaagcacgtgcctcccgaaggggcgacgctggggtctgcaggcgccaggaaatggcatgtaaatgccttcaccccaaatttagaaactgaacggcatactatgaggataattattttgtacttaattttatatacagtaaaagcctgggttgtcatttttaaaaatcctgtgcttcaaacaattgagcagacatcaagtccctgaaactgaaacttccatttatttaatgcggcgactcgcagactctttggactcaagaattcctttgaccgtcttaaaaattgtaccccagagagcttttctttaggtgggttataacttcagtatttaccatattagactacactttgagaacactgttttaatgtatttccttgatctgactaaataaaataacagggatattttaaggagagggatttggtgtaattcagtattgagtactggcaatgcataaaacatgggtaggtgtcactcacacaggaagacttgaccaaaaaaaaaaaaaaaaaaaaaagatggatattaaaacagccctttccctaaagaagttaataattaaaggttggccaggcgtggtggctcacacctgtaatcccagcattttgggaggccgaggtgggtggatcacctgaggtcaggagtttgagaccagggtggcccctttagagactgaaacctgtcgctactgaaaaaacaaattatcagctgggcatggtggcgggctcctgtcatcccagctactcaggaaaggccggagaatcgcttgaaactgggaggcagaggttgcagtgagccaagatcgtgccatcgcactccagcctgggtgaggagactgaaactccgtctcaaaaaaaaaaaaaaaaaaaatatatatatatatatatatatggccgggcgtggtagctcatgcctgtaatcccaaagcatggtagctcacacctgtaatcctagcactttgggaggctgaggccggtggatcacctgaggttagcagttccagatcagccaggccaacatggtgaaagcctgtctttactaaaaatgcaaaaatagctgggctggtggccacgcactgtaatcccagctactcaggacgctgaggtaggagaattgcttgaacccaggagacagaggttgcagtgagccaagatcgcgtcactgcactccagcctgggcaacagagcaagactccatctcaaaaataagtaaattaattaattaaaataaaataaaaaaaaattaaaggtcagccaggcgcagtggctcacgcctgttaatcccagcactttgggaggccgaggcaggcagatcacctgaggtcaggagttcgagaccatcctggccaacatggtgaaacaccgtctctactgaaatacaaaaattagccgggcgtgatggcgatgcctgtaatcccagctacttggggggctgaggtggaagaatcacttgaacccgggaagcggaggttgcagtgagccaagatcgtgcattgcactccagcctgggcaacaagaatgaaactccatctcaaaaaaaaaaaaaaaaaaaaaaaaaagagtcgactggtggctcatgcctgtactctgagctactcaggaggctgatgtgggaggattgcttgaggccaggagttggaggctgcagtgagctatgatcactccactgtactccagcctgggtgacagagcaagattctctctcttaaaaaacaaacaaacaaaaggcttgaatgttagactcttacagaactagtttttataaaagtctgacatgtgtttgaaaagaatatgcattctttaattataggatgcagcattctctatgtgcattaaatcaagcttgttcattatgctgttcaaatcttacatattcttactaacttttggactgcttgatctgtcagtttctgagaggtatattaaaatttttcattggttatggttttgtccatttttcttgctggttctgtcaattttatattatatagttttaattgttaagtctagacaggctcaggattgttttttctattgatatatttcatttttcattatacgtgtaatcttagtccactagtttttttaatttttaatttttatttttttaattttaaggctagtcaggtgaagcagtgggagtgaagaaggaacaaagaaatctgtaactggttttgatgagttttaaacaccactgcacccggaccagccaattcgtccactcgcttttaacggtttagtgatgttttggcagtcatgggttatctttgttctattgggagatatagaatttaagtcttgtgtacagtggaatgactgcaagcataaacatggaattcggagtctccagattaaccatcaactaggagtctccagattaaccatcaactaggagtctccagattagagtaaccatcaactaggagtctccagattagagcaaccatcaactaagagtctccagattaaccatcaactaggagtctccagattagagtaaccatcaactaggagtctccagattagagcaacmatcaactaagagtctccagattaaccatcaactaggagtctccasattagagcagccatcaactaggagtctccagattaaccatcaactaggagtctccagattagagcaaccatcaactaagagtctccagattagagtaaccatcaactaggcgtctccagattagagtaaccatcaactaggagtctccagattagagcaaccatcaactaggagtctccagattagagcaaccatcaactaggagtctccagattaaccatcaactaggagtctccagattagagcaaccatcaactaagagtctccagattagagtaaccatcaactaggcatctccagattagagtaaccatcaactaggagtctccagattagagcaaccatcaactaggagtctccagattaaccatcaactaggagtctccagattaaccatcaactaggagtctccagattaaccatcaactaggagtctccagattagagcaaccatcaactaagagtctccagattagagtaaccatcaactaggcgtctccagattagagtaaccatcaactaggagtctccagattagagcaaccatcaactaggagtctccagattagagcaaccatcaactaagagtctccagattagagtaaccatcaactaggcatctccagattagagtaaccatcaactaggagtctccagattagagcaaccatcaactaggagtctccagattaaccatcaactaggagtctccagattaaccatcaactaggagtctccagattaaccatcaactaggagtctccagattaaccatcaactaggagtctccagattagagtaaccatcaactaggagtctccagattagagcaaccatcaactaggagtctccagattagagtaaccatcaactaggagtctccagattagagcaaccatcaactaagagtctccagattagagtaaccatcaactaggcgtctccagattagagtaaccatcaactaggcatctccagattagagcaaccatcaactaggcgtctccagattaaccatcaactaggagtctccagatgagagcaaccatcaactaagagtctccagattagagcaaccatcaactaggcgtctccagattaaccatcaactaggagtctccagattagagcagccatcaactaggagtctccagtatagagcaaccatcaactaggagtcggattcctgtctctgagggataaggaaaaacatggtatgaaagcaaagtagtactttgtcccatttctttttgtttgtttgttttgagacagtttcgctctgtcgcccaggctggagtgcggtgggactatctcggctcactgcaacctctgcctcctgggttcaagtgattctcctgcctcagcctcctgagtagctgagattacaggcatgtgccaccaggcctggctagtttttatatttttagtagagacagggtttcaccatgttggccaggcttgtctcgaactcctgagctcaaattatccacccaactcagcctcccaaagtgctgggatgacaggcaatgagccaccgtgcccggctgtcacagttstttatcttgttttcagtcctggtgtttggtttatttagaatttcaaatagtatagctgttgacatgagagagtttgttcatttttggaaatggattttaaaagctgagaaacactgttttagggctaaaaccatttagagagaaaaaaaaactcatttttttctttccaaggtttttatttagaaaagagtaacagtgctaaggaaaatatttctaagccaagaacaaacatatttaaagcattaggaataaaactgaagtatttaaggggcattttctaataggacttaaaatgttttcaaaatggtcatccagccaagtggttttcagccaggcacaatcctgcctttattgcctgagaacatttgtcaacatctgtagacatttcttttttttttttctttgagacagagtcttgttctgtcgcccaggctggagtgcagtggcacgatcttggctcactgcaacctctgcctcgtgggttcaagcaattcctgtgtctcagcctcccgagtagctgggattacaggtgtgcaccaccaagcctggctaatttttgtatttttagtagagacaggttttcaccatgtcggccgggctgatctcaaactgctggcatcaagtaatccgcctgcctcggcctccaaaagtgctgggatgactgctgtgagccaccacactggccaacatctacagacatttctaattgtctttaagttcagaggatgctgccgaacattgtacagtgtgcagaacagaccccacaacaaagaatttatcctgtccaaaatgtccgtagcaccactgttgagaaatcttgctctaacccaccctcagcaaggggacagaacttccctcccgtcctgggcagtggctagcgggaatcccagggaggaattggatgttccagcccggggcgttccctagcctctgtgtccacacacagagagtacctgtgtggatgctccagcctggggcattccctagcctctgtgtccacatacagagagtacctatgtggacttaaatgatacctactgtctggcgtgggcttactgtctggcgtggacctactgtctggcgtggacctactgtctggcgtggacctactgtctggcgtgggcctactgtctggygtgggcctactgtctggygtgggcctactgtctggtgtgggcctactctctggcgtgggcctactctctggcgtgggcctactgtctggcgtgggcctactgtctggtgtgggcctactgtctggcgtgggcttgccagtcatagggtggcagggaagagcagggtgttgtgcagcgtgaccgcattttgatgcaaacagaagaatcagcaatgcccattttcttttaggaaactgtttactacagcgggcagctggagcaggaaacgaggcagcagctcttttcctggcaaccaacggtgcccatgtcaaccacagaaacaagtgggtaagtgtgacagggcagccggagaaaatggtgttgatctatggaagaaatggcagtggtggatatgtaggaaaaaggggaataggtggtttttttcagtttttaatcagaataatacatgcatatggttaaaaagccagagtgaaacagattattttgtgtttcttcaaatattggttgattgattcattcagcagccatttcctaagcgtttgtgtaggaaacagtgcttgttcaggttatcagaccccgaactagatgctatggactttaatagaggttagcaaacgcgtgcacaaacctaccgcgatagcatttgattcttgataacacttcacatttgcttgggttttcctctgtggattgtcacgtatgagtctatgtcgcacgctaacaaggtggaatgtgcggtgttatgaataaaagtgttacctttggggttggacgttaccgagtttaccagctttcccatttcctccctatgcagtcttcttttttttttttttttttcttgagacacagttttgctcttgttgcccagggtggagtgcaatggggcaatctcggctcaccacaacctctgccacccggattcaagcaattctcctgcctcagcctccagaatagctgggattgcagggatgcaccaccacgcccagctaaatgcttattagcataatatctgagacattaggtactatttgatagttatttttactttattattttcagaccatgaggatgtgcttgtcttcaagatcacatttattttacggtcactttctgctagcagctttaaggctattatcccttttaattttcacagtggacctggaagcagcatgtatcgttaggattgaagaagcctttcccacatcaatcaattctctattttggagtcaaggaccttgaggttctgagaggttaagtggcttataaataatgaggtgtccacattaagactccagcacaaggctatctagttgcacactgtctcaacagcactgggcaaggcagtaaacagtgagcttggtatctgagccagacaagtgtatcttggtacaggacagagggcagtgccatcctttccactgctgactccactatgtgtctgcacacagccaactctccagccagagtgacagcgcggccccgtgcgcaccggccagagtgacggcatggcctcgtgcccaccggccagagtgatggcatggccccatgcccaccagaggctgctgcttgttttgggctcagcatctcagcatctcgtgccctctcaccttctccatgcctctgctcttgccatcgtgtgtctctgtctctttcttttcctcctgcatcattagctttgcccattattcatttctaatagcatagagacatgctctactatctcctaacttaaaatcttctgctgggcacggtggctcacgcctgtaatcccaaaactttgggaggctgaggtgggcagatcgcctgaggtcaggagttggagaccagcctggccaacatggcgaaaccctgtccctactaaaaatacaaaaattagctgggcgaggtggccagtgcctgtaatcccagctactcgggaggctgaggcaggagaatcgcttgaacctgggaggcagaggttgcagtgagtggcgattgcgctgctgcactccagcctggggcacagagtgagattttgtctcggaaaacaaaaaacaaacaaaaaaaaacctcccttgggcccacattgtctacccgctgttgttccttctctgaatacccttcatagcaaaactaggtcaaacccaagctgtagagaaacgggaggcctcacttgaaagcactggagaccagcactgcagaagggcctggaacactggcttccgctgtgtgggctttatcctgtggggacagaagagccattggagggttttgggcagagaagtagtgtgattcttctggagctgagaaaactgcctgggatggctggcatggtgggtgtgccgtggagtccaggctggagccaagtgggagtcatcttgacaagcaatgacctgtcctgtcctgtcctctcacactgcatttggatccaaaggaacaggtttcacaggaattgcagaatcagtctgtgacacgcatgcttgaggctcccagaagcgagggcaagagagctgttaaaacccctgtggtgcaagaatgacgtaatggaatttgggaacttggaggggaagcttgggagggcggtgggggataaaagggtgatactgggtacagtgtacactgctcaggtgacgggtgcactaacattaagaaatcaccaccgaagaacttatccgtggaaccagaaaccacctgtaccccaaagacactgaaatacgaatttaaaaaaaacagttgcggcgaacccatggaaaaacagaggaaactggccaggaggaggagcctgtgtgtgggaataaattccattgtgatttttgaatttctacayatttaaggtagggatgtctaacaggcagtgggaaaattagatgcaagaatggggctggagacctgggtttgagagtctcttccttgcagataatggcagaagccgtggagtagatcagcacacccaaggagaatgygtaggaagaaggtctggaacagaagacagccccgaggaggaggggtagaggagcgggaggagcaggggaggaggaggaagaggacatacttgggcgggctcacactgcaattacagttcccctgtatggggaggatttgggatgggaagcgcgcactctgggtcaaggcgtaaaagtactcaatccttatctgccacagtggaaagtcccacagataatgttcaaagctggaaaatcaagaggcagcaataaaaacatgttggttagaaatatggagagttacaaaacccagctggaagagttaaaagtgattcctgctgggaaaggatatttttttttttttaggctagccaagtgaggcagtgggagtgaaggaacaaatgaatctgtaactggttgtgatcagttagttgtaaacatcaccgccagggatcttgctgatttttacaagaagccttggagagttcttgcctctaagtgatgatgtataactctgatgagggcaggcaccttatgcaagcgccgtactgcaggcagagtggtgcattccgttcatttccacttgttggggtgaaaacactccagtgtgtgtgtttacatacggacatacacgtggacacgcccacatgcatgtgtgtgtgcatacgtgtgttttcctgggagggttctgtcaatggagagaaacatgaaagtggtaataatggttccaaatgtgagaggaaacttcgttttaaatgttgcatcaggtagcggtaataccaattaaaaatatttttaacttttaaaagtaggagaaggaggtcttgatcagagctcaagatgagattgatacaagcaggccacagagacggagctaaagaagaagcgacggccacagcgttaaggctgccgattgccggggcttaggtccgggcgggggctgcgcggctctcccatttgttgtactatttattttggtgacacttggagcttgttattgttctgtcgtgataagcatatattatttttataattagaaaaaaagaattataaaacaaagcgaagggtggttaaagaggaccttggaggtgaagtcaagaagccagtgctttcggaaggtgcttggggaagacactgaagaaactaagggtggaaccaggcgcagtgcctcacgcctgtaaccccagctatttgggaagctgaggcaagaggactgcttgtggctagaagtttgagtccagcctgggcaacacagcgagatgctgcttcaaaaaaaaaaatgggccgggcgtggtggctcacgcttgtaatcccagcactttgggagtccgagttgggtggatcacaaggtcaggagtttgagaccagcctggctaacatggtgaaacctgtctgtactaaaaatacaaaaattagctgggtgtggtggtgcgtgcctgtaatcccagctactcaggaggctgagggaggagaatcgcttgaacccgggaggcaaaggttgcagtgagccgagatcttgacactgcactccagcctgggtgacagagcgggactccgtctcaaaacaaacaaaaaaagatactgagagcgatggctcaggagaaagagaacagaagtcaggaggggcagctggcggcaggatgagccaaggacccgaggttttgcacttaggctgccacgctctttgtgaagggaattcctgtgagtgctcagatttcggccatttgtttccattcagggagaaaccccgttgcacacagcgtgtcggcatggcctggccaacctcacrgcagagctcctgcagcaaggcgccaacccaaacctgcagacggaggaagctctgcctctgccaaaggaggccgcatccctgaccagcttggcggacagcgtccatctgcagacgccwctgcacatggcgatcgcctataaccatccggatgtggtgtctgtcatcctggagcagaaaggtaagtaagtgggaatactgtccatccttttgacttggggacagcagtttaggatccttagttacagagttgatgttttttctgttggtgagtttcatatggctagtttcttacccccaaaaaatcctttcaggtcaaactagagaagcatgtagtctggctcttgactgctgcttccctgtgtgtgttttcaggatggggcctgcccatttcatttgttaggttaagctggtagtaatgtctgtcttatttgactatttctctaggccatttagtgtaggtcaagcaaagctgtgcctcggtgtgagcactgtctttgagaaccctgttgtggcaggcaccccatgagagaggggccagaaagaggggccaggggcagcccctgtgggacagaagggccgtttccctcagaaagtctccctcacgccttctcttgcctgtcctgaggtttattttgctcttgcctcaatccttgttaaggacagtgtttttttagcattgtccttctggagggaggttgggttttaggtactatgtgccctttttttggtcctcacagaagttttaagactgtaggagggaaagttttaagattgcgttctaggaaacatcatcagggcgttgttttagtctttttagtaatcaagcgtgtttccgtaatggagtccatttttcttacgtgaagagtcagtgttttaagctttaaaaagattcgttttccctgtaagttttgctccaaaatatcagatttctgggctttgagtcttgacaagatttatctactctctttttatagcattgatcatattatacccaacaggcagtttgagttcttactctactgaagctttaagtgtgatccacagatggtgacatcaagtgttcttttactttttcaaacatttagccaatgctcttcatgccaccaacaacttgcagatcattccggacttcagcctcaaagattcccgagaccagactgtgctgggcctggcattatggactggtaaggctgtgccggggccgctgatgtctgcagacagacagctgtccgaagtggggccgggtgggacagagggagcgagaaagaaagaggagactgggctaatcatttggttgtaaaataacatttctgtttgagttaagcctgttagatccagtggaaaactgctggctttgagaagctgagagggtctggctgttgtagtaagatgttgaggaagcgggaaaagccgagcctggatgagatcrgggcttgtttcccaggcatgcacacgatcgcagcccagctgctgggctctggagccgccatcaatgacaccatgtcggatgggcagacgctactgcacatggccatacagcggcaggacagcaagagcgcactcttcctgctggagcaccaggcagatataaatgtcaggtaggaggaagccgctctctccacctaacaccaggtaacaattaattgagatgtcaaaagcatagcctcgcttgtagaaaagtgtttttgtttcatattagttagaggaaaggaaacagtagctctagaaacacacaactgcggtgtcatcactgaatatcatcaaaagacttgattgtaatggcggaaaggaactgtcctttgctcttgtttgaacctttcaggaccagtgcatagtattgcacaagtctcattgtaaaaaacaatctaaaatccaggttttttttcctttgaggcaggatcttactcttttgcctaggctggagtgcagtggcacaatctcggctcactgcggcctccacctactgggttcaagcatttctcgtgcctcagcctcccaagtagctgggattacaggcgcccaccaccacgcccagctcatttttgtacttttagtagagacggggtttcaccatgttggccaggctggtctcgaactcctgacctcaagtgatctgcctgcctcrgcctcccaaagtgctgggattacagtcatgagccactgcggcccaccctaaaatcagtttttaacaaggaatttcagttacaatgaagaatgttccaacaaatgagccaccaacaaggcctgagagggaaaaagacatggagtcaaatttttattgtggttgtattttcaaaagaacttacctttatctccaagtgactgaatgactgagtgggggaaggaaggtttgycaggagggttcttggagtggcattttattaagatgctttaaaaagtaactataagatttcagcacgctgggatgttatctccgagggcaataaggtgacatgkttatgtgttctaaaaagtcagaatggacagacactattttcacatttaatttccctgagaaaatattgaatgattgtgagtgaatatgattagagacagaagattctggactctggaatgcccagaagggcaccttctgtgctttgggttcaaccacaaacgttggtttgggtgtgcatgtcctagcaggactcaggacggggagacagccctccagctggccatcagaaaccagcttccactcgtagttgatgccatatgcacccgaggagctgacatgtctgtgccagatgagaaggggaaccccccgctgtggcttgcattggcaaacaatctggaggacatcgcatccactctggtgagacaggcacaacgttagcctctgtttacagatggggatatgttgtgtcagagatggatctgctgcctgcgtagctgtcacaggagcaagatctgtcaagtaacatagtgggacaaggacaagcagttgaaagcatgttaaagaaacttgyagttcaacatggtcttggctgaccttttgtttttaggtcatctttaccaagaaaactaccaagaagcaagagaatggcggcgtttcctcaggagccttctcctggggttggttgatttgctatggggtgtcctcattatcaccatagtgataatttcctcaatcttaggtttatctcccttgtttgcaagacaggccccaaaagtggaggcaaacctgcacattctcattcagctctccgaagggcctgcagtgtgatatgaaggcgttgtgcacctggaggttttacctagttgttgagattacctgttaattgcaggtgtgtgttactgaggacccgttggtgcatgtgtacacagacactttctgttttctgtcccttctagaactcagctctaaaggacacaaattaaacataacttgtttatacttcccaagtctgtcccacaggacctagtgcacgaacttgcacacagcaaattttaattagtgtttgtaaaataatsagtgatacagattaaagtaattatcaatttattatcaaccgtatcttatctgaaagtggatttaatgctatacatagagctcagacttggtaataaaactgtttgcctttgctcagcagtgtttgtgaataacctatgtttttctgcaggtcagacatggctgtgatgccacatgctggggtccgggacctggtgggtgccttcagacgctcctgcacagagccattgatgaaaacaacgagcccaccgcctgctttcttattcgcaggtctgagagtccccagtatctctccacagctttttagtgagcttgttgcaaactggctctttcctttttaaatccgtctatagtcttggcatgccagtagccggcttgactttcacagttaaggttatcagagagtcactgttctgtcatgtcaagtcagccaggagccaggctcacttgtgacgggaggagctcacagccctgaatcaaagaatctgaaagctggagtcagcgtcctgctttgggagctgcctgagctcctgtagtcacggcagaccagttcagactgtgaagcaggaggctatggctggggagaccagatggtctctgcaggaccccaccacgatgtgtgagtcgtaacaggctctgtggcccccttggagtgtgggaagtgtgggagccgaggttattcaggaagccttcacagcagtggttctcagactaatggttttctggttttctttctttcttttttttttttytttttttttttgagacagagtcttgctctctcayccaggctagagtgcagtggcaccatcttggttggctcactgcaaactctgcctcctgggttcacgccattctcctgcctcagccctgggactacaggcgcccgcctccaygcccggctaattttttttttgtatttttagtagagacggggtttcaccatgttagccaggatggtctcgatctcctgacctcatgatccacccgcctcagcctcccaaagtgttgggattacaggcgtgagccaccgtgcctggctcaaacttwatggttttcaaactttctttttgtattttctatttttgagatggagtcccattctgttacgcaggctggagtacaatggcgccatctcggctcactgccacctctgcctcctgggttcaagtaattctcctgcctcagcttcctgagtagctgggatgggaggtgggataggcgcgcaccaccacgcccggttaatttttgtgtttttagcagagagggggtttcgtcacgttggccaggctggtcgtggactcctgacctgaggtgatccacctgcctcggcctcccaaagtgctgggattagaggcatgagccaccgcatccggctggttctcaggctttaaatgtatgcatatcccctgggaagtttctaacaattctgatgcccgggttgcccacccccaagaccagtcacagaagaatctatgggagtggaaccccgactctggtatttgaggccagggaccaaggacagcagacccggccacagcagacgctgttggattggatgaggctcctgctttacrtttgtaatcagcatgcctataygccaggtccaagcgtggcgttttttaaaatgtccccattcctttcagtggctgtgacgtgaacagtcccagacaaccaggcgccaatggagaaggagaggaagaggctagagatgggcagacccctttgcatttggcagcctcttgggggctggaagagacagtacagtgtcttctggagtttggtgccaacgtgaacgcacaggtgtgtcgtttctcttttccggggagagaggtgtagccccagcatgagggaagcctcctcctatggcagaggaccttgcacagtccccagttccaggcgctgctgcttcatgaacacacgacctccctagcagcgttcatgatttcaggctgactgtgcttctctgtgcctttgtccttactacaacaggaggaagatttgtttcagctctttctctttgcctcctattcccccttagttacagatttcctctgagagtttagtcccaaatcgcatactgtatttaggaaaatgtcccagtagctcacttgagcacccctgagttacgccctttgatgcttttcaacattcgagcctgtgcagatttatatataaggccctatagccagataaggagtggtggcttagagcggagactcactgcagatgtgaaacacatgtttgtgctggtcctacggtcaccactgggtcactggaacgtggtgtaacaggaagtgacatttagtcatttctctttggcctcttcaaaagctgagtcaaacacagggtggtagtattgatcgattctcataactgaaatttgatttaaaagttataccctttcatatttttcctgagttttatcttgcaattgaacattaaattctgtgccttgttccataggatgcagaaggaagaacccccatccacgtggccatcagcagccaacacggtgtcatcattcagctgttggtttctcaccccgatatccatttgaatgtacgagacagacaagggctgaccccgtttgcctgtgccatgactttcaagaacaacaagtcagccgaggccattctcaaacgagagtccggggctgctgagcaggtgagtgaataacacctgaccttctccacatggtcctgggcgtcgcggaacctggagactagacagatgtcaccgactaaacaggtctcctcatggaaagagctttgttttgaagttgtactcctgtcctaagatgtggctgttgagatgtcccatccgtgcaggatgagatccggytcctctgcctgtgtgtcagcgcctgacagtgcccggcttcgatggaagcggaggcagtgggctccatcgtaggaattctgtggcatgtacagttgagctcattctttgcttttgctaggttggttaactgtcctagtgaggagtgtctttgaaagagcttgtgttgtgatgttggggcaacttcctgagtgtttccgaggagttcagttgctcagtagcctcggctgtccttgttctttgtggttctttaccagctgctacatcgggatggtgaactgttgatctgcaacaagcagttggctgggaaatgacaatcacaactgatctgagtaggagggggtgggtttatcaggtcagtcctgcaggaacttggctctccagccagcacctagagtactggcgcatttatcagtggcattcatgaaggtgagatggaacttgggacccgcgtgaagtgagatcctcgcatgggtggagatgattgcttggtgtcttaggcttccgtaaccaccgtcttcagcattttcacaagtgtgactggattgcgtaggtggtgacctcacgtttgctcaggtggtgtgaaatggcctctcccgtttcttctctccagtgtgaaactggactgctgatgaaagcgctttgtggatccgctgcttatgagactggcacgtgccgtgtgtgacgtgtgggcctgtgaagcggcgtgccgtgtgtgtggcactggggtcgccctcgctgccgcctccacactcatgctaagacggctctgggaactacaggagacggtgtgctttgatttcattgagctctgttggctttccatcagcggagcaaagcccgggccctgctgttggctccctcccgcattgtgtatagagcgtagctcagtaagaggaaactttctccacgtttctcaaccctttgtttgactgctcgggtcaggccggcagtgcagctggggcatcaggatgctgggtgcttgttttagccaaagcaaagagactcccaaggcttgtctccattttccctctccatgagtttcctgatatcttggtgcttgcgtttccctatccttcagattgtctttttcttggttttccacatccagttcctactacaggaggctgccacagtggctcccttctcctgaccacgtgggtgtggccacgcacacctggttctgtgcacagatgtgtagagtgggtctgtgggtgggttgggggatggcgtttcatgttcattcttgggagggggtttcctaagactgagggaaggtctccatcgtgacctctccagtggtcagttcagcttgcagatgaagctcaggaggyactctgaaaagggaactaatattttgctttgcacttgttgctgtaggtggataacaagggccggaatttccttcatgtggcagttcagaactctgatattgaaagtgtgctgttcctgatcagtgtccacgctaatgtgaattcaagagtccaggatgcctccaagttgacccccctgcacctcgctgtccaagcaggctcagaaattattgtccgcaatttggtaagtgacacagaagtattgcatgtaataatatgttgtcaaagcatattgtagagcttgtgcagaatctcatcacaggtgctttgcccggtgttgtgaaagcacctggggaatttggggagcgaggctggtgcactcaggaaactggtgtcaagggctgcacgtcctgagcgccccactgggctgcgtgggctgccagatgctagatggggcccttccagaaagcaggatttcaatggtggaggcagggtgggagcaccgaggaagtggagatccacttgtgttctctgtcaggcattcaactgggactttgaagtgagctgtctytcttaattttcaaaaccacagaggggtatgagaaatgttttacattttacaaaggagaaaatgtaggccgagaaagaattttacccccgaggctatctaagcaagtagtgctggattttagccttttccattggactccaaagcctgctttttccacccaggccggggagggtctcagtaaagatgtggagattgggaagtgcatgtggtgtgtttacgtaggaaagtttggttgaagttttagtagagttgaaagagctgtggttagaggggcaggaagaaagcagatcgtggggtgtcacatttcaaaccgagaactgtgagcagccagtatcttttaggcagtggagaaaccattgtaagtgtttgagctgagagaacaaggtccagagctgagacagggcctcatcgtctggtctctgctcctcagagctggctgtcgctggtccctcctgtcagccccagacacatgccgcagaactggccgctaaggcacctgagcagcctttggcgccttggtgtcactgtttctgaaaagtgctttttagaaaagccttgtgacctgattgtgtttgagctgaggcagcatttgaagaaggcgccttgggagtgaggcacacaggtgtggggcgggctcaccagtgacgagaccgagcggaggccgtggcagtgagtgtgaactgagggctaaggagcggtgggtmtgatggtgccaggaacagattggatgtgggggaagcagccaaggaggcggagctgggtcccaaagtcgtagggaatcggcctcgtgttcatcagtctttatgcctctgtagggctggaggaggttacggtccctgaccaaggwccccgccttcctggggcccggcatgacagatgataggatcgcccagaaacactagaaacagcgggtcttccagtgtccgtgtgctccttcctctgaattgatgctgcatcctgtttgaccctgttcatactgaaaccccttccccactctctcctcccagttaaccagctgtggggccagttatgatccctaacacagcaccagggaccatgaatatacatctgtgagacgtcccgtatggagagtcccatatccactcrtatgtcttatcgatcagtgattagactgggcgcccagagttctggggaggctgagacttagaagtcagggtcctaaccagagcagctaagcagcacctagattttcccagaggcagtgcctgtacacacggaggaaccaggggtggccatacacctcagcagcagcaaattgggttctgactacagactacatgtattttctgtttacagcgattgttttttaaactttgtcagaaagaggatgacgaacttcaaatactaaacgaataggtattatgtaaaggtccctccggctgtgttgattctgtaattctttgtgtccctttttttctttcttttttttttctttttccttttttgagacatggtcttgctctgttgcccaggctggagtgcagtgacctgatcacagctcgctgcaggcttgacctgccaggctcaatcaatcctcccatctcatcctcccgagtagctgtgattacaggtgcacaccattacacccagctaatttttaaattttttgtagagatgaggttttgccatgttacctgggttggtctcgaacttctgggctgaagcaatccgcccgcctcagtctcccaaagtgctgggactacaggcctgagccactgcacccggcctgtgttctttcttttaaaaaacaggccgggtgcagtggcttatgctgtaatcccaggactttgggaggccaaggtgggaggatcacttgaggcctggagtttgacaccagtctgggcaacatagcaagacgttgtctctacagaatttttcttttttttaattagccaggtatagggtcacatgcctgtggtcctggctactcaggaggctgaggtgggccaatcatctaagcccaggcgttcaaggctgcagtgagctatgatggtaccactgcactccagcctgggtgacacagcaagttgctgtctcaagaaataataaatagaaaacaatagtgaaatagtacatactcattgtggaaaaactcaaagcatgtaaggatgtgaaacagatagtgtctctctttgagtcccagctcttcggagtatggcatttatgctttgaaacaccttccaagtgcctctgtgcctgcatgcttgtgtgtacacagagctctgtcttccccagatggaatcatactatcttctaatttgcaaggttttttaaacttacttgtcatcaacatctttccatgttaatcgataaatatttatcatcttactmtactgtttgtacctattacaattttttacaaccaaacccctttgccttcaggctttcctattccaagcagtagacacccgtagatagtacagcggccatcactgcagtcctgcacaacttttatacacgaaaaccttagaagtagagtttctgcatcccaaggaatggctctttaacattttgataggtaattgccagtttgcccttggcacgggttttgctggtttctgcttcagcaggagtgtgtgtgaagctcytatgctcccagctctgtcagcagggcaggccatcagcctctgtgggtgtcagaagacaagcaggctcggcccccataagggggatcttgattgtggcagagagactgactgttcatgtaatgaacttcaacagcttcttgcgggagccaaagtgaacgaattaaccaagcatcgccagactgccctccatcttgctgcccagcaggacctgcccaccatctgctcagtcctcctagagaatggcgtggactttgctgccgtggatgagaatggaaacaatggtaactcccagtcattctttagtggcttgaacgatccctccattctaggggtgggggtgcagtgcacccttgggtctgctccccactggggaggttggcttttacaggagcaaagctgtgacaggaagtgctctgggtagagcatccaacctgcgactgcccaggccttgggcagcctccccatctgagtgggagccctggaagcccacactgcctccttgggaaactgttaaatctcacctttgggtaactgctgaagcagaaggcacagcacagagcaatcatgagattgcatttgtgatgcatccttgagggcggtgaagaccagaaaggatggctctgtgcgtggccagtcgctgctgtggccgggtcccatttacagagaggtctgtgagggtgaggaggagtggaggtttttctgcatgtgcttctgggcttgcatagtaagaggatttacttcccagctcttcatcttgctgtcatgcacggccggctcaacaacatccgggttctcctgacagagtgcacagtggaygccgaagcctttaatctcaggtgagcgcgttgggcccgagtaggccccgcggcrcctggcctgctgctcagagctgctggttgctggtgcctcccatcagccccagggaggagctgcaaaaccggccgctggggcacctcaccagcttcgggtactttattttggtacttttggtaccggtatttttgttttaataaaaaatgcttcttaaaaggtttggccgggcgcagtggctcgcgcctgtaatcccagcacttcgggagtccgaggcgggcggatcacgaggtcaggagatcgagaccgtcctgactaacttggtgaaaccccgtctctactaaaaatacaaaaaattatctgggcgtggtggcgggcgcctgtagtcccagatactcaggctgaggcaggagaatggcgtgaacccgggaggcggagcttgcagtgagccgagatcgcgccactgcactccagcctgggtgacagagcgagactccgtctcaaaaacaaacaaaaaaacttttgttatgcatgcacttaggttacagtaaaatacaaaataagaaaaagaaaaacttttgtgacttgttttgtgtcttttagatttatccaccatcacagagttcagaaaattctatttattttgtgtgtgatggccatggcagatacattcctaacttttccaacttgttttatcagaggccagtcaccactgcacattttgggacaatatggcaaggagaatgcagcggccatctttgatctcttcctagaatgcatgccggggtatcctctggacaagccggatgcagacggcagcacgggtgtgtaccaagggctgggtatgtcccgtctcacttgcgcaccttgcttcctggaaaagcaagagcccaggcacacgtcgttatctgagggcgttcagctcgcagaacagttctgttgggccctccgggtgtgagttacaragccctgttgtggagtctggggtgtctgattttagacactgtcccatctcaagtgcatgtagcgctctgaaaccatccatacccttctccaaacaggcctctccacctgtttttatttccctcatttgccttttgtccagtcaaatagggtcctatgcaagctcccaaattctagcagaggaagaaaatagaagcatctcacaggatcttcaaaaggaagaaatgtgctagatcatgtgtcggcatgctctgagaaagtggcaaactacccagatacacggggtgccttcttatgcagagggctacaggcctctcatggttgctctgggtacccgtgatcactgtgttcattcgtgtggccctcctagcttttccggtgactctcgcgttcgttttcttgccgaggactcacggcagcctcataagggaagcagtgcatagttgtatccccgtttttcgggtaaggaaaagtaaccccataaagcaaaaccagatgtctcatcccagcccagagccctctgcgcagctgtgtggctgctgcattcccattcrctcacctctgtggtcttggcagaaatggagtcaccatggggttgtctgaaccttaacatgggaccacatattttatcaccatttttctcttggtcttgagaggagtttgtggcctttgctacgtgcgcactgttttttaagcttcagaggagtccgcccctgggagggagtgagcagcacgtactcagcagcaccttgcccaggagcagggaaacaggaacaggcagcagggaggggctccgtgttgaggtccccggtttacagagacctgtgtgcagatgcctggccctgtcgcattctagcagggtgactgggtgcattctccctcataggcctgcttcctcatttgatagtgggaagaataaccctcatcttattgtatgattttcagagttaaatgaaagaaacccggcatctgggatagggaagcagagggagcgacagttagctgtaattgttcgtagggaaggccagcaggttggcctggccagagcatgggttcccacgggctccacggggtggaagaactttctggagcgtgttcctaatactgatttttcttctccatgtgtacacaactcgtaggtttagatttagttacattgggtgaaaagagctttgtcctttgtggagaaaccagtgtttcatgccagaggaaggcaactgagaccacagtagatgattccctctgtgttgaatccctccccacctgcgcgacctcagctctcttgcagcccaagctctacgtgggaaagactgtgkcttggaaacggcagctgctctagaattctttggctcgtggccacatcctttattggaagatgctacaggttgtccacagttctctccagagcctcggggcccccgtatgtctgtggggactttgtgaacagatktcctgccagcggtctgttctgcccttggctgtcctccgccctccgtctgtggctgccgggctgggccgggtgggaagtagccctgcgcgtgcttttgttttccagtgctgctcctggcatacatgaaagggaacgccaacttgtgccgcgccatcgtccggtcgggggctcgcctcggggtgaataacaaccagggagtcaacatcttcaactaccaggtcgccaccaagcagctcctgttccgactgctgggtgagtggcccgctctctgctctcacagtgcaagcacagtcgtagtgttgggatcgccatgtattgtattggtgatctttcaatctcatgatgccttaggatcggaaccgctcgtttcctggcagtagctgggaccatttctctgaataagggaaggacttttgagcgtgttnggaaggtcactgtgaacagtctcttttcaaagcactctgccttgtgcatttcccacaccccacaaccttctagaaatgccaaagctccaggcaggccacccttcctgtgtgtcctggccacttacctgcacacctgtcctcttgagactgactcagatcctccagaaccttcaaaatggcctgctgctccagcccctatcagctctccttcccctgtgacccttttgtggaaaggagtgcttccctcctgatttcatatttgtgaatctttactcttccctgctgaggtgacagaaagaatcagaatgtctcgagtgcctgtgctgtgtcatcacccacagtggggagagacaggcaggaaaacaagctccgacatccccggtagccaygggatggcgatgcacaggacctgcccagggggcacagctggtctgtggyggagtcgggttgaaggacagcatttgtgacatctggtctactgcaccttccctctgccgtgcacttggcctttgaaaagctcagcaccggtgcccatcacagggccggcagcacacacatcccattactcagaaggaactgacggactcacgtgctgctccgtccccatgagctcagtggacctgtctatgtagagcagtcagacagtgcctgggatagagtgagagttcagccagtaaatccaagtgattgtcattcctgtctgcattagtaactcccaamctagatgtgaaaacttagttctttctcataggttgctctgcccatggtcccactgcagacccaggcactctccggaagcctggaaatcacccgtgtcttctgcctgctcccgctcacatcccacacttgtgttcagtcactgagttacagattttgcctcctcaatttctcttgtcttagtcccatcctctgttcccctggccagtttgtctagctgtgtggtctctgttctctccctaccgtgccttccatcccagccatccctgactacgtgtttcccccacagacatcacactggttcacctcgttgaccaccgtttccttctccccaagtctcccgggcaagggctgattctccagtctcctctgggaagctggccctgaaccacttagaacctatcgctccttcgtcacctatgtcatgtggcagcgctgcctcacttacgggtctgtgttcctgctgcctccaagccctggggcttgcgtggcgccgtcgcggtttgacgggaccgggcctcccccctgtgttgcagatatgctgtccaaggagcctccgtggtgtgacggctcctactgctatgagtgcactgccaggttcggagtcaccactcgcaaacaccactggtaagaccccagcgtcactggcaaggagcgaggggactgccgctgatgtcattgcttccccccttctccaggacaggccgtgaacttgcctgggtcctgcacattgatgggcaaaccttgaccaaatggagggatgagatgagcacacccaaggatcctactgaggaacagagatgtagggaaggcagggagcctgcagacgggtggctttcctgctggaggctgaaggtgcacagtttccaggcagcctgccaggcctgtgccatccttcctgacttcctgcctgcaccaaagctgagatgagctactgccctcatggtgtgcctcagtatgggccgctttgccgagaactaaggggctgttcccattaaaatgagatagataggtcgggtgcggtggctcatgcctgtaatcccagcactttgggaggcagaggcaggcggatcgcttgaggtcaggagttcgagaccagcctggccaacatggcgaaaccccgtctctactaaaaatacaaaaattagctgggggtcgtcaaaaccctgtctttactaaaaatacaaaaattagctgggggtcgtggtgggcacctgtaatcccagctacttgggaggctgagacaagaggttgcagtgagctgagatcacgccactgcactccagcgtggcccacagagcgagacttcatctcaaaaaagaaaaaaggaaaaaaaaagatagtgctgagctgctctctttttgtttgtttttgagacatagtcttgctctattacccaggctgagtacagtgacacgagctcggcttactgcaatctccacttcgcgggttcaagcgattcttattcctcagcctcctgagcagctgggattcaggcatacgccaccacgcccagctaatttttgtatttttagtagagacggggtttcaccatgttggccaggctgatcttgaaacccgtgccctcaagtgatgcgcctgcctcagccttccaaagtgctgggattacaggcgtgagccaccatgcctggcctgagctgctcttgatcttccaaaaaaaaaaaaaaaagccttcttcagtattgctttaacttgatgattgactagagttttgttttcatagactaaaaattctacatgaattgtggtaaccgggctggcagttggcagagttgccagagtagcattgcgggcgscttggctgccaggccctgctgcggttgtcctcacgtgccaggaagcagagtctgtyrttggcgctcctctcatacttcctttctttgcttccacagtcgtcactgcggacgtcttctttgccataaatgctcgaccaaggagattcctattataaagtttgatctgaacaagcctgtgcgggtttgcaacatttgttttgatgtactgactctgggtggggtttcttagtgagccccccggagggtccaggccacgtccttggtcacctccccagcagctgctctgctcaccagcctgaccccacccagagcaggagctggcgggtgtcttcctgcggcaatagactggaacgattaaggaccatggtgtgatagatcccatttcaaatgattccatatgattgtcagtgtgtgtgtcagactgtgatcgatttcactagatgtctcactcatcagaccaggccattgggcctaagtggtaaatgtgattaggaattagacctctccccattctgctagcaacatacagggacacttggaaaaccatttccccttccagtagcttggtgtccatcccagagcattcatgaagtcttcccgcctgggctgactgatgaggcagagcctctcagcgtaggaagctggctgcttaatgagctggctttactctagggtaagtggctgtggacttttctgcacagtgttttcataaagataataggatcctcttgccctgaagtctttttttctttttacgctaagctgtatttttagtgagctaccccttttaaaaaggtgaaatctttcttaacagggttcaaagatgagagctgaaaaatcgtggccttaacaactgaaagctttacagtgttcatgctactgaggtgtcaggagtgcagctgggccgcttgacacctcgtagcagccgtctcattctctcgtcttgctgcgtcctgtctgtggagtcctcagtcactctgctgttggagagtgctggaggaaatgcacttttactgtgctgcactttttatagagctgcattgtcggtgattccaatttaaaaatccatattcaaaaataccctcacacatccctgcatcagtgattctaatgatcagctttgactggacctcagctcacacgaatctccaaggaaaaactctacagagcatcttttagagcaagagattcatacaggccaagtgatgagagggggagtcaccaaggcttcagccccaagggcatctccagcctcaggccggcaggtcctatgtccttgacacaaaygcttcttgctgaaatcctccctagtgatgctgcgagtgctgttggtcccagttctgtgtagcttgccctgccccatgaagggccaccagccaagggccctggccacgtgtgcgccaccttactttggaagtctctggcttgtgtgctggatgaggctgccagaacttgttgggcgttcatcgctgttagtacatatattaaccgtgaggtgttaaacttttcttttgaaggtttggccagtttctaaaaaatgcacatttaaagagaagcatctaccackgctttaaaacaaaacaactctgagatgaacaatatgtgttatactcagagattaacaatctcaatcatacatactgattctttcagacatttaataaccactacatttttttgcattaatgaagtttgactatatgtgtaaagggactaaatatttttgcaacagcctgttctttgttcattcttttctggatagtgtgtcctctgtattgcggtagatttatacattctgttgcctaaatatgtgtgtaaaatgagctgataaactggagtactacttaaaaaaaagtctgtgatttataagatgtatatgctttctatgtgaatataagcttgtgcacaatgtttaaaagaaaaacaatgaattagaagagatcccccgtcccccagtctgacatatttcatacagaatgtttaaaagaaaaactctgctagtcttggcaaacatttggccatgtgaggcatgtggtcagtttccattttctattacctggaaagggccataaggaagcaggcagggcttaggtagcttggttacctaagttagaaagtaagagaatcatggttcrgatatgaattgaagtggttggtacatggatacctgttctttaaaaggaatgtgggagatgagtcaagggtgaggccgattgttctgcccatgccctaccataccaatttcaataacaatcttgcctgtcattgcactcagaatcttaagatcatgtttcaaatatgttgattcaaacttgcttctaagcctgagtccagggatagcaatggtactgaccagctatggactgggagaacattgagtcctgttttccattggcttcagggcgcatccatgtggatataggaaaagcctctttccacagacttaggaagccccccgaccacgcggacgctcgctgggctgcactcagcaggctgcttgagtgggagctgactccaacatgccctgccctggctgggactaggcatgcttccagcccttcccgtgctctccctgctgtcaacacttgcgtacaaacctgcctagctgttgtaagttttcatcagtagcttaagtactagtagcaaaaacttaaattcattcagaaagttgccacttctgaatgagtagagcaggaaaagtaaactttactgaaacataatttgctgcaacagtcaacattgttatgctgaatgtgctctcaactgccctttgctcatcgccagatttattatccagtgtattcctaacagtcttttgttgtcgttgtttttaaaacaaaggtacggaccatgtgctatatataaatcgaatggcttaaactaatttgctatgatcctctaacaccgaaatttcccataaacttaagtgcctacacttaggacttttgaactttcagtcatctttttcgtggtgtctcactgaacgatgtgttagaacatgtgttccatttggagttttgggcctgtgcacggtcaaccccaattaccaatttagttgaggctggattcgattgctcagttcacctgccacgttctctccaaggagtggggtctacgtgacctttagtcctctacctcagagccccgagtcatttctgaccaccccgttctgtgtcctcactcttgtccctgaatgggtccctgtgtggatctcagtgtgtgtgtggtttctccactcctccccgctcatgtcccacacctgccatattgaaccgtttctgcactaatcttctccacgggcacggagtggagggaacgtcttgggaaaggggagagcttgacctccatctaggtttcttttatctggagaaaaagaacacttttgaactatgtaatgcttcrccctgaaaggcaagctaacgctaacttcccaggtgacagtagcaggaacaaggaagggtaatgtttccatgacagacacttgcttcccttgggacaagtcccagaagaactacctgaagcaccaaagctccccaccccagcctggtggcagaggaagcaggtggcaccaactcaccaaagggacttgggagccaccttctcactctgtggaagtactttagtgagagctgactggcaagataaaaaccctgaaattcccagaagttacagatgccttaaagactttctttggaagatcattgcctgtactattccttttttgtgtggcataaataatatattaacctrttacaactgacaacattggttttctgcagctagggagtcttgagtcgagactgctcgccttgatgacttgctcttttttggcagatgtgtggagttggctgttacgacatccctgtgtgatcccagaggaggggcastagctgggcagaaactgcaggcacacatttgggtggatcacctggcttccagccccttcggggtggtgctcagtgtggggtgatggtatcatagaggacyacggcgcttatcagcattgtttctttggagtctgtgtaatggaatgtatttttcaaatactgatatttgcattttctgtaacaattccttataataaaatgaagtaaaattgtgcatttaaagtggaaactttaataagacatttgtagttacttctaatgcagaagtaccaataagcattaaaaacaaattttagaaaactcctgacgtgaataagtttcttgaccagctgccctccagaaagtttgaattccaacatttttcaggaacatgctgttgacagcagtaaaagtagctattttatgtatgtatttttaatttttaaaagtttcagtaggtttttggggttcaggtggtgtttggttacgtgaggttctttagcggtgatttccaggattttggggcacccatcacccaagcagtgtacactggacccttttatccctcaccccaaccctttcccctgagtccccaaagtccactgtatcattcttaatgcctttacgtcctcatggcttagctcccgaaaagtagttattttaaacatactagctgcctgaacttactgtgcccttggcccagatttcagctcatagcaccgagcgtgatcactgaggcagtctcagtcaccgtcacctgacccctctgaagttctcaagaggatccactcatgaggagctttctgctggccgaggcgtgaagggcgactggcactgtgggtttcagagaatgctaaggacagtttcaggccttgcaaattaaaacctagtgatccataaagcccctgtacaaatcactaccaatcaagcagctcacgtggccctcacgctgtcctgagcaaatgtattccctttttcctgtcttccattttgcttacccctaggtcagactagctgtggtgattgatagagctcataaagctcattctccagtggcttttctcctagttaatatgcatgtgaagtgtttccacaggacaatcccaagtaatcctcacagctgcccttgaggcgaacagtgctaaccacgctgtcactggttatgataagcgaagcacaaacagtaaccaggcacatcaacttccacacgtttgcccagccagggagagcactgggttttagttctgcttttttattcatgagctgagagttctgggcgagtttcctaacttctttgcctctgtttccctatctacataatgggggcgggactgtagtccttaactgacagggttgcctggaggaaggtgatcagtaatgtgtccttctcatccaagtacccggattctggtgtgtgcaccgcaggctcttctggcagtatctgctgccaccggaagaaatctgggggctctggcagtaggaagtactctcaaggctagggtccagcctagggttgttgcccttctctgaggcacccacagacttctgagcaggcacagtcctaacctccccattggggccagctttcagagtacagctttgcctagagcaaagtgagtgtggggcggggcgggggtcacgcagtggctcagctgtgaccaaaaaacgtcagactcttcactcttagatgtttatagaaaactgtaatctcagaatgaaaaggcaaatgttgaaacttctttcaagatgacttctttatttttgggttttgtttgtttgttttgggagagtctctctctgtcgcccaggctggagtgcagtggtgtgatctcggctcactgcagcctccacctccccagtagctaggactgcagatgcgtaccaccacacccagctaatttttgtattttagtagagatggggtttcaccatgttggccgggctggcctccatcgaactcctggcttcaagagatccgcccaccttgggctcccaaagtgctgggattataagcgcccggcctccttcacaatgttggagtggagtgcagctgcaaaggctttgccttgacactgtgctcactggtgtggcagagatcagactcgcatcacaaagcccagctctgtcacccgacggttgatgtaactattagaagaggtggggagatatttatgccccttttctgggccataaaatgggaacttctcaaggcaggcatagagattaaatgagaacaaggcctggcccagcatagttgcccaatatgtatgttttctccttcccttccttctgccagcaagtctaactgcatgctcagcctaagctgagcttatctgtggcttccatcagggccttgcccttcctcccccatggttttgcccagggccacctgtactggagagggaaaggccaggcatttctccagtaattaccagcttctcatggctgagcccttcaggccattaaaatgacaacctactcttgctgaacctaattctttgctgaatcctttgccctgacatgagagatgtgttaccagattaagtaggaaggtaagtaccataaggtaagtatcaaaaaggaaatgaattctcaactgagcaaggaacagagcaggctgctgaagccagccaagtctgtcctggagcctgcacgcagggctcttgcatcagtcagagatcaggtaccctctaggcacggccagagcccgcagctggctggaatgactaatgctcctttttgtttgtttgttttttgaaggatcagaacatcttgggacctggccctcacactctccctgcattcctaccgcaaggacagcctctggctgctctactgggtttattccaccatactataagccccctgaggtcggaagccttgcttcctcgaccacccaaccctaacgtgatgcctggcacatagtaggttcttggtaagttatttgctgaatgactaaggaggactaaatcatgggcagtaactagtttccagttagcatggagttgggggctgtttctggttaatagagaagtctcagcactgagctcagggactgcctagaactcagaagaaaatcctaatttcagctcttctttctgtctgctcctggtcctgccccagggagggcagagacatacagaaatatggaggagtgaaaatggcaccgaatcaggcatccagagctttgagttctaggctcaggtccatgctcagtgacttaagttctatgtgcctttattgccttatctccaaaaagtgcggtggctcaggcctgtaatcccagcactttgggaggccgaggtgggcagattgcttgagcccaggagttcgagaccaggctgggcaacaaggtaaaaccccatctctacaaaaataaaaaactagccgggcatgctggtacgtgcccatcgtcccagctactcgggaggctgaagtggcagaatctttttgagcccgggaggtcaaggctgcagtgagctatgatcacgccactgcactccagcctgggcaacagagtaagaccctgtctcaaaaaaagaaacaactctgcacgaacttcccacacgctaggtgcggtggatataggggtacagcgctgagtaaagtggattataggggcatggtgctgagtcacgtggatataggggtgaggagctgagtcacatggatatggggtaaggctctgagtcatgtagatataggggtacagcgctgagtaatgtggattataggggtacggcactgagtaaagtggattataggggtacggagctgagttgcgtgaatgtaggggtacagcgctgagttgtggatataggggcacagagccgagtcgtggatatcggggtatggagccgagtcgtggatacaggggtacggcgctgagtcatgtggatacaggggtacggagctgagtcatgtggattataggggtacggagctgggtcgtggatataggggtacggagctgagtcatgtggattataggggtacggagctgagtcatgtggatataggggtacggagctgagtcgtggatataggggtacggcgctgagtcatgtggattataggggtacagagctgagtcatgtggatataggggtacggcgctgagtcatgtggatataggggtacggcgctgagtcatgtggatataggggtacggacagtcgtggattataggggtacagagctcagtcatgtggatataggggtacatagctgagtcatgtggatataggggtacggagctgagtcatgtgaatataggggtacggagctgagttgtggatatagggatatggagctgagtcgtggatataggggtacggagctgagtcatgtggatataggggtatggagctgaatcacactggggctctgtcctcagagtgtctgaggtccagtgcaagaggttgataggaagttcatggtaagagcccactgtgatatgagcacagccatggagcagggaaagtgcgtctatagctcactgctggcccaacagttaatgaaggctcccaagaggggcctgattgagctgaatattgaagcaatacggggtggattaattcaacggaggaagaagcgtcattccaggcaaaagaaacagcttgtgtgaaggcactgcagacataacgcagtgagagggaggctggacaggaggtgcacatgggaggagatgggaaaggtacaggcctaagaggagagaggccacagaagggcctcgtgtggcacgcagcagaggagctggcactcagtccttatagatcaggggagcccctgaggaggcttaaatgggggatgccttgatcatctttaagaaagagcttggccaggtgcggtggctcacgcatgcaatcctggcactttgggaggacgaggtgggcggatcacaaggtcaggatttcgagaccagcctgaccaacatagtgaaaccccatctctactaagagtacaaaaattagctgggtgtagtggcacgtgcctgtaatccccagctacttgggaggctgaggcaggagaatcgcttgaacccagggagtggaggttgcagtgagccaagattgtgccaccgaggttgcagtgagccgagatcgcgccactgtactccagcctgggcaaaagagcaagactccatctcaaaaaaaaaaaaagaaagaaagaaagaaagaaagacggctcccagcagtgtggaggagggattggagggagggagtacagttaggatccttcagtaatccaagtgagaaatgacagcctaggccagaggaagagtactagggacagataagagggaaggaaagggagagaatgagggaggcagaggtcccaggacctgcaggcgggttaggaggagggaagggaggatggagtgtggacggctgctcggatgctgactctgcgtgtagctggtggtgccattcccttggagaactagaagcagcatgggaggggaaggtgaaatgctctgcaaagctgcctggagtagacgtgcaggtttgacggtctaagtaactgtcggatttggagtgagaggagccaatgggaaggggtttgtggaggcaaaacggggttctcaaggcaattaagaaggaatgggcagaggcaaaaagggaagcaggataaagcccagcgagggtttcatggaggaccccacggtccacagtatccagagtgacaaagcctaggtaagaactggatgtgaccacggaatgtgccaatgcagaatttctcctgatttttagagcaaatggagctgaaaagcaaagctagtgagtataagccaaaactggagttgagggaatgtttatgatgtgagagaagtgagctgtttgatgcatacctgggggaagatccaggagacggggagaggttaaaggtacaagaggggcaggtgaggaggatggcgggggcaggcaaaaggagccatgagccagagcccaagtgtaaggaacagctgtggccataggggcaataagcccgggtctgccagtgaggggacaggggcagtgagcacgggtctgccagtgaggggacaggggcagtgagcacgggtctgccagtgaaggggacaggggcagtgagtacgggtctgccagtgaaggggaggcagcctccattttctagtctgtgaatctggaaagcgatttagtgaaatgaatgatggagaaaaaggagacagtgacagagagggaggaagctggtggatgttgagggtgagactgagcggcaaagggagctgggtggaagctctgatgaggcgatgcacagaggccgtggcgctgtctgtggtagtgctggtcccacttct

SEQ ID NO: 97999 - DNA, 39080 bp, Homo sapiens
aagtctatgttggctgagcacttttattttaatgtacaaagtgtgacaaagtatcataaatgcttttaacacatactgaagcatatattcaaatgagtgctgcctttctcaaagttcgttgtcttaggaggactcatcctaacgctgctgccactgtgcaggatacctttcaatctcttcttttggaattcgattataaattaatagatgattccttttccacattgctcattatattggctacaaataaatccttaccattaaaaaaaatccctttttaatctggcctttgactacttcctttttgttaagggctatttacagccaccccttctcccattgcttgtgctctggtcatgctgaacactgcagttcctagaagcctctgtgaatctgcatattccaattccctctgccagaaagatcatcctcttgttactaagctcaagatctcctcattcagaaaacctctactgcctttatctcccactctctaatctgtttagctcccttcaatttagctgcaccttaaaagtaccaaggtcacctcaatccaccaaattgtttattgtcttcattgctcctctccctaaccagttgataagctctttgaatgcagatactatgtctttttttttcctgcatcctcggggcccaacagcattgatttatgatattgttcaataaagatttactggccaggtgtggtggctcccacctgtaatcccagcaatttgagaggctgaagcaggcagatcacttaaggtcaggagttggagaccagcctggtcaacatggcgaaaccctgtctctactaaaaaatgaaagtaaaaagattagccgggtgtggtggcacacgcctatagtcctgctactctgatggctgaggcacaaacccagaaggcgaaggttgcagtgagccaagatcgtgccactgcactccagcctagatggcagagtgaaaccctgtctcagaacatatatatatatatatctcaagcgggcatggcagagcacttcgagaggctgaggcaggaggattgcttgaggccaggagttcgagaccagcctaggtaaaatagcaagaccccatttctaaataaatatttaaataagtaaataaagatgtatcaaatgaatggatacttgaaagaagtgggtaatctaaaatgacaactttgaaagtaaacattcatttgactgagtcctaggtgagttcaagaattactggattattcaataaatgcttttacacaaactctttagtcagtttagtaaagtcagactccctattcatatcataagcacatacacaaaatgccaattggatttaatattcatatgtaaaaaaaaaaagaaaagaaaaaagaaaaagaaactataagaccaccagaagaaaacaacagtgatgggccgggcgcagtggctcactgtaatcccagcactttgggaggctgaggcgggcggatcacgaggtcaggagttcaagatcaacctggccaaaatggtgaaaccctgtctccactaaaaatataaaaattagctgggcgtggtggcaggcacctataatcccagctacttgggaggctgaggcagataattgcttgaacccaggagatggaggttgcagtgagccgagatcacgccactgcactccagcctgggcgacagagcgagactccgtctcaaaaaaaaaagaaaaagaaaacaacagtgactatacaattttagtgtgaggaatgcctatttaaacataacaccaaaaactacacaagaaaaggctgaccatggctctgagctaatgtatcactctccaagtgttacctgctatgtagggcataagggctggaagccatgcttttttttccacggaatttttccccaatttttaagagcttaaatatctgcctattcaaggaaacaataagtaattgtaaaaataccctaaatcttgtccaaaaagtctggaaacacagggaatacagtgggtttttttgtttgtttgttttttgagacagagtctcgctctgtcatccaggctggagttcagttgcgcgacctcggctcactgaaacgtccacctcccaggttcaaccgatttccctgcttcagccttccaagtagctgggattacagatgtgtgccaccacacccagctaaattttgtatttttagtagaggtggggtttcaccatgttggccagcctggtctccaactccagacctcaggtgatccgtccacctcagcctcccaaagtgctgggattacaggcgtgagcaccacgcctggcctacagtgtatatttaacatcgtattttggattaacaattccatttatttctttagagacacttacctaagacagtatgtggaagtcaaaggaaaatatattgagcaatattatttcgaaatgttactaatacattgtttgaaaataaattagtcctatgtttctgactttttgaacacctatgaagtgttgtccagcgctttgggaggccaaggcgggaggattgcctgaggtcaggagttcaagactagcttgaccaacatggtgaaaccctgtcgctactacacaaaaattagccaggcgtggtggtgcatgcctgtaatcccagctacttgagaggctgaggcaggagaatcacttcaacccgggaggcagagattgcagtgagccgagatcgcaccactgcactccagccagggcgacagagtgagactccatctcaaaaaaaaaaaaaaaaaaaaaaattgaacaaggccgggcgtggtggctcacacctgtattcccagcattttgggaggccaaggtgggcaggagttcacttgaggccaggagttcaggacaaccccgggcaacatggcaaaaacctgtctctccaaaagtacacaacttagacatggtggcacatgcctataatcccagctactccagaggctgaggcacgagaatcacttaaatcaaaaagtggaggctgcagtgagctgagaccatgccactgcactccagcctggcaacaaagtgagaccctgtctcaaaagaaaaaaaaaaaaggaacaatctaaaagttcaataaaggattgtttaatatatacattatccataatgaaaataatagcattggaatgtatttattgacttgaaaaagagttcataatatattttaattatttatttttataatatagattcccatatctttccatagactgtagagggtgaagcctcagaatctgtatttttatttatttatttatttttgagacacagtctcactctgttgcccaagctagagtgcatggtgtgattttggctcactgcaacctccacctcctgagttcacgtgattctcctacctcagcacccccaagcagctgggattacaggtgcccaccaccatacccagctgatatttgtaattttagtagagacgtggtttctccacgttggccaggctggtctcgaactcctgacctcgggtgatccacccacctcagcctcccaaagtgctgggattacaggtgtgagccactgcacccagctcatattttaaatgaaaagaagaaaatggagattataaaccactaagtacattatctgatttttataaagacttatatgtgcaatttatacataaaatatatatgtgtgtgaatatatatatatatataatctgaaaggctatacataaatatgttaataataattatctttttggcttacttgtagtttgtaatgtttcaacaataagtatggataattaacaagatagggataaaaagataagtaataggatggcttactcgaaaccaaagcaaacactgatcaagcttattaaataataaagttactaaaatgaagaaggaactgaagatcttaaaaaaaagaaatcacataactatatatgatttccaatgattttctgccaccctgtggggaattctgcacattgcagaactgaagaagcaaagtatgaaactacaaaaacttctgtaaatcaagatgaaatttcttggcccaagtagttgtttagctaaagctctgttgatcagttttgttttctctactagctatttagtgaaattgctagactaggataaaaagaatacctaatacttaaatgtgattacaatatgacaaccaaggtcctaatacatatatatgaattcatctcacaaaaaccctataaggtaggtactattttcttcccattttatcaaagagacggactttaatctaccaatggtgggtaaatgttgccaaagcaatgtgaaatccaggcagaatgctgcatttttagtcaatgatttaaaattttgagcttttctgttcccctcaggcctgatcgtaccccaatggaatcacccaaatacttgatgctgagcctttctatggatttatcagatgaaactttggaaagggacttttttttttttttaagacagggtttcgctgtcacccaggctggagtggagtggcgcgatcttggctcactacaaccgccgcctgccaggctccagagagtctcccacctcagcctcccaagtggctgggaccacaggtgcatgccaccaagcccacctaattttcttcttttctttctttcttcctttctttctctttgcttctttttctttctttctttctctgtctctttttttttttttttttttaagagatggggtctcgccatgttgccctgaggtctggcgatctaccgactcggcctctcaaagtgctgggattacagtcatgagccagcacgcccaactgagagagactatgatgttctccaaacaaatctcatttggttgaaactctacagctgagtatggtctaatttgagtagtttaccttgagtactctaaccatggtctatagacctgggctcttctgagaactgtttgcaaatggttcacagagagagagtagaaaactctatgtcaattttgcaggtaattttatggctgttaactctaacgataaaaagttttgacttggactttgtatgtcttttcatttttctgttttattaacttgtcaaaaactaattgaaaattgaaaaaaataaaccgaccgttcccccagtgaagagaagcactgctgtaaagcttttcacactcaaatattaccaaactctaaggtcgcttctgaggcctaactccccaaaatgatgcctcggatatttttcctcgccttatttcttttttttctttttctttttttttttttttcctttttccttttatttgagacggagtttttgctctgttgcccaagctggagtgcaatggcacgatctcggctcactgcaaactccaactccgcctccgcctccgccctcgcctcctgagtagttgggattacagacgcgcgccaccacgcccagctaatttttgtttgtttagtagagacgaggtgtcaccatgttggccaggctggtctcgagctcttgacctccggtaatccacccgcctcgccctcccaaagtgctgggattacaagcgtaaaccaccgcgcccgacctcctccccttatttcatccattttataattcacattattgatcgctgataattgcacctattgtaatgatactgataattgcacctgttgtaataatattgatattgataattgcacctattgtattacaatattattattgatatcgataatttcacctactgtaatgatcaataaaggcaggcagaaagaaaacaaaagtaactgaaactaccaggcagcgtccctgcgaacagcaaagagggaagaaacgccttgaggcgtagtaacgccaccaataaggagtcgacgcgacgggtccgcccacaggcaaggaaggccgaccccgcgagtgcaggcgcgagcgctagcccgtgacgtctgagggggttggggggatgctgtgtgggtttcaagaagacgccacgcctccgccgccgccacgcccccgccgcctccaccgccggctgccgcgcccggaggaggtcgggatgttatcacttccgccggggcttctcactgygtcyrggtcagctgctgccgccgmcgccgtacygctgcggcygggggattgggccggggtctccaccgccgaccgaggggagcgggctccgctcggccctgctttttgcgacctggccgtcagccccacgtcgccggcctggaggggcgaagaggacgagggggccaaggcttcctccggggtgagtgcggcctgggagaactcggcacggtggctccggagctggactgggaaccggcctaggggcgaaagtctgtcgggcgcgtgcccacracgtccggggagaggaaacccagagagttacccttggtagggggagccatagaacctgctcgggaggtgcttcctggatccccgcccwgcttaggtccccgcccttggcttgggtcctgtttgtatttggcagtttggccccccaccccgtcgcttttccgtttctggtagttgtgctcgggatggaaccttgcccctcctccgctcccccacccttttaccctggtgtgggtgaagtggctgggctacgatggttcagtatttatgaccagcgtccgtcctggtacagaacaaagaaacttggacttctggtatgcctcgtaaccgcggggaatagacacggaagcagcataagtaatcagggctttaatagatcttccctagtacgctaaaccaaatacagagtgtgtacgtcaaaagccgagtccccgcgtgaatctagacacaaccctttctgtttaaatacctggcaaaatggtttggatttctggatgcatttcatgccgctggagagttacttgtctgtgtcttgtgagctctttgacgaaacagcttttccggtgttgcatcaagatagttacggtgcctcctatttatttaattgaataaactatgtgattgcattttagtgttgcttttttcattctcaccttctcttgattaggatctctatttcacctaatacctgatttcgtattttcaattaaatgtagtttttctaacattttataggaatctctgcaattgtagaaacaaattctgtaatttgtaaatggatgtttcctcaaagttacaactgaccttacccaattaagttacccctgcagactagtttcttgatcattttgcacatattcttagttctttttggtttacattttctctaaactctattcctagtcttcatattctctagtgcagcctaatactgctgggcttagaccggaagtatgacagatccacttctgcaaacggaacttgaactagattatcataagtcagtgctattatggtcttcaggcattacaagccctttgaagctaagtgcggccaaatcaggcattacaggcttcttctgtataaaattgccagtgcactggagacggtgtgctgtattagaaacagttccggactagatatggggaccaggatgtagtgtcattgcctcatatataagataaaatgatgataacacaagtgtcatgcatcccaaagttgctggttggaacatgagatgatggatgtaaaagtggttagtaaatgtgaaaagcactctggaaaagttctgttcattctatctggagtaatgctggtagaaggagcaatagggaggaaggtgtcagagaaagtatatgtaaccagatctagtaagttaccgggctgatagattgaaagatgtcttgttactttgggtggccaaggtgggcggatcacctgaggtcaggagcaaaaaatgataaagcaatgagatgagacaaacctggccaacgttatgaaaccccatctctactaaaaatacaaaaattagccaggcatggtcgctcgtgcctgcaatcccagctactcgggagactgaggcacaagaatcacttgaacctgggaggtggaggttgtagcgagccgagattgcagcactgcactccagcctgggcgacagagtgagactccgtctcaaaaaaaaaaaaaaaaaggatgaaaagatgtcatgttacatcctatraagtaagtttacatcctataaagcagaatactagtataatgtggtgatagtaatattccacgattatagttttatwttgcaactaatatttctaactacaacaaactgagacatcagttagtagattatctttttaaagatctcagcattttcaagtgtgttccgcatagtgacaataaatgtaacttttgtaggtggcacagtcatcttttgatttattttcacaatttcgagagaactcagcaccattctagtttttcctctaaattttgtgttaacatttattttattttatttagcttttttgagatgcagtctcgctctgtcacccaggctggaatgcaatggcgcaatctcggctcactgcaacctctgcctcccaggttcaagcgattctcctgcctcagcctccctgatcgcttggattacaggccagtgccaccactcctggctaatttttgtatttttggtagagatggggtttcaccatgttggccaggctggtcttgaactcctgacgtcaggtgatccgtccgcctcagcctcccaaagtgttgggattacaggtgtgagccaccacgcccggcttgtgttaacatttstgatagagcasttcatttcattgtttgaaaactaccctcatgggagcaatgacaagcacatgtctaggattttttcaagcatgtttggtgatctcctaaacatacaggctgttggttaaaaagtgaacataaatgtttagaatgaaacctttttgtttaaatggggaagtgaaaggcttgcccgggcgtttccatctgcctactgtaattgatttccgcataaacggtcattactggcacctattgcagcaccagtattaaactgcatatagtaaaatcactgtgtaaaattgtgttataatctaaacagttctaatgcgatcttaaaaaaaattgtagagacagatctcactgtgttgcccaagctaggcttgaacttctgggcttaaaccatcttcccaccttgtcctccaaaggtgttaggattacaggagtgagccactgagcctggcctaaatgtgatcttaacatttaatttttgcttatgttgctaaactgcctggggaaagctgcttcatcctggttggatttaccagtactcctcccccttgaagctatgtcagaaggaatcaattatctctttgatttttaacctaaggtcaacaactgttttgaatttatctttatgactgcaacaagtaagtggcataaggatgtgccaccactaccaagagtcaatctattgagaaatcaagttattcctgtgccaacaggttattttaacaaatatcatcttaaagtgttatttcccattctaatttccaaaaaaaaatacatgaacaagaaatgggaagcaacaacagttaacttgtgagtcagcagtatcctgattttcttcgaagaggttgtggttatattaactcctttcttgtttgtttcctgttcttaacagctgtttgatgataaagtgcttccaagaaacagtactccctcaattgtttaaattgttttgatctacctagtgtacttttcccctaaaattcatgatgaaatggtagagtaaatctatctatatctcyctccccaagttctgtttaactagataattgattatcctcaaactaaatatccatgtctatgtgctgaggtattaacacatgattcaatatgatattaaggtaaaaatggaataaataggctgagatagctgaaagacttgggctgcctgtgtttcgaggagctatttagtttttgttgttgtttgttttgttttgttttttgagacagagtctccctttgtcacccaggctgkagtgcagtggtgcaatctcagctcactgcaaccttcrcctctggggttccagcgattctcctgccttagcctccatagtagctgggattacaggcaggcgccaccacgcctggctgattttttgtattttttgtggaaacggggtatcaccatcttggtcaggctggtctcaaactcctgacctcaggtgatccgcccacctcagcctcccaaagtgctgggattacaggtgtgagccaccacgtccggcctcaaggagctgttttcacagagacaaacttgttccattggttaagcagctgaaaggaatggattgtcttctagaatttcccaagataaacctttcctcttaccagtgaggaacaattttacaaatagaaattaatattgctggtgtgtagtttcccacagaatatttttgttacatttttatggggtaacacvtgacaaatcctattcatgtagtttaataagcaaaataagcctaagagattgagcaaaggtttgctgaccagtgtccataccctacaggtaagtattatttacttaatttttataggcctgttatgtgctaggcaccatggtaggtgttgggaatatattgggtacaactttcagtttctgcttttatttttgaaatgctaaatatttttctgagtrtttgagatatttgaaaaagacacccagacaacatcctggtgtdtttttcaacacacaataaaaaggtacgacaagataatagaaagcttttctgattattgaatttaggaaaatacatcattcgctttagagtgagtaccaaagacttaagaaaagttaaacattgggaaatacagtaaattaaacatctagaaaagacttaccagttttcagcctttagtcatagmatgctttggtctcacttgagcattgtaattctagagtagtaagtattttcaccatttgggcttgttgattgtaattgtgggctcctttctactatttctgttctaaacagaggggattgtttggtaaggtaggtgtccctctttttgtttatttttccctcccaacagagaaagtgctaaataagtaaagattattttaaatgtttttcattaacttataaaaactgcctagatcattgttttcccagagaattaaaaaccttactcctatatgtaaatgactttttcaagcaaataagttggtgtggaaaagtcagcatctaccattttttttctgtggtaacaagtgtatcatcaaacattgaaaccttttgggaatgtttaaaaccttctcttgagkrtaagtaaaaattcaaactgggaagagagycttccagccttggcagagatacaaatttagtttaccttgtgaaatctaacacttcaggatatttccattgtaattttgtcattacggaacataaggcttttttctwtgtaactttgtgcatcttttgaatgttgacgtagcagataagatagctataggacatgaccacatttttcttttagaagactggttgatgtgaatggctgacataattgattttatttaataaatatcttttaaagtcacagatagtattgttttaaaaatcaaatggtatagacggacttactatgaaaagcattagtcattttctgcatttcaccctctttcctctgctactggttttgctctgtcacccagactggagtgcaatggtgtgacctcggctcgctgcaacctccacctcccaggttyaagcgattctcctgcctcagcctcccaagtagctgggattacaggcgcctgccaccacatccggctaatgtttttgtatttttagtagagactgggtttcaccgtgttggccaggctggttttgaactcctgacctcaagtgatccgcccayctcggcctcccaaagtgctaggattacaggcgtgagccaccgcgcccggcctagtgtcaacgacttttaactttatttttagtactgctagtgatgctccgtatctcttaaatatgttactgcaaaaagaaaagraaagaacagaaatatgttactgctgtttgttgaataactttagacatctattgacttgaatgtaaatgaactaaatactcgtgtatacctctttccttctatagttttcactgttttgttgcattgttaaccagttgatctttaccttacctcaacttctatttcttactccatcaccagagggagtatctctagatttcttacttttaaaatgaggatattggcactcacgtgattccttggaaaaactaaaactaaagttcatggcatatgttaaaatacgtagttgcataaaagggcattcaccaagttcagtgtttgaaaacatatgccgagctatatgagaagggcatagtatagatatgaaacaaatcaaaagattgcataattcatttacgggacaagttattgaatagacttctttaagtggctcaggaattgtggcatcaaactattgagaaggaaatatgaaagacagcacaccacctgactctgctgaatcatgagtttaaatattattgatttactattatttacggtctagaatcaacctctatccaagggacagraaatttaattatgagtytgtaataaagaacatttttatttcttaccccacttcaaattttttaatataatccatagtatgaaatatattttcaatcataacctgagatactatacatgcaactgaaaacaagtattttcactgaacagtatccttactataaacagtatttaactttcccagaatatatgtagtctgagtattctcttttctttaaaaaaaaaaaaaaattgcaaccctgtaaatgaatttcatgaccagaccattgtactaaacatcaagtatgaactaatatataagattatyacgccttttcagtggataaaaagtaaagtggaaattaagttatacatttttctctcttcataggacattggctccctggattatcaagagtttgtagttgacattgaatccaggctgaggatggaaggtgtggaacttaaagaagaatggcaagatgaagattttccgatgtgagcaatgcttttaaaagaaaacaattttagagcaaaasttcaaaatttctttatcgagatgttactttttttttttttgagacggagtcttgctctgttgcccaggctggagtgcagtggcgmgatctcagctcactgcaacctcygcctcctggattcaagcaattcttctgcctccacctcccaggtagctgggactataggtgtgcgccaccacgcctggctaatttttgtatttttaatagagacggtgtttcaccatattggccaggctggtctcaaactcctgacctcgtgatctgcctgccttggcctcccaaagtgctgggattacaggtgtgagccactgcacagctgagatgtcactgagaaactcagtaatacaaggcgatcatttgatactaggaagtaaagtttcttcggaacagttagattgattctcttgtatcttactttccaaccaagtatatatataatcttctataatctttcatttttgttttggtcacttaagtttgcaaatttttgcttttataataaagtgttttagtgtggtttgtttgttttgttttgtttttgttttcatttaaacaagatctgagggattcctcagagaaggaggtctttagttgtctttaaaatgtttctttaattttgtggccaggtgcggtgtcacgcctgtaaccccagcactttgggaggccgagataggcagatcacttgaggccaggagtttgagaccaacgtggccaacatggtgaaaccccgtctctactaaaaatacaaaaaattagccaggcttggcgctcgcctgtagtcccagctgcttaggaggcagaggcacaagaatcacctgaacccaggaggcagggkttgccgtgagccaaggtcgcgctgctgcactccagcttgggcgaccgagcaaggctctatctcaaaaaaaaaaaaaaaaatttgtgggttcccccccaccaaaaaaaaaaaaaccttactaagtaaattaataaggattttctagcttatctggccagccaccttgacatgtttgcatttgtatttacaattatattggcaccaggtaggctaatgaaaaagagagcaaaggcagaccttaagtttaaatagtgcttccgtgccgtacttgtcagaagacatcctagtgcataatcaggtgccttagcagttggatagcttagcagttggacagctgatcggagacctgagtcactgttgcatatggtggtgatagtaaatataggaatgctgatctcagaagaattgaaccattgttactgtagtctcgtgagtaaaaattgagcttcatacattgcatcatacatcacattatatttgtgcatttcagtcatatttgtttaaaattgttacmtgttttataattgtataagagctgttgcataaggaatttatatctacttttatgtgttacttatatataataagtgtataagtcagctctgacagtcagaatttttactttgaaagtgtagccaggcatagcasctcacgcctataatcctagtgctttgggaggccraggcagaaggattgcttgagaccagcctgggcaacatagcaatayccggtctctaccaaaaaaacttttaaaattagctgggcatgttggtgtgccactgtagtcctagctactcagaaggctgagrctttatcttaaacactgctaggctgggcacagtggctcatgcctgtaatcccaacacttagggaggtcaatgcacgagaatcgtttgagcccaaaagttcaaggccagcctgggtaacatagcaagaccctgtctstactaaaaattagccaagcgtcgtggcacgcacctgtagtcttagatactcgggaggatctcttgagcccaggagttaaggctgcagtgagccatgattgtgccattgtattccagcctaggtgacagacagcaagaccctgtctcaaaaacaacaacactgctttattccattttccaaataattatttctataagctgtatgtttaatagattgaacttcaaaaaaaaattctttcttaatttctggattaaaaagtatgcctgtgtcttctagacctttaccagaagatgatagtattgaagcagatatactagctataactggaccagaggaccagcctggtaagagcttgacacttactttcattgaaattatggactttgtgttattttttaaaacacgtttctttgtccaaaaaaaaaaaaaacttgagtttttattccatcatagaagtcaaagtataagttgaacattgaggaaagcatttttagaatgctttaaaaaaaattccaaaaacatacacttggtttttggaaagttttacagtaaaggggtggaggagatcatttttagtggtaagaggtatctataaggtctgcctctatttaaaagacattgatactttattgatctcttgccaacgatgtagaagcaataatgatcagaataaaaattttgtgaataggtgctttgaaattatgttcaattaatattattttttcccaagaatggggtagttaaaatttttcttattcarctttagcatctaagcattccttgttacgtatctttttctttattttccaattccaggctcactagaagttaatggaaataaagtgagaaagaaactaatggctccagacattagcctgacactggatcctagtgatggctctgtattgtcagatgatttggatgaaagtggggagattgacttagatggcttagacacaccgtcagagaatagtaatgagtttgagtgggaaggtaaatgtttcactgtttttaatctgatctttattaatgtactaagggattttgtttgaaatacatcattctttctaaagttcatatatttgttactaagataggaaattgtgctaacccttgaatattctcaaggacttaaaaagtgtgtatagrgtacaccagtggcttttttsccctcttatttgcccactgcystcatgtttttttcatagctgtttcaaaaatatttcttgataattatggcatgctctttttyagtcaatcaagtaagaaacttttgaagagacatatagttaacagtttgtgggaagggagttctgaaaggaggcatttggggtgactttttaagtaggtttgcctgacattgctctactttgtgaaatgaccaacttaaattaatgtatacttttagcccccgaacctagtattccttattacttgtaattcaaaggaattgtgctgttttactttgcatgctttctttaattacaaaattgtctacagtatcttatatatagttgttataatttttacatatttttttccatcttgaaaatgattttgttttcatagtagtgtttagcattcagtattttactgtaataaagtgtgatatgctatatttttggtttcttttttcttccctgttttactggttcaataaacagtccagtagtaagcaatactttgtaaagatactgaaatagttttgtgcctatgtgttttgtctcttctttctttaatgctgctgtagtcatttcctggaaggatattttccgttaacagctttgtcttggaaacaactaacatgcagtaggtttccccctccccccatcttttggtaaggactataatactgaaattttgaaaattattactacattgaaaatcagctaaactgcaatctcaaaacataaattacacttaatcattggtgcttatgctttggctaatgctaatttaaatagacttctgcatgtatacttcaaagtattataaatacatttctgctttataaaactgatcaaatgagaagtgatcattgagtagttaaccacttcctatctggtattacagttaatttatgtgctcaacaacaacaaaattggctcccagatagctacttgaagtaacctatagtcataactgccagggagaatattgtcacaagttgaatctggaaaggcattgtaaggccagtgtactaagattttgatgactctacaaattatattttctgaacttgtggatacacgtttcactatgattaggtggtttttgctaaattgggcaataaaagttaaagaaccatgatttccaaagacataaaacagcctcatgttaagaataagccttttcctcctttatggaagagagattkaaaattgtgcagatggtataatgaaaattctctgtaaaatctaggtagtaaagtggttaacgtataatttgatttttgttgtgtaacaatttgtgattcaaaaactttktattttgacagatgatcttccaaaacccaagactactgaagtaattaggaaaggctcaattactgaatacacagcagcagaggaaaaagaagatggacgacgctggcgtatgttcaggattggagaacaggaccacagggttgatatgaaggcaattgaaccctataaaaaagttatcagccatgggggtaagagttactgaggatttttcagattgtttaatgcaatatcagaattcttttttttttggaaggatatctgtttattaagagtaaataagccctgtacagaacacaggcgctaggttgagagactcgtcttttgtaggacatttcttcctgctaaccagttcctggagggcttgttttttttgtaactttacacaaggggcactaatggaaaatatagctttctcaagacatctratgtcagtttcccattgttttgcttcacaaacatcaacaaagtaaacctgaacatgcttagcaatttcccaatgttctttgctgacattacttttgacatactgtgtcaaaattcttaaggtctcccctcctttggtaaagtaggcaaaaccttacaaggaaaacactataatacgtggaaatatactgagttagatttccagtcacctgctctatggctctgagatgcactatatccataatggttcctaggactgtgtccacctgatggtttggagtacggaaaaccaacccttatggcttaagagtcatctcccatggaagacratgctggccttctgaacgctggggctcatgggcttgttgatgtggctttctggtgtgccaggatcccctggcagctcctgtatacttcagtcaagcagtccagccggggcttggcactctggaagacgggtactacttgggatatcccatgtggttccactggatccttcaataagatgcagaggtagtaaatcaccttctgcatgtaaatagcctcattgatgacaatatccttgaccttgcccatttctatgaaggtagtgctttcttagcctgaagcataagatgaagtcatctgaatgccaagggaatcaatgattaacagtctcctgatcaatcttcacaaaatggagataaccaagcagacctaagagggtgatgaagatggcagcagagaggatcatgctgttctcgcagagggtgaagagtccgtaggctgccagccacaccgtgcaggtgacagcggtgagcgaacgcagcgagagcccagggcagctgaggcagaattcccggcaggaagggaagtagtagcggcgctgcagggccaggcggccaccgcagatatccgaaaagctccgctcatcctccatgacaccccaactctgccgcccgcaccgcaccgcgcggcactccactgcgctcgcctgccctagccgtttcatgcaatatcagaattctaaatacttttagaaactctgcctagagatattatgtaattttgaaagaataataagcatttctcattcattttagaaacatgacaggtttaaagtaaaagaataaaagtaccatttaaaaatgattatatgcatacagtaagttgaaaaagtacaaaagaatttgtagtgaaaactgtcaggttgggcacggtggctcaggtttgtaatcccagcaatttgggaggctgaggcaggaggattacttgagcccaggagttcaggaccagcttgggcaacatagacctcgtctccacaaaaaaataaaaaaaataaaaaaataaataaaattagccaggagtggtggcatatgcctgtagtcccagctacttaggaggctggggtgggaggagagagagcttgagcttgggaagatgaggcttcagtggccgtgatcatcccactgcactctagttttttgttttgttttggtttttgaccctgtctcaaaattaaaaaattttttaaactgtctctaggctacccaaaactgggactgaacagtctccctaatttataaacagtgaaatgctctgatcttaagtgtgcagttcaatgagttttgacaaatgcctatataaccatatatacccatatatataaaacccatacccctraaaatgtagaacattttcattgtcccagaagaattatttagtacccctgtgcaatgaatactcascttcggtagccactgtcatatctaccccctgattagttttgcctcttctagaatttcatatatagtaactaaaatcatcctatgcactcttttgtttacttttcagcatgaagtttttgagattcatccatgttgttgcacgtatccacagtacattccttcttattgctgagtagttttccattgcttggataaaccataatttgcttatccatttttttttatgtgcatgtgagttgtttccagcttgggctgttataaacaaaactgctttgaacattcttgtagaagtcatttatggatataagtaaaacttggactctttttgttttgttttgttttgagacagagtcttgctctgtcacccaggctggagtgcagtggcgtgacagctcactgcaacctctgcctcctcggttcaagggattctcctgcctcagtctcccgagtagctgggattacaggtgcacgccaccatgcccagctaattttttgtatttttagtagagaaagggtttcaccatgttagccaggatggtctcgatcacctgacctcgtgatttgctcaccccagcctcctgaagtgctgggattacaggcatgagccaccgtgcccggccctaaaacttggactttttaaccwtaactcttaatttgccttaaaaccgtgaacaaatttttttttcttttttttttttttgagatggagtctcattctgtcacccaggctggagtgcagtggcgcaatctcggctcactgcaacctctgcctcccaggctcaagcgatacgccagcctcagcctcccaagtaggtgggactacaggtgcacgccaccacgcctggctaatttttgtatttttagtagagacggggtttcaccatattggccaggctggtctcgaactcctgaccttgtgatctgcccgcctcagcctcccaaagtgctgggattacaggcatgagccacagtgcccaggccaaattattttttaatagagaactagttcactccacacttctatacagcasccactttccatacttatgggatatacaaaaatacaaggcttaagtccctgcccttaagaaataggaaaarccataaaagtttaagttataaatcctttcaatctaacagtaccatatatagaagttaacctaggcacattgtaaatagtgctagaatgttagtggtaagtcagaacacaactcactgtagagcatgwcatactaccttaaatcctcctaacacaggacggagggcatatgggtcaagcagattgattttttttcagggtcatttccacttgatttactctctgccagatgcattcccctgcttatttctacagtcttcattcatctgaaagcaaatcacatgaatatttgtagttgcattcttctgcctaatttaatcgtactcagatgaagaaaatggcgtaatctgcatcaggaagtccacagacatacattattcagctagttcacaggaatcawattataagacctgatttatggcttaaatctcttatctttcagaaatagcactttttttataggggaaaataagaccaccttattttattgcattaycacacttaatatattttgtgactgagtgattaagaaaggtagtgaagattctgatgttcttgaaatgttcaaatcttttcatgtgcaaatttgtaagcaatagaaatgaaggttaaagcagaagtatttgctactaaatattggcttaatatctaaagactgctgttgaaacatacatattttagcgctgttttccattactgaaaattatgtcagagatgtaatttagtttgtttttttgtttttgtttttkttttttttttgagacccaagtcttgctctgttgcccaggctggagtgcagtggtgcagtctcgactcactgcaacctccgcctcccaggtttgaatgattgtcctgcctcagcctcctgagtagctgggactacaggtgcacaccaccacacccagctaattgtttatatctttagtagagatggggtttcgccatgttggccaggctggtctcaaaattcctggccttaagtgatctgcccacctcagcctcccgaagtgctggaattacaagcatgagccacctcgcccggcctaatttagttttaatgtcctaatttctacaaaatgctagcatttttaaatataaacttaccttttaaaaatcacccacttatggctctggcgatgtggctcatgcccagtgctttgggaggccaaaggaggaggattgcttaaggccaggagttcacgaccagtctgagcaacacagtgaaaccctrtctctacaaaaaaaattttataaaggttaaccaggcatgtttgtgtgcgctgtatccccagctcctctggaggctatgaggtgggaagatcccttgagcccagaagttcaaggctgcatgagctgtgattgtgccactgcactccatcctgggcaatggagcaagatgctatcctctaaaaaaaaatttaaaaaagcacccactttgccgggcacggtggctcacgcctgtaatcccagcactgtgggaggctgaggcaggcagatcacgaggtcaggagttcgagaccagtctggccaacttagtgaaaccccatctctactaaaaatacacaaaaaattagccgggcacggtggtgtgcgcttataatcccagcaactcgggaggcaggagaatcgcgtgaagccaggaggcggaggttgcagtgagccgagattgtgccactgccctccagcctggacgacagaacgagactccatctaaaaaaaaaaaaaaagcacccactttaaccataagcatcatagaaataaataaaaatacattgcagttattgtattgtgtctgtattgtattgggttatatcactatatttgtctacctgctaaaatagggctggctttttaaatatgcgaatttaagtggtcttgggtttttttgttttttctgtccaccgtcctctttaaattttactgttctctttttgggaagaagacattaaaattctatataagaccatataagatttacaaaacatacatttaatacagaaatctgtgaaaagtaaactcttatttataatttactaatcatacagatgtcttctaaaaatgyctaagagtaaaatcgtgctggtgatactgtctttggtttcttttttaggatattatggggatggattaaatgccattgttgtgtttgctgtctgtttcatgcctgaaagtagtcagcctaactatagatacctgatggacaatctttttaagtaagtatatattaaacaaaaacatttggacagaattstgagctaattagatctacaccttaagaaacttaaccttttcaaaaattataaatattccagttctttgggagactgaagtgggcagatcacttgagtccaggagttggagaccagcctaggcgatatgacaaagctctttctctacaaaatcaaaaaattagccaggcatggtagtatgggcctgtagccccacctactcaggaggctgaggtggaagtatcacctgagcccatgaggtcaaagctgcagtgaactgtgattttgccactgcactctaccctgggtgacagagtaagaccctgtctcagaaaaataaatatcccagatcttttcacgtgcaagtttgtgaacaacagaatgaaggttaaagtaaaagtatttgttactagatacaggactagatgagtccttattctttgatattatggaacgatagttttccaattcaagagaaaaattgtcattttaaaactgggaaatatatctcagattatttgttccaactttgtttcgttttgttttgagatggagtttcactctgtcacccaggctggagtgcagtggtacaactacggctccctgcagccttgacctcacgggctcaagccatcctcctacctcagcctccctagtggctgggactgcaggcacatgtcaccacatcctgctgacttcttaatttttggtagagacagagtctcwctatgttgccagggttggtctcaaactcctgggctcaagtaagccaccatgccttacctgtcccaactgttttatgttaacatttgcaggcacattaagtgtaaagaagtgatttttgtctcaaaatcatgtggctaaattacatttacccctagaaggccaatataattgagccaaatcagttctttttccacaaggtcattctatttctcaggttagtgcagtttttaaaaaccgtattgtggaaagtttcagacatacacaggggtaaagagaagtatatcaaatcttcatgtatcagtcacttcaacaattaccaatttatactttgttcccacttctaacccccagtttacaagtttgaagcaaatcccaggagcaaatcatttcacytagaaacatttcaaaatatatctctaaaaaataagataatcgtaatactagctaatgcggtttgagcattttcattgttgctctcattgtaggagagaggaaggaattgtataatggtacaatttagagaacctagttcagttatgcacagtgatttttaaggcttaaacttaatttgttttttacagatatgttattggcactttggagctaytagtagcagaaaactacatgatagtttatttaaatggtgcaacaactcgaagaaaaatgcccagtctgggatggctcaggaaatgttatcagcaaattgatagaaggtaatacaaatacaagttgaaagctagtctgaaaaaattttataatggctttaggaaatcaaactttgtttttcgttgctattttttttttttaactttttttttttttgagacggagtttcactcttgttgcccaggctggagtgcaatggcacaatctcggttcaccgcaacctccacctcccaggttcaagcgattctcctgcctcagcctcccaagtagctgggattacaggcatgcgccaccacgcccagctaatgttgtattttttgtagagacggggtttctccatgttggtcaggctggtctcgaactcctgaccttaggtgatccacccgcctcggcctcctgaagtgctgggattacaggcgtgagccaccgcgcccagccttctgttgctattttaaaacaccatttattttttaaattttatttatttatttcatggcaggtttctgttttctaaagatagcattttagaatattgtgagggaaatcaattttgatttttctataaagaataaccttaattcttcaaacttacaaagtagctttatatttctccttatttaattgaagactttctccttatttataagatgcaattttctccacattgaacactttttttcctattatttacgtcttggcaaaggatggagaatgtagtatgtttcctatttcattacattgagttttgcctaatttatagtgcttagcatgttttatgtttttgtttttgttttgttttgagacagggtctcactctgtcatctaggctggagtgcagtggtgcaatctctgctcactgtagcggcaacctcccaagctcaggttattctgccacctcagcctcccaggtagctgggactacaggcatgtgccaccacacccagctaatttttgtattttttgtagagacagcgttttgacatgttgcccaggctggttcttgaactcctggactaaagcgatccacctgcctcagcctcccaaagtgctaggattacaggcatgagccacagcgctcagtatttatgttttttaatggtgcttatttagttgtaatctttctttggaacaagctttagaagtgttttgtcttgggagttagtcatcagtacttaatggaaggaatgtgatcttccgattggtttgatcttgctgtggctaatttaaatcaagtcagacccattaataggtttctcttcacatctaaatttgacattggctagctcttatgattatatatrtatctcactttatgtgtgaaatatgcataatacaaagagtatttagtcatttaaaaaggagaagtctaggataaaacctttaatttttaatcaaaactttaaattccttaagaataggagttagatctgatttgtttttgttcctgtggtcatcttctccactcacacttctctgcctgcacagwgcttttcatggttttgaagaacttagcaccaatttctccctagtcttggaaaatgagaatagtttacttttacattcagtattggcctctttccctgtttacagagtcctgaagacaagtgaatgtgtatgctaggagacatttagtaacaggctatactgtggacgtaaatctggccaaatgaagtaaarttcatttcatagcagtaggagggaccataagaatttaagagtgcattttcttgtctacaggggtatcacacctaattgagaacttttgggtgagatttttcaactrttattttgtataaacttgcagcattagaatttatagaaatttttaattttctttgtgtgtgtgtgttttttttttaaactccaggttacggaaaaatctaaaatccctaatcattgtacatccttcttggtttatcagaacacttctggctgttacaagaccatttattaggtaatttttgagagccattgactttaattttattttttttatttatttatttttagttaacacataataactatacatacttatgggatacagagctatattttgatatgtgtatacattgtataatgatcaaacctgggtgattagtacatccatcacctcagacatttatcatctttttgtgttttgaacattcaaaatgacatgatttttgtatcttgtaaacattgtatccattgtatttgtcagaaatatggaagtaattatttttattttcttccatagctcgaaattcagccaaaaaattagatacgtgtttaatttggcagaactagcagaacttgtccccatggaatacgttggcataccagaatgcataaaacagtatgttttgttttatttccttaattgtattggatcttaacattttgatgtgcaatggataatacttttcaatactcattctttatgtattatattttataactgtgcgcrcgcgcgcgtgtgtgtgtgtgtgkaacaaagaaaaagaggaagaagccattttcccacaccatccccctaagttagcattttcttcaggctgtcagttgaagaactaggataaattatttccggttgtgattcatgttatacttttatagactacttataatctaagagatgatttctctaattgatcagtactaaagagcattctccaaacttgaacatagtgctcaacaaatttgagtaaactgatcatcaatattattattgaataatcatattgctaaataaataaaaatatttaaatcatcataaccttaatgttttccagtgactgaaattctgttctgattatcagattcacattcttccatgtaacttcttggacttggtagaaggctgttaacataaataactgagtattacaatgcatgtggaaaagtttctttgttctgctcacctgaggttttagtctatttaatgtatgaaagtcagatttattaagtaaatttttactttctacatcatgtagtaaatatttttggttttgctggaaaatttaaatgagtttatttttagtagcttttttcaagtttttattcattttcataacatgtatatttactgaaataactcttccctacaaaggtatgaagaagaaaagtttaaaaagaaacaaaaaaggtatatgcacaccttgactgggttgcatctagactagtccrtttgcattgcagactaactcttccttattggttggttagcttgtagacaaagataatagcatttgcaaatataaatgtaccccaacttccaaatacagggtgaacscagagttcctaaggctgaatatgacttggattcaccatgttttattgccatatatgatgccaattagcaattaaaaaccacagacccttctctctccttcttagtctaagtactaatggtgaaaccagagaaattactaaaaatggtatttggaacaccaaataattttaagactttatctgtttcaccattttctttaaatcgctaacttgtgcttttgaaatatttttgcagactttttaaaagttctcaatttatttccctggggttgattattatatttgcaatgcatatatactttggctaaccaacattggtttccttttatgcttaaattaaatggcttgctaaccagtcaaattctacatgtgataaaatacctaaaatctcagtgtcccatttaacagttaaacacttcactttctattttaaatttaattttgaacacttctgctttgagcataacaaactattatctattgataccttgacatagatgatgaaaggcaagggtataaaatacttagaattttgtataataatttagaaaaacgtagaatttagatctagtttgttagatctttaaaatattggcaattaaattagcaaaacatagtttaatacaatcttaagagttacggtgagagatttatatgtaattatcttgaccattctaaggagccaactgtaactaactggaacattcttaactttgaacacattttgtttctgttgatgagtgagaatttagtagactttgtgatagaatcagttttacacttctatatgacacttcacagtttaaccaacactttaacatagaaatgtagacagtgattttagatcatgctgatttcacattcctttctaggcattgctgtgcattcgacagacaagtggctgaaattaaaaatatgatttgtaattgtagaatattttgaagccagctgcttcatagatttcacagtgaattgcctttgttgataaaatatgctgtattaagcctttttaaaaaaagtttttaatactgttaagtaatttagacatcagaaaaaatatggaatttgtactttttatttaaatatattgtttgaaacctgtcactattttatcttgattttttttttacttgtgtttaaccataaatagaatgattacatgtatctttcaaaaacgttctgttttttgtagtttctttagtcttaaaaaataataaatttttgtcaatctgaaaatgataaaatttaatttttaaattaaatttaggtagagaggcatgttttgttttgagacagagtttcactcttgtcacccaggcaggagtgcaatggcccagtctcagcyaactgcaatctctgcctcccgggttcaagcgattctgctrcctcagccccccaagtagctgggattacaggcacccaccaccatgcctggctaatttttgcatttttagtagagactgggtttcaccatgttggccaggatggtctcgaactcctgatctcaagtgatccacccacctcggcctcccaaagtgctgggattacaggcgtcagctaccacgcccagcctaaaccaaactttacagaagctaggtgcaagggagcttatttaaggtgacaactgcatgatatgataagtagtggtgctaagaagagtatgaagctatgagtccctatggcaggtttttggggagcaggggaagaaggggcaaaaccattttcttgaggggcttgtggggaagagggttgaagaaatgttgacaacagggagatccagtgtccccagtgacagaaaaaggatagcagtttaaatgtttaaaatgtttctttcaaacaactggatgcaagtgtggccatgcagatacagattgttaaaatgtttcaggggagtttaaaaataattatgaaattagttggtaaggatatttcagatgttaagaggatttgatatattttgcatgccttatcagaaatacattccaaattttttataacaatattttaaatattttaaaatgttactttggctttaccacagaccagggcttttaggtctgtttcactaatattcaggtgggcatagtaatgggtgatgagaataaaaacatatgaaaaatatttttctttatctaataccggattgttttaaaggtcccttcatcagttattcagaccactacaaatgtaatagtaatagactgttagctttgaagggttgtctgtaattattatgtggtaattatgtaatccttctaatgcccacatgcgtaaattttgatatgactgatgtccaacccaccactaaataaataagctttttgatgggtttttgttttgtttttttgagacagggtcttgctctgtcacccaggctggagtgcagtggtgcagtctcggttcactgtcgcctccgtctccagggctcaagcaatccttccacctcagccttctgagtagctgggactacaagtgcacactaccacacctggctaatttttgtattttttgtagagacggagttttgccatgttgcccaggctggtctcaaactcctggtcaagcagtccrcccgcctcggccttccaaagtgctgggatcataggtgtaagccactgtgtctagccaataattaatttatattagatatttttgaatgttaaattctttttttttattttatttatttttttaagacggagtctcactctgtcacccagtctggagtgcaatggcatggtctcagctcactgcaagctctgcctcctgggttcaagcggttctcctacctcagcctcccaagtagctgggactacagacgcgtaccaccacacctggctaatttttgtatttttagtagagatggggtttcactgtgttggccaggctggtctcgaactcctgacctcgtgatccacccgcctaggcctcccaaagtgctgggattacaggcgtgagccacggcatccggccttgaatgttaaattcttaaggcttcttactgtcaaaacaaatttaaggcattcacaaactgtgtaccaataagttttggagaataattatgggttctataaggatgcattttttatcactgaattttaaaatattgattgataattggtggccttcatggcattttcatattttagttaacagaatcatttttgagggagttgtttttcctgccattttcgtaccacctggatccctaccacagccaagttacaggtcaagattttaatatgccatgtaatttgaacttttaagaaagtttatggctgggcacggtggctcacgcctgtaatcccagcactttgggaggctgaggcaggcagatcacgaggtcaggagatcgagaccatcctggctaacatggtgaaaccccacctctactaaaaatacgaaaaattagccgggcatggtggcgggcgcctgtagtcccagcaactcgggaggctgaggcaggacaatggtgtgaacccaggaggcggagattgcagcgagctgagattgtgccactgcactccagcctgggtgacagagcaagactccgtctcaaaaataagaaaaaaaaaaagtttatatgcatttgtatgtaaagtrttttataatctttaaagaaacaacggtcacatttcttgccagtgtcctcctgcctttaaaaattctcttttctggttggggaaatgatgtttggtaactgtttttactatgtctgcttctttgcaaagctttgtctttaacagagtaatattctatgctaaaatagtcattatttttagaaagaaaattgttcagttgctggtttcttattttatatattcttcattaaacagagttgatcaagaacttaatggaaaacaagatgaaccgaaaaatgaacagtaagtttggcatctagtccaaacaagactgaagaatgtgctgatggagcagtgctgtttctgcattcataatgcatttattggcccatatttttatgtaacctgttacaaaatagacttgactttttcataatggacttttgtattatacaagggactgttcactgctgtactggtttgcaaatttcttgaatttagctctttaatagctaactgtattattatcgttttatattttatattgctaaatagagaaccacactttatataaagtagtttttgcatttgtttattgaatgatgcatcttcttcggtgaaatatttatatgcataaatggcaaaggaaagaaataatatatatttttatgtcattgagcaatattttttaatgtgtacctgtcttatggaagaaatatgcaggtatataagaccacgattttctaaagtgcatattagaatttttgtttttgtaaatggttaaatacatttcctgggtaacttaggaaattaagtttttcataaggcaacagatggttaaactgattgtcatgaatacccaaagatcatgtatataatcgaagtgtattagtaccatcccaaggtktttttctcatttaacayatttgtttcataattcagcaagtacagatgcaagcgcattgcacactttttcctttctaaacttaaagacaagtcaaaaagccattcttagaactagaggatttaagagggtmggaattagggtttstatatatgtatatatrggacattttatcttctggcccaaagtcagaactttataaaaatcttgagtttgttcactaatgtgaaataagctatgtgtccagggtattgctcccctgagtgtatatgagtgctgagtagtattgcagagaatgtgatgagttattcactgtcacaactttttctatagaaaacaggggctgctttttaaactctcactatgggcactttaccaaaatacttccatatcaattatttgaactcggtagttgtttgacctagttagatgtggtgtttattcaagtttgtatgaaatcatgtttgacaatactgtaaattaggttaattttgtaagtcttagcatcatcatattgtgctgttttggataacacgtttgttacaagcatttaaactgtttcatttggtagtacctttacattgaaataaattgtgtttgtgcctccaaacaaaaagtttaattaccgacaaaattatttctaaaacaacagattgatctgatattgtgtcatatacttgaaaggctcatacacagctggtaagcataataccttccaaatttgaaggtcatggctactcttcaacccttcctgtaaggtattttacaaaacagtggcctagagtagcaaaattgaagtggatgtgagctaacctttyaagatttagtctatcctagattgaacacacatgtggctgtgaccattctcatgtacttacaaaccttctgttacaaaagggaactttcctatattttttgtcctcctcagtcctaaacttggcatgctawcttaaaaccagttataggagagagatgctggaggattcccaggatgaaacattcctcagcagcctcctgacttaactcagatccagcagctcttggcagatcctgaactaatgtcattacagtgaattgagccaaaacgattattgcttgctcwcattttaggaacactttttgttgaagaagcaaactaacaataacaagttaggcattccttctgaatttaccatataaggattatgtataaacaattatattgaatttgtcattagattctatatttgtagacgatttaacgtagtctttcatctgtacatctttatcttgctcaaaatgggctgaggtttttaataggtggttttctaccacattaagtacttggttcttcagtttaaaaaatatgaagaataacttcaactcttttttgcattattttgatttttgattttgcagtcattgctcctaactgtagatacatgttgcaaaagtgatgtttttctgaattttttttaaaagtagaagactattctgttaaacattaaaattcagagacaacagtgataacacctgggatataatgaaaatgaggtgctgtgaatcagtaaactaaagggatacctgctttaacctgcaccttaatggaatctggtatagagatgtacccacaataaatgttttataagatttaagatcataatagtaggttagaggaagagcatttattaagtctgttgtttctaatctatagctaagttaacatttcccatattattccattttaatttcccattactgaccaaggtgaaagtatatgtgattgtacttttatctttctgttgggatcatggatctaatttaactggcttaatttgatgcttctgtcactaggctctaagtgccccttttttagtcagaagtttttcatgtgaaataatttgattctgtgttctgcttgatcatactcctaagcaagcaccaagggaagacgttctattcaccccacaatttaagcttaacaatctttaactcagagggagatatgaagaaatatgattctaagtagggtctagcagaggcattggaaagtgataaaactaggaagtaagagaaagcaaacctttataaagagataaagacatagttgttacctaagatgccactgtatgtgtgccctctctttttttttttttttttttggagacagagactcactctgtcacccattctggagtgcagtggcgcaatcctggctcactgcaacctctgcctcccgggttcaagcatttctcctgcctcagcctcctgagtagctgggattacaggcacacgccacaatgcccggctaatttttgtatttttagtagagacggggtttcgccatgctaggctggtctcgaactcctgacctcatgatctgcctgtctcagcctcccaaatgcttggattacaggcttgagccaccacgcccggccatgtgtgtccttttaagggaagtaccatatgtgactgctgatggtaacatttcttgtatgcagcaggaaaacctgcaggctatacgcaaggtatgtgaataaagactgtggattgaagggggaaaagttgataatacatacccatgataagaattcatattttctctttctttgtctcttcatacagaagcaagttcgagcagagaaggttagcagttacagcacttaaaagtttaggattgagggtttttggttggtttttttgtttttttgttttttcatatttcactgttgctgaacattgatttagtcttccaaaatggacatcactagtaagtgcactgaatactgaaatatgctgattggcaagcatatatctgtagctagaatttttttaaccgtaattccagaatttaaaaaggtaagagatctgctttttgatagaggccttttaaaaagactatataacatttctatttggctgtttatgtgaatgctcagggaatttggacatgtgttttatacagaagtggctttttatatttcttcaagtgataaattagcattaggacatatcagatagaacaggccagtttcctgatgagattggtagagatgttacggtaggttcatccttcctttttccatgttatatgtggagaagtgttaaacttgctcaagcaaatgggagtaggagataggctgaaaatagagattgctacaccattctattttgttttcatgcctgttttttctccaatcctatatggacatttgagaaatggaccacaaatctgagagggatagagtaaaaagaggcattaatgtatgtactcacaagttagacctattttgctgttaaaataggtctggtcttgtcataggtcataggaattgtgtagtttgagttgctgcgagaaagagtcaagaacttagacttgaatgggaaggccaactggtgagggaagtggggtattatctactcaaatgttctaagctaatacaaaagaattacctggcaagcatccccctctgcccttcttgagattctgaatgaacttagaatcagatcaatggtgagacccagttatgtaactttcctttgaagttctaaaggataattgaaaataaagtagtatggcatgtttaacagtaaggagtgacactaaaatttgaatataacagtatgttgcaactatttataatagacctatttatgttttgagaactaagtaaaatgctatgaaaaattcacataaagcacttaagcaccaaatgaaaatcatttcgtgctttcaaattaatgatactaggcttgtaggatgtcttagaatcatgtttaacaagaagttaaaatatttgcattttgaaatttttatgcagtttggctaaggaggaacttggaaaataacattcatcagcttctacactgcactttttgtatgtggactttgtaaagtttaatgtccgtttaacagttgcttgtttatttgtgtaaacctagctagtaaatattgatgatgttcagggccactgacttgcacagcccttggagcactattcacacagaacacaattcagagtttgttaagacattaacacactttgatatctattccaaaaatacttttgttaccacaggttcattgctgtcatttagacaaaattaatgtactgtgatattttcctactcttaagatgatgttgcccagcctagtactgtcagaaattcagttctgatgtctgtgtgtgcaagatattaatgtggtccctgtaagaaataccagagttggtcatgatttactaaggagatgtaatattttctttgacctgttaggaatataacttgtgtcttgatttgttgcacatcatattttttgcaacattaatgaatttaaataaattaattggaacgttcgtctttgtctttttatcacatttttctttcattatgctactaaatttttgctttgaattatcctataaacctcttaaataatttcagacctttacacttgtttccctttctatagtctaagtgcttctattctttggggattagagagttcagcctgctttattttaacatcaaaacaataatgaaactttgtgtttcatagttgagatttttttttaattaatggggaatccaaggatgaaaccatgagtggcttaaaatgaaaacatggcttttttttttttttttttttgagacagtttcgctcttgttgcccaggctggagtgcaatggcgccatcttggctcaccgcaacctccgcctcccaggttcaagcaattctcctgcctccgcctcccgagtagctgggattacaggcatgcaccaacacgcccagcgaaattttttttgtattttagtagagacggggtttctccacgttgaggctggtctcgaattcctgacctcaggtgattcgctcacctcggcctcccaaagtgctgggattacaggcatgagccaccgcccctggccgaaaacatggcttaaataagaagaacttgtttagttcatagacctgctcagaggttccagctgataccacttggtgttttttgtggttttgttgttgttgttttgcacatactctttaatcactattcagctattttgtaggataaactgctctacacatgactgctgggtttaagccagttagtgtaccatgcaccctgacacctaaaacaatttgtgattttgcaaacttgaaatttatagtgaagtatttatcttgcatattagatgcaaattttaaatataacttctcccaaattaaagttcttcatgaactggtcacaaactaaaaactttgcctgcagccctgtttcgaggggtaaagaagataccctgcttaccctgctataatttttttttttttttttttttttgagacggagtttcgctcttgtttcccaggctggagtgcaatggcgcgatctcagctgactgcaacctccgcctcccaggtacaagccattctcctgtctcagcctcccaagtagctcgaattacaggcatgcgccaccacgcctgcctaattttttgtatttagtagagacaggatttcaccatattatgctggtcgcgaactcctgacctccggtgatcgacccgcctcagcctcccaaagtgctgggattaaggcgtgcgccaccgcgcccggcccctgctataatcttttcagaattcgtctgcaaggtcttcaacactgttaccctgaacacacttccggcatgaaatatgaatgccctacatttcttaaattgtgcatctaacaatggagaagattagtctctaaaaattataattcccttaggaacgatttagtaaacctggtgaattactcgagcagagcgcctgtccaccactttaaggcttcaagctccagcccgacgcccctccttccctctccacgcccttccctgacaaggcttgagtggcgggcgagagcagggctgggcggggcctcccggccctcgggcggggtgtcacttccaggttccgcgagcacttccgggtcgtcagctcagttctgcggtttctgcggcggctggagaggtggtcggagaagtaggaacctcctgccgggctcgtggcggcttctgtccgctccgcggagggaagcgccttccccacaggtagtgggttagggagggcagggttagggagggaagcagggccgcgctccctgccgcccccccggagtcggagtgcgttggtggggtagtctctgagggcccttcgctcctgggatctgcccgttaccgaccgttgccggcaaggccccgcggccggcaccggagaagggcggcgaggcggcggggatggtcgcgtcccgtggcgggaggctcgtcgttcacggggcgcccacagaacccacctaggggaggtcctcagcccaccaccgtattttcagccaggtgaatgtcttaaagcatccactagcgccctgtgagttttgccgaatttcggagagcattttttaaatgtctcattcctgtgctttgtagcttgttgtttgaagtctgccttccaactttcttcgtgcgaactccgacaaaaggaacgaattttaaacttggtggtttaatcaaaaaatgctaggacgagttacttccgaatttgacttctaattttctgaactgcaaaacaagaagggaacaataaatttctgtggctgataccacatctaaaagattagaacacttaacaaggaatttttaaagaatgtaagaacattgaaatcagcacttttaacaaacgtttaacgcagggctattttctagataaactcaaaaatttgtcaaatgggacacgatgcacgattctgtattcctactctgtggagtttttatctacctattgggacttcttgccctttttaaccccctctcccctcccacacgcatattatacttactgatatttgccttcgtttactgaacagatttttttttggctcctattgtgtgccaggtactgttctagacgcctattttacttaagtgaacaaaataaaaagctttgccctcatggagcttacattctattagaggatgcagaaaataaaatatataatggtgttagaaagtgatggtgccatcaaaaaaaaaaagagaaatataaaggagtacgggaaagttccagagtggaggtgggaactggtattttaaagatgacggtggtcagtttgagcctcatttagtaggtgttatttgagcaaagacttgaaggaattaagaaaatttgctaagtaaatatcaggaagagc

SEQ ID NO: 98000 - DNA, 38473 bp, Homo sapiens
atccttcctgaaatttctcttaaaaagcagagaagtagaaccaatgctgccacctagtggccagccaaacaaatcaggtagcatactggagaaaaaggtcatagtcccgacaatctggtttccctgcctattatcaagccacctaactccttacttttccacaaaaaaacacaaccacatatcttaagcaagccctcctccacagtcataatccaaatacttgaatacagcaaccaaagtctgtcttgttaaacacactacttctcatgaaactttcctctgcctattttaaggtaggtttgcccggtcctatggcccagtagagatgacacaggagaacacggaaacatccaaaatgttcactggttcagagtgtgtacacagtaattttgatgtctgttgcctcaaatacctcctcgatcatcgcagatacattttcccattgcagacgatcaagaccacatccaatcctgaaaaagacaaaatatctccattgatggtaacgaaagtatctaggaaactgctcctctcttttaagctatatccactcaaagcataaaaacaaataatctagtctgacacccttatgggcaaccatggtaggagtttggaagtcaattcttgttgtgagtcaccgaagaccattcctagacagctctaacatccaaaaactatcacttctgtttgcctaataagatactactttccaactatttcatgctacatttagaaatgtgtaactgtcatgacattagagactcattatccctctatgactactgactaaaattggctgtggatggatggtgaaaggttggtattttaaaaatgcacttatggtaacagaatgttaacgaaagtaaggagaagaggaatgaggtacaggatctgcaaaaaagaaagtcaagagggaatgctgggaaatggtaagatagttgcaatccaggagtaaggtctttgcaacaccctggtaagaataaactcagtccataaaactctactacttggcaccttccaagatgttactctagtgatcctcaacacgcctagggaaaaaagagacctaaaattggtaatttcatgtcataatgtgataattaagtccataaggaattgtgattaaaaaaaaagtttctgatatgtatgtacaccataaatatatcaaagaccagtgtaaaataagggacatttgaggccatatgcaaagtaatgtggggcgcaagataaaactgcatgtatgctcagcattgactcaaaactaccagggtgacaggaagaaaagaggtgaggcccatttcctgaaaagaaagcaaagggactactgaaccctcaatgtcattccctaaattcccaatagctaaagtctaagaagttacatcagggacagatcctctggctattacccatactgaccaaaacaagtgtgcagtataaaagggaatgataatttacaactttcttgacgcaaagtaataggtttgggagatgggaagtggtccaagaggaaaaccaccattgctcagtcttgattctttagcttacattgctttaggaataaaggccaagcttcaagcagagggtgctgagaattcaacaaatgtagctgaatgacaatggtcgctctctgctaagcaggctgaggcagatgtatatttcaaggtaattgtcctgattcattcaactcaagctagaaaatggctgtgccttagtctaaagccagacaactggttcactggtggttttacaaaattttgacttttgtccacctttaaatctatattttgggttaagcttttaagttgtttgtctttgggtaagatagtaaaccccaccaatcaattaaatctccatttaggaccatggatttccttgcctgggcatggagaggtcagtgactccattcttcagacaatgagacttcattgcctctaaactcttctgtaagttttcataagttggcttgtgcgaagcccttttctttgtaatctgaacacaaaggattcaaactttcatcatcccaaaatgatagccaaagaaaagtcatcacattcccccaacatcccaataattaaaagagtaagcacatttttatagaattagtctagagcaaggatgacaaatgtcatattgccctttccacactgttatgggagaccttcaagaaaatccactaaatagaggctgagaaacccagactctgccacgtagcaatctttccttttcctaggaaacccatgagattagcagatgatgcctattgtcaatatttttaagcaaggtaagtgaagtctctgtgccacttccaagagataagctgcatatctctaacagggaagaaagcataccacctgaaaattccctgctaaaagcctctacttatttagaaactgtgcttgcttgctttttgtctctctacataaaacaacagaaaaaactggtagggtcccaaagtaaaaccactggaagccacataagctttaaggacagaattcaaaggggctaggacatctccccactcagtttgtcatccagatcaggcttgtagtgggttagctgtaagctacccaccaccaccactaaggaagccacaccctttcagggaccaaatgccatcctggactgttgaagaaccccacattcaggcagtagttaggagaggagctaagtattatttgggactgcacttattattttttgtttttattcacccccttgctatcagtgtgctatttgacatggaataagagaaaagctcctttgggaaatctgtctcttgagacattattgtttttatctcactctgcctaggaaatatagtatggcaggcattcctaacttttgcaagtcttagaacaggcctatggtacatgatacacgactttcccacagagctgggatgcagcctcacatttctttctaacccagtgctccaagtagccgccatcactggactggagttgtcataagataggaagctttttgacattcttagttgtctagaatagaacatcatgatcaacacaaatgcagtgcagcccatctgttcacaaatccttaaaatgtattaagaactggccctgaaaaaaaaaggaattggccccatcttaccaagtaatatatatatcgcccatctctcttcagaacagccacttctccagatttcttttctaagaaaaagttatttaatagtagaaatgaaaaagaaaaccaaacactgatctctaaagattttaaaatgtttacagatctgagtttacctcagaactagaattttcaacactgaagaagggaatagggaagacctattgtctcccacaaacactttgctttttatcagcattcccaaatactatattccttaacttaacagctttcttacagtcatgtttcctcacaacccatcttttgtcccactactacttttaaatatatcctcatttgtccacaaactttctctattgccttgaaattgttttatagtgtgtagttttttacttgccaaatgtgtatttactcaataattatctttttacatacaaagagctgtataaggcattatgaggaatacagatatataaaaaaggaattaattattacagagttttcaatccagagaagatatcatcattccaaataactataatacaaagcagtaagaattgcttttgtctaaggctaagaatcactgtggacactgatgctgttaagcctggaatgtggtcggagaaactgttgcagaagctttacataggattctagtgcacatttctggtttaaagtggcccgtagaaagtgatgggaggggtctgtaaggaagaagaggtttctaaattcctctttgaagaaaaagcagaatattggtaagtaaaggatcttgaatgccaacctatagactaagcatctcagagttatttcaagtttcagagaagtacagtaatatcgtcaagaaagtttcatgatacaagaggaagagattaaaaaccttcacaggagttgggttttgatatggtaaacgtctaaactagaggccattcttggggaggaaaatcttaaaaacatttggttcttaggaatcccctctttacacgcatattttattaaagtgtaacagattaaaaggtgctctagccagggcaaatcaggtaagtggtttccaaaactcacgttgatttaaaagttcttgcacccctccaaatttcttcttaaagaggacagctatcccagcgcccatgcgacaatcctcactgatacagtgggctaaagagtctgttttcgggcatgcaaaaaggtctcctttcacataagtgatctaaaaaatgtgcaaaggaaaagacaatgttttattagatacagtaaaatactaagctatttttctgtattttgtgtcccccacgactacctctcccggcaccccttcctccaatctgatttaaagccaaaccaattacagcatgtgtaaaaggaaagtaatggatgatccctgcctagaattttgagcctttttaaagtaaatcagctagagagaaaaaaagataatgcaatcattaatttaattaaaaagtgtttatgcttttgacctccattattacgaatttcagttcaccaataagtcaatagttgttacgcactctgcttccttctggatcttcattaaggctgctggccatgatactgagtcgctatttccagaatttaagtgtttcttcagctatgagaagggaaaaggaagtaaaaatgcttaggcagccttagtatataatattctgattgccctgtacaaccacttaataggcttttttccccaacgtttatcgatgaatgtgagtttgttcggcccctgggacgtaatacaaaacccttctggggcaaagaggaagaacgcttaggttcggaggctgtctcgacccgctctcatttcgtgctttcctggagcgccccgctccgtcagcggaagcaaagcccatccctaagacacgcctcctcctttctccagggccactccggagcaaggccgatttaggacggtctccttttctctgcacgacgcaaaagtatttccccagtgggtctggcttagaagaaaacagaagggacttggccacagtcccgttaagccgcaaccacagagtgtacagggtactggcgtgctgagccccaggcgtggggaaaggaaggcggcctctcaaggaacgttcaccccccacttttttggggggtgcgtgggagaaggaaagagtctattgaagcctcccattctctgtctcctaccctagggcgggtcagcgaggacgcagtctgtcctggggtcctatgggagggtgcggggaggctcgctcaaagccccaacgtacccaagtcacccttcacctggaaaggagtcggttgtttggaggtccccgccccgcggggaagggctccggatccgaccctggtaggtggggagcagcggaccagcccaaacgcggagccaatcccgccaaagcccttaattgcacgcatctaagatggccgcccccgcccggtagcggggcggaaacgagcccctctagcttgctagccgagcccacactctttggcgaaggccgccgaacttccggcagtaaattccgtggtttcccgccgccgcccgcgcatgcgtaacgaaactgccccacgagtcgggaaaagtggcgcttgcgcattagccgcaggggtgtgtcctagtggccacttggaaaggggtgggcagctggcaaaggggctagttagcgcctgcgtagtactaagctcaaggcagcgttttgagttgaagggtctggcgcgtctggaaagcgcctgcgtattcctttcactgggggtggtgtcaaagcgggaaggtgggcgtggcttcagggaacgcctgcgcgttgctcctccgaaggggtggggcgatccctgaactggagttagtgggcgtggcctcagaggcgcctgcgcggaggcggttggagggaggcccgattcccctttgttcgggttcgccattttgctaggcagcggcagtggcggcggcagcggcggctggagcctctgattgggtttcggagtccggtactggagccaatcagcgcgggcagcgaaccgggggagcgaggcacggtgagtgtgaggagccaatatccagcggcccagagccggccccagcgccccgattggcgggtctcgctgaccactcaggagaggcccaggcgcccgtcgagcccggggagtcgagctgagcctagccgagccgggcggccagcggccccggcccggggcctgcgagcgcctcggggcactcccggccgaggcctgcaggggccgccccgcgcggggatggcgcctcggggagcaggcacctcggggctccgaccctcgcagggtgccagggccagttgggaatgcgtccctgttccccgactcaggcccaggttctcaggccccaggcctggggccacgaatggccctacactaggggacacatgcgcgccctgggcctcggcgatttcctcctggtcgttctggccgcaaacttaaacctgcccttgcactctccactctccggcccttgggacaggaagcctccccggggcccgcgccccccgctccccgctcccagcgagccgggtctgtcttatctgcagcccctctaggtcgggagggaggcctggggagggtgcgcgccgcggccgcggggtcccgtgtgcggctggcaacggggctggcccgcccacgcctcggagccctatgggcccgcccccgctgtctccctggtggggagagggggccgttagttcgcccactccccctgctccgccgcgcccctcctcccagcccgctccgcccgggtctccggcccggcgccgttaccaccccttttggctcgtcatttcctctcttccccgccccgttcgcagtggcaggaccgcacacctccgtcttggagcccaaccaagcggtctccgtttcttgtccgggctgtaagaccagtccattcggtgcctggaacctcactcttagaagattgatacccttgcgyattctttccrgaggctgcacaacttgctgttcatattactaatcttatccactgctcattttgtgaaatctccctcccttgggaatrtagtacagttttgggggttttttttccctttgtttttgccttcgcctttctatgttactttgtgtcaggcttgacccagtccactcatctcttggtttatgtttttctgatacactttcaagtcctgtgttaacgttttctcagcagatgtttagaaactaacagtgttgtggggttttccttagggtgagaggttgctgttggcaaccaattatccagcagttagtatatgccaggtataatccgtgtgttagggagggagtacgtagaggtcaataagaactgtgcctacctgatggaaattgacaggtgaacaggtagttaatacctaacggttagtgctataaaggggccaagttcagttgctgtgaagtatccatgcgtgagctagcctccgtgaaaggcttatcaccaccgcacttttgactggccttgaagaatgatggtaattcttccacaggaaagatggaagagcttgctcgaagagaagaaaagcatgtgcagaggaatcaaattacactgttggaggcaggaagatgggatagggaagtgggcagtagttgtgatagtttaggggggaaagcccagttggtaaaatacttgtatatcttgctaaggaatattttggaaacagttattattttgtatggaggttcaagtagaagggatctagagctatattttttcctaagattgaaaaaacgagtttctgacttgtttatgggttctgccccgtgatagtggctgagttctttggggakgaagaggagacttgtcctaggactctgaaaattatttttactcatgtgaatcatctagtgcattccctggcacataaaggtcttaagtatctggtgcccatttctaaattcacatttaatgttatacaactaataggtttcagaaaactcgtattccagtgctctttcattactaaaacttcggggacaggttttattttcactttttagggtgagtttttcattgttgcttaagtgattttcttaattcatttgattgtcacgttatccgcattagcagatgagatgatagagcttaagtagtctaaaaaacatgtatatttgcctttggaacgtttttttgtttgtttttggatacagggctttcctctgtcatccaggctggagtacagtggcgcaatcrtagctcactaacctggaactcctgggctcaagccatcctcccttcttgttctcccaaaacgttgggattacaggcatgagccactgcgtcctgacctgaaatagatgttttaaccttagtatttaaaaataggtatgttctggtcacttcaaaatcactaaatacttttgcttggcatctttctaaaaggcattataatctggtaacttttttgctaaatrccttacaagcttccaccagtctgcagaagaatttctttgtctgacattttgagagaaagtagtgtggccccaagctttttttcctgtttagtccactgttcacatgctgaaatatttctgttcttgtttttatgctctcttgatttgtagtacttcaccttcctccacatcatcacatagctaaatctttctcacacttaagaccagttcatcctgcaggcctctgatagcaaagaaaaaaaaagttcaagtagtaccttttttttttttaagccttgttgatttatccccagctggaacaaatctctgtcctccaaattcccatatcactttatctcttaggattccagtataggtttttagtccattactaaacttaaagactctttgaagtttgaatcttcgtcagagatttctttttatttttaaaaccttcagaacagtgtctggcacatggtacataattagtggagagaagtgcattagaaagctccaatccagaaatctgtakgatgatggggaagctggacagccctttgttgtagtctagtctttcatcaagcgtctatcaggacccacttgttgagttgtgaaagaaattgagtgagccaatgctgggaatttttaaataatagaatagaaaatatctgccaggcatgatgatggctcacgactgtaatcccagcactttgggaagccgaagtgggagaatcctttgagctcaggagtttgagaccagcctgggtagcatagggagaccccctctcttaaaagaaaaaaaagaatagaaaataccaaagtgcatcttgtgttgtataaaggtaaatgctgtttcatgaaactttcatttcagttacatgctttatacatgtgtgcactgagttgtgataatgaaatgtgtttcttactaagggttgtggtcaaaaaagttaaaaagctactgttctaggctttgcctggtagtgattatcaactgtgataatcctatggcttttcatatgcttacactagttgagtttctgaagaggttttagctttggagtttgtgtaggtccacatagaatgggttcctagtaagtggttggctaagtctcagcttttgcaccttggaatagtggggcaaagagaattgcactgagaagagaatgcactaggaagagaattttcatgctagccagaataaacacttattatttgtttctctctctttgaggaaaaaccattcaaaactttgtgttaagagcaagagctagacagactaaatctggcttagtttgtcataatcttgggcaaagaggcactttgggaaagactatcgaattgtattgcagtcttgctaactgaagctcacagtagtaggaacatatgactttactgaagccagttgcttatagcattaaccattaacagtatcaatatcatgatacaggctaaatcactctgtcattaatgtgagagagaattgctgctagatttgaagctgctcttcaaatcttgatactcttcaaagtataaatttaaatattgctaaattggttcatttgtattaccagaataaactagttaagaagaaaatctgtacgttacatatattagtcattatgtgcttcaagttatatttagtcttgtaaagatgtaaacttctggatattagtcaaggaaaaaatctcatataagaaggaaatttggagttggggaggcgttgaaacctaaaagacattcctttcatgatccttatttttttaaatcaatttattgagagatactttagaaacaaagtataataattttaaatgtgtattttgatgagttttgacaaatttgtacacctgtgcaactgctaccacaatgaagatataaaacattttcatcaccctacaatgttcctaaggctccatgccagtcaacctccctctttcctgtctccctgtattctccactcccaaggaaccactgatccattttctgtctctagattactgatgtcttttggagattttatataaatggaatcatatatattcgtttacatcataaccttaattttattagtttayagccataaatgtattgtgtattagagacaagatagaatttagggaagcctgttagtgcccctaacagactcacagtctggctgaaaacctgattttctattctatacccagaatctctgaggagcagacttagtcaaccaattccaaagagactggtgtaaaaatcagaaaaccggtttgtcatgttgctgattatatttgctccctgttggccaatctatatgtaaatccaaattatagctagaaatttacctagcgagcattccattagatcaagggcagtgctttggagaaccatatggccacaagtcctcttgctgtgatgacatagcctgttatttatggctcatagattcttatgttgtatccattttggttatgagtaatggggttgattaatttttattttgattaaattttgttatatttttcctaacattccaacattcatttgggaaataagaatttctcaaaattcttattctagaaataagaattttcaagtgtgcagtgaaatcaaaggaatttgaaaataaacacctgtatacctgccagttagggtctattaacatcttactataattgccttaccagatatttctccacccattcatccattttttgatgcatttcaaagtaaattttagatatcaatacacttctttctaagtacttggacatatagttgcacatattttggtttcttctttcacactgtattgagacaccttgcaaatgattaattccaccagcatgtgtggatttatggagagtggtactgtactttgccacgataatgagcagctcagttaggtcacgtcattttattattcagatgttggaatttatgagggcctagtgaaaaatcagagagaaagacctatctacatttttgtttatatatctrtcctccctcccatatttccaagatgaattgccgattgctaacttatatcattttaattttttaatgaagtctttattaaaggttctcagatatcattcagtttatctaattgtatccttatttttaaaagtggatcttcaactcttaaagtctatgagaagggtaaattttgcctaccatatgtagtggacctgagtaacatgtttggtgggaagcaattacgtgttmcaacttaaagaagctttattctctaaagtatatgtgcaaacctgaaaatcagtgttaggtatgccttgtatcaaagtgatgtagcttaacgagtatctcttaggtgcaagtattgctctgacagtattgaaaggtaaggttgccagtatactgaaagcattttagaaacgtgaaaatagcattatgttgttatgattgtgccatgtaatcccagttaaaaatgatactgaatataagcatttcctattctcctatcctgttttcttgcaaataaagtacagtgataaattatccaggttaattgtctggtaaggcctttattgacaatctcactttagtttctttccccacctttctaacaggagtgtacctcacagccttctaggatctccagagyggacaggaatctcacttggagggaccatggagcagtatacagcaaacagcaatagttcgacagagcarattgttgtccaggcaggacagattcagcagcaggtatggaagcaaaactgctttaaacattacagcaatgaaactgataacagcaccactcaattggttggtctattgccctggggaattatttgaaagataccagatcttgtgagatattgggtctgatggcttgtgctgaaatgccatgtctagcccatgaccacttagaatctactcttcatgggtgcctggttatagtaaattgcctcttttatctcattttaagtaaaaacatctagtctggttttcagatggaaatttggactttaaaatttttctggattctatttggtctttttctcttcttgtttgagctaacttgtgatttagtaagtctttggccacaacagacaaaccaacatagcttccaataaatcttctgttttttgatttggtctgccacattttttattcagaaaagctctggtttaacattaggataatatttagacagccattcttatggataagacatactagaaaggaattccctgctgctggtttattcctaattaatagattgctttcttgaatttatacacaggttacattttctgatgctttatgcttgggtttattatagtaaaatttcacttttttccccaccccagaagaaaaaaatgtattatgtttctatttgaccttaggccaagattgatattttggaaatactttgttttcaaaatggaatttagctaatatakaaaagtagtagggaagggaaaggtagtattgatgatgagtttttcccgtctaatgatcaaagacgaactcccctgatagctttcccttccatacagctgctgtggctctggcagtttccttcaactgcctttttagaggaagggattccacaaagggccctccattcacaccagtgccctggagggtgggtttttattctttcagaatttgccattagtggatgtaaaaataaggttgaatcattgaaaacatggctcttaaagcagtccagttgggtagaaataatcttagttttgaagctgggcatggtgctgcatgcctgtaatcccagctactctggaggctgagacaggaaggttggcttaagcccaggaattcaagaccagcctgggcaaaacagcaagaccccatctcaaaataagtacataaataaagtttaaaaaaaaaagaatcttagttttgggacatgagagcattgacgtcatgaagatgatttcggttcatagtgattaattactcctcctttcttggtgattgcatttaagcccagaattttttatggtagtttcagggctattaaaacctaatcatttttttcttgtgaactcatctgaggagataaaaagggcattaaacaattgtgtaagtagaagtgtcagattcctgtttctggagggaaagattgcattacaaatctttgtgttaatgatgacaactgttttgagtttttgagtcaaatttttgaggtccactctggagacaaagggctaatatctttaatcctactaccttcaacaaaacagcttcaatatagggagtctgtacattttgaaagtccttcaggcttccgtctctctcctccaagaggtaaggtgatctgtgtcttgaactacacatttccttcctgacatatttcaagctcttcctgttcctgttctcagcagcagggtggtgtcactgctgtgcagttgcagactgaggcccaggtggcatcygcctcaggccagcaagtccagaccctccaggtagtggtaccctctctgattctctgtgagcactgcatgaacttctcctctcctcatgtctggtgctgtttgtgttaggatctccagtaggaatggcaaagtcagttgcatgtctttgatgctgctaacttgtctttgaggcttataagatgccagtttcctaatatttcatgccaagtcatatagagaccccgtatcaactttctgagaattggatttgactagcatgtttctttgagaatgcctggaaaagaaatggtataagtgacaggaagaaattcttataagtgacattagaatttattcagggctcggccgggcgcrgtggctcacgcctgtaatcccagcactttgggaggccgaggcaggcggatcacgaggtcaggagatcgagaccatcctggcaaacatggtgaaaccctgtctctactaaaaatacaaaaaaattagccgggcatggtggcgggcacctgtagtcccagctacttgggaggctggagcaggagaatggcgtgaacccaggaggcagagcttgcagtgagcagagattgcgccactgcactccagcctgggtgacagagcgagactccgtctcaaaaaaaaaaaaaagaatttattcagggctcacactctgatccaattaattgcatggtaaaaattttgtgtatttgtgttacaatggagaaggaaatatatacatatacagacacacataaactaggctaggctgtgctttatttttattcaaggggcaactcaactgaaaaataatcattgcacttggcaaggtttatctaagcactgaatcttgttaatctcttgttaactgctattgtttccactacctttcctgggggaatagtgacctgtcttattactagatctgcaaagattaccccagatacctcttggttaggcagaagcaggatgtgctttctgtaagtcttaggtgttaaagccactgtgataattcttggttaatcaatacagttctttagcatcgtgtatggctaagtatcctaaattgggttctaatttggccagttcctataaaacacaggagtagcagcactagtctactctgtgtatgtaggttacttttattaaaataactctatttttgagaaattggcaagatttgggtaccctactttttccctccattgaattagaaatgattcaaagtagaatctagaatgtagaactggcatctcactttattgctagtgctgctaagcatccagcagataactacctcttaytgtcatcactttatcctttcaatcccacccctacccctgccaccaatagtgtttggtaatgatgtacagccaactttgaacataaattaagccgaaagaaactgagcttgtaggcattccaaaattgtgttcaaatctcacagtccaacagcttgttaatgtttttcatgcttgcttcatcttactcatatataaaacagtattttggattgtcattaaccccttgtggaataggaatgtaacatgctcttaactgtatggcttcttgtttgatgcatgtgtctttgtaacatttttctgttgtaaatacagtgagctctttggagtctcaaatcatttatcatgtgcacgaatagcacatcaattggggaggaaattaagatgatgaatagatagaaaattattaatagctgtatcttaaaacttgtgtttcctacttacatagattttatttaaaagaagtggaaacactttatggaaataatagaaacctttcctctagggatctgattattttgggagaattttaaatagttattttggttattcttgctatatgtattctgagaaatctttcttgatacagaatatgcaagcatttggtgtagcaaaggggatttgatttggaatggggaaataagggaaagagatagcatgagagagtcaggctgtaaagtccttaaaaaagtaaagtaaaggttctcaatggacagtttaacaaaacttaggatttcaatgttcctggtgattctaatacattagtggtggtggcagtggcggcggtggtggtggtgattgtaggaggaccttactatctaacctactcatctaggacagaatgatctgttaactaattgctgttacttgcacatactttcattaagtgtgaatatttcagtcatgaatattctgttctaagtaatttctgtcaaagatagagtctgaaaatgaaaattttggactattccatggatcattacagtttacttctaaagcacttttaaagtgcttccagaaagcattctattaggtatttttgtattgggacttaagatgtgacagagcacttgtagtgacctggctcctacagtagtctgtttactcataggagcttgaaatttgtacacttgactgctctgtgtaatttcaatatttgttgttgcttctgataaagctaaaataaccatgtggatattatagaggccagtgaggaattccaccatggagactgcaaactgaccagaaagtgcttttaagaaatctttagtagtgagtttaaacaacaaacatatctagaattcacagagtaaaatgagcaggataaaggtatacatttgacatttcattttagcttgagagactgtagggaaaaaagggtcatcctctacataagcttccagagctgcttgctacccagcctcctagagtcattgctgggtacagtttgatttaccttcttcactttatttagaatttgtactcaaccaccatcaccaccatcacctttccctctcattgccttctctccagccttcactacagaccattcctggattggtttaaacaggcaactaaccttgccattatgattaaatgtttgtcatggatttagcccgtgtttggtgacaaatgccttatatctattgagacttctcaaagactctggatattctccattatgtctgaccttaaagtattgagcttggcatttagtaacaggattcatagatatttaaagataacttgaggacttgagacatatattttcttagtcttttctaccttttccttttctagcaaggcagcagaatagttccagtgattgtcttttggtaaaaaccattttgtgtcttatgttatttcattgttcttattttatttcattctaggtccaagggcagccattaatggtgcaggtcagtggaggccagctaatcacatcaactggccaacccatcatggtccaggctgtccctggtggacaaggtcaaaccatcatgcaagtacctgtttctggaacacagggtttgcagcaagtgagtaatatttaaaaatattgagcagtatatcagaggagaggtttcaaagaatagattattacaacctgtttgataattgatattgcatttaactgcttcctaacccacattttgcattcagttgattttctgcctttatagtaccagtgatataaactagaactatgcagaaattggacagctccagtaatgactaagatattaggcatgatcttgaattgctgtaaagtatatgaagaggttagaatctagtttatagtatattttattttaaaagaaacaaaaatgagtatttagaaagttagaaaaataacaaaacgagcaaaaagtgggtccaaattaattaagtagaaaactgacgtatagaaaggataaataaaatctagattgtttaagcagaccaataaaacaggtaaatccagttgaaacactgattgagaaacagaaaacaaaagtaagcaaagatgtagaagagattaaaggaaggccaggcgcagtggctcatgcctgtgatcccagcacttggggaggccaaggcaggtggatcacttgaggccaggagttcaagaccagcctggccaacatgrcaaaaccccatctctactaaaaataaaaaattagccgggcgtggtggcacgcacctgtaatcccagctacttggggggttgaggcataagatatcttgaacccaggaggcggaggttgcagtaagccaagattgtgccactgcactccaggctgggcaccagagcaagattctgtctcaaaaaaaaagaagagattaacagaaatatgtagaaatgttacatacaactctgtggcatcatattttaaaattagatatttctcatcgagatggcaaaaaaaaacaaaaagtcattatatccactgttaggatggatgtggagaaaaagaattaatcattatttttggtaatttaaaactgtagagttattttggaaaggcacctcactatctgttaaatacaatgaatatttgagctagcagtcccacttctgagaatctgtcctataggaagaaaagcatcaatagtagggggaaattacaaagacacttttcatagcattgtactagcaaaaaataaaattgcaatctgagtgtccattaataagaataaggaaatggttggaataaatcataatatattcatagggaatattgcatcatcattaaaagaaatgaactgttgacttggggtgggttaatattgaaatatttttagtggaaataatttgcagagaaatagtgtgtgatctcatctttgtaattcataaccaaccccccatgagtatatgtttatagtcatggaaaagagagtatgagataactattagttactctatctaaatgtttatattgtttcaacagttacagcagtcatattaatgtcttagttttctggaggaatttaagttgaaaaaagcagccatgatcccactgctcataaatcaaacttgtactttttgtgtattcttttgtgtttttatgcataatttttgggcataattgtaccatgcatgtggggttgtgttttcattttttttttttaattctttcataatgttcagtcaacttgatgaatcagaatttctaatttataaaatatagttaaggattttggttttcatttgcctttgtaggtaaacatttgggcacgatagttttatttttcaactgaattctcaggataatttctttggattggggattgcttgggtaaagggtaagagtatatttgagcccactggcatatttttgccaagatagaattgtacttgggattaaaaatagttttcacatttctctttgcataaatatatgaggctttaaatatcttttcagcatgtgctttccttgattccctattgctatatcctttctgttcttctctctttgcttcctctccagtcccccttgctgcgccttctccactgttgagtagagacaatgtggtatagttaggaacagtatactgtgagtgtagtggtccaagctttcattaccaggtctgccattaaataagcattctgatcttggccaagttatttaattgtcggtttgctcatccaaaaataaaatttatatgagatgatatctagggttcattctagctctaaattctgtgatttttatggggttttattttgctataaggaaccttcaaatagttatttccctgcttccaagtagggctataactaaccaagctgaaaaaaatatattctgttacgtaaataaagctctctaggtgagattccatagcctcccttacaatacttaaggctttaatcccctttgtataggagttttttttctcattagtgttgagtagccattttttaaagaagactacttcttaaccttttttgaattgtattctctattttagaatcctagtaaagcttgcaccctctaagaaaaagtagagatgtccagtctcatgaaaaattctgcatataattttagattaaaatccttggcctgagaaagatactggaaccagagagacagccaagaaatagatagaagaatattggaagttggcatataataaaagtggtataaacatatcaatgaagaaatggctgaagaatgatacagaaaagaaactgatttctaattcatactgtattttaaaaaatatttgctaggtggattaaagatctaaatgtagaaaagtaaacttggaaaattcaaaagaaaatataagaatttttatgctatagagaaggatatttttaaaaacaaattgactaaaacataatatgcattgaaatacatcaaataaaagtaaacaaggtgaaaacttggaaaagatatttttaatacatacaaccgagtttgtattcagaatatgtataaataacgtttatgtatttatacaaaaataggaaaatgggcgaagaatatgaatagatggaagaggaaatcctaacagccaatataaacttagaaatgaagttggttcacataaccagataaatttgtttacttatttatttgccaatactttctgaatgccaattatgagctgagtatttggaaaaaataattcagaagacctaggcaatctatcccctaacaaagtaggatccatgaatgtctctaagacatggaacccattgacctgtttttttcaccttccttccatcagtagtcctttttcctatcagctggtagactttgtgataacttaaggttctaggcatgttcttctttccagaccaaggtggtcccaagttgaaattatggatggaaagtgacctggctataaaaatctatctttctgaaagtatcctccttccagactgccatctatgttgaagcaatgctcaaataaaaaaagtttgttgatggaattaatggtcaaagaagcaaagagaaggttacttagtactagccatgtattctggcttttaagtttgggaggtattcttgaatataaaatacaagacattttgagctatggggctctcctcactgctttctcttttgcacttaaaaaaaaaagtgttcactagttatatgaaaataggattttgtacacccaacatttaaagggttgtattgcagttttttagttccaaaatttagagaaatatttttcaagcttcttgtcaggtttctgataacactcctaataaagtggctatagccattaaaaaaaagaaagaagatagatttggatagcacacgatcccttgctttccataattgctttataaggtttagctatccaatcctaggaccaaataggagatacaaattaaatcaacaaaaatttgacaaacattaatgacagtagtgagtattggtaattggaaactaataggaggaatataatctgtcacattgccttaattatctattaccatataacaaattatcctagaagttagcagcttaaaacaacaaacatttggccggtgcggtggcccacacctgtaatcccagcactttgggtggccgaggcgggtggatcacaaggtcaggagatcgagaccatcctggttaacacagtgaaaccccgtctctactaaaaagacaaaaaaaaaattaagccaggcgtgatggcggacgcctgtagtcccagctactcgggaggctgaggcaggagaatggcatgaacccaggaggcggagcttgcagtgagccaagatcacaccactgcactccagcctgagccacagagcgacactccgtctccaaaaaaaaaaaaaaaaaaaaaatttattttatagtttctgtgagttaggaatcctgacacagctgtgttggattctttcaaggtcctctcaaggcccttatcaaggtgttgtcctgggctgcagtcacatttgactagagtagaatacattttgggttttttctttgtttgtttttttgagacagttactcgctctgttgcctaggctggaatgcagtggtgcggatcttggctcactgcaacctctgcctcccaggctcaaatgatcctcccacctcagttccccaagtagctgggaccacaggcatgtcctaccatgcctggataatttttgtatttttcmgtagatacagggttttgccatgttgcccaggctggtctcgaactcctgacctaatctgctcgcctcagcctcctgaagtgctgggattatgggcataagccattgtacccggctttcagcatttttaatatatatagtatttcctctgtaaaaaagtacttcatcattcaccaaaatggcaagattaaaaaataataataaagcactttagagtgtattttatttttttatttttttgagacggaatctcgctctgtcgcccaggctggagtgcagtggcgtgatctcggctcactgcaacctccgcctccggttcaagtgattttccggcctcagtctcccaagtagctgggattacaggcatgcaccaccatgcccggctaatctttgtatttttagtagagacagggtttcatcatgttggccaggctggtctcgaactcctgacctcaagtgatccacccacctcggccttccaaagtgcaaggattacaggcgtgagccaccacacccagcccagagtgtattttaaatatgcatgcttttcaatatatataatcataccactgctatctttcataaaaaccgacattgatttgttaatatcaggtatccagacagtgtcgaaattccctatttgtttcataaatggaaaataagttgtgtctacttcataatggagggcagagcaggacttcttttttcctcttcagaacattttctgctttctagagaaatgtggataactctcggggaccaaaggagaccagtgtcagtagagtacaatcstttttttatgttcttttctgcagatacagttggtcccacctggacagatccagatccagggtggacaggctgtgcaggtgcagggccagcagggccagacccagcagatcatcatccagcagccccagacggctgtcactgctggccagactcaggtaattccactagctctgtcacacaggagcaaaactgatttggaagagtcagataactgagtcagatatttcatgtatagcatgtatagtagaaaaggggatgaaaaccataaaaaaatatatttttggccgggcgcggtggctcatgcctgtaatcccagcactttgagaggccgaggcaagctgatcacaaggtcaagagatcaagaacatcctggccaacatggtgaagccccgtcaaaatacaaaaattaggtgggcatggtggcgcatgcctgtaatcccagctactcgggaggctgaggcagagaatcgcttgaacccaggaggcggaggttgcagtgagctgagattgcgccactgcactgcactccagcctggcgacagagtgagactctgtctcaaaaaaataatttttttttttaaggactacatcgttctttgttagtatctttgggatctgttgaattgtgtcattacttatttcctccagacacagcagcagattgctgtccagggacagcaagtggcacagactgctgaagggcagaccatcgtctatcaaccagttaatgcagatggcaccattctccagcaaggtaagtgtacccataagcttccctaggactttttggggcaacttttttgtcccttagacaactgacatctttagaatttgagtggtgaacttgacactacatattttttggacaaaaaaaaaaaagatttcctctagctctccattgattgttggtttcttgtcaccatctgtgaccaacagtgattccatgtgtagcagtttctatagtggttgctaatctagggattgtgtaagcttttagggaagaagtgtttctaaacagaagawtagaaatagggagttcattggtaaagagagaaatagatcaaaaatcaagttggctttagagtgctattgctgcttatgtttttttctgggtcattccattactttaaatgactattatgtatacagcacttttactaagaagggtcctcaaagagcctctagtctagtaagaaagacgtgaacaaataaatacaatgcagggccctcatggaagtatgttctaggaatagataacataaataatagatgtttggtctgggaggaggagtgcagaaactgaacttgaaggcttttggaagcacctgttagtcaaatagttaaatcaaaaaaggacatctttgttagattccatgactttgtgattgcaaatttgcaatatacaggatccagagagtgcactaactgtgtgctcttgtattactccagggaggccctgaactggattgagcccaggcaagagctcaaacagaatggtgaacaaatcctcaagtgctgctattgatagtctggggacttggaatgcttggtttaattttaagttttaatactacaactgactcattgtcagtttgagataaacaaagtataagttttaaaatctctgtcctgaagcagattgctcattatgtacaagagcagtaggtatagctgtagtcagactgacctgtagaagaggaggcctccaaaccttttcaccttttgaaaactgctaaggatagagttactcaaaactgggacctagacagttaatagaatttcaaagattgtgattacttagattatatatagcacaccacagtgggagagtactttttctccccttgtgtttttcagtgtgttttgccaggatcggtgagtgtataccagatagaagagggactaactatgttcccttctttctgttctgtgtgcctgttttttgtttgttttatgttttgttttcttaaagttacagtccctgtttcaggcatgatcactatcccagcagccagtttggcaggagcacagattgttcaaacaggagccaataccaacacaaccagcagtgggcaagggactgtcactgtgacactaccagtggcaggcaatgtggtcaattcaggagggatggtcatggtaagaaaatgtatttttcagcttkgtytttgaaattttcttgaacatgcaacttgatgcctcctaaaatttattatgttgacctcttgggattgagatcgatccttaaggcactgtcggtaatctactttgacaataacattatgacaaaccataattcattctgagcacctactrtgtgccagggactattcaccagggactattctagatgctggagataaagcaatggataaatagtgattttatggaattcttttcagaattcaaataacgaagggaattatatactaatctttgagaagtggaaagtagtattgcccatgatggacaaaataagaaataagctaaaaattagaaagattgtaattgatagagaaaccaaaaaaaaagtgtcatgtaaatgtattgggaagataggaagatttgggtggtgtaactgaaagctaaatcctcatatgtcaaaataggatgttaaaatgcataaattaagaatgagtaacagaagtctgcacagaggtggaggaagctatgaaaagaaacagaaccaaccctggctcagtggcatgcacctgtagtcctagctacttgggaggctaatccaggaggatggcttaagtccaggagtttgagctcagcctgggcaatgtagagagacctcgtttctacgaattgaatgaaaaataaataatttttataaaagattcaatacagttattcaaagcggttgtatttgggaaagagctgtggggtacaggactctgttacttgtttttacctacatttagtacagtgttttggtgttttttaagaaaaattaggattgaattataagttaactattatttttataaatataggcatttagtagcacttggtctatctatttttgtgctgtttttttgtcttatgactactgttcctgaccattagatggcagcagaaatatctagagccatgggtggacatgaattagggcatggttatatagtttctcagagtggcacctgaatctcctatgacacagtcatctggggtgtttgtttaaagtgcagatctttagtataaatttctccagggatccgcatttacccaagtaccctataaaaattactttttgtggcatttacaaaaaaaatggatgaagaggaaccaagaaactgtttctatgtccatacttcatgccaccaataagctctggtttcctgttcacacagatggttcctggggctggctctgtgcctgctatccaaagaatccctctacctggagcagagatgcttgaagaagagcctctctacgtgaatgccaaacaataccaccgtattcttaagaggaggcaagcccgagctaaactagaggcagaagggaaaattccaaaggagagaagggtatgtataacattgggaaggatataggaaaggagaatagcagggttctacttttgaaattatcttttatatggcttgttttctcacgtaccttccaaacaattgacgttagatacttgttgtctcttttgtaagagttagcatttgttattactaatatgcagctgcagttataataacgaaaacaaacagtggcttaaataagatgttattccttttcatacataaaagtagtccagagataaattatcctggactggtagcacattttcacagttctcaagacctgtttcactgctttaatattgctagtgtgctgttcatggtccaagattcctgcttaggctccagcctaggaagaaagggaacaagaaaggtaccctttcttttttttttttttcctgagactcagtcttgctctgtcatccaggccggagtgcagtggcacaatctcagctcactgcaacctgcaccttccatgttcaagtgattctcctgcctcagcctcctgagtagctgggattacaggtgtgcgccaccacgcccagcttatttttgtgtttttagtagagacggggtttcaccatgttggccaggctggtctcgaactcctgacctcaggtgatccacctgcctgggcctcccaaagtgccgggattataggcgtgagccaccatacccggccaggtaccctttctttcaaggaaactttgaagaagttgtgtaccttccactagccggaatttagttacctgatcacacctaacatgcagataaggctaggaaagtccagcctggtgtggtggcaaatgcctgtagtcctacttggaaggcagaggcaggaggatcacatgagccgaggaattcaaggctgcagtgattcatgatcatgccactgcagtccaacagcaagggtgtcagagtgaaaccctgtttctagaaaataataataataaactttaatgctaggaaagtctttttactgaacactcatttgctcaaacgaaatttggcctgttattaaagcagaggaaagtgtatatattgtgaagtgtaggtggtagtctgttattttttttaaaaaaaattcatactataagcattcacagtcttacagtagttatatatggttagctatattacttactaggtgttttctccaaagcttccatcgtcattctaagtcataattgtcccttgtgactttgatcccagctgtcttaaactttggagaatggaatttgtgcactagataactgtgctggttctggatagtattaatagttaaatggttttatttctcgttttagaaatacctgcatgagtctcggcaccgtcatgccatggcacggaagcgtggtgaaggtggacgatttttctctccaaaggaaaaggatagtccccatatgcaggtaggaagacatatacattttattcttctctttattaccttgtattgacttgagttgaagccttcagcagtgtcctcttgctattttcctactctgggactactcacattctctaaactggatgcaatcttatgtctctttagattatcttttatcttaaaaccactaggccagacttggtggctcatgcctgtaatcccaacactttgggaggctgaggtgggaagcccaggatttcaagaccagcctgggcaacatggcaaaactccatctctacaaaaaaatacaaaaactagccaggcctggtgatgcatgcctgtagtcccagctacttggagggttgagatgctcttcgtctttgtcacttattactattcattctttcttgaaaatcacacttttcttaattttcaaggaacaagttttatttttattgaacaggttttattaccscatcacaaatataatttgaatgtttacttttttcccttctaactgatgtgagcctggtctaatcctctcttctttggcttagatttataaaatagctgcttaatttggtttcccttcttccacttttgttcccctctagcctactctccacatcctagtgtgatctttttaaaatgtttatcctatcaagtccctgttctgctcaagctccttcaacccctaccctttcccatttgcacttagactgacatccaaagtgcttactactatgcccagcaaagccttacatgctccagctcctgtctacctctaactgcatttctacttcttggtctctatgctgctgtttactgttcattggtctacttcctgccaygggtctttgtccttagaattttcagtctgtatgccctttatctttttcatgcatgtctatctccctatctgttaggtctgggtttaattaaataccctatctagaatagatctcttctctctcagtatgttcttacaacatcttttctttttttggaggcagtggtgtgattatggctcactttagtcttgacctcccagctcaagtgatcctcccactttaggctcccgagtagctgggactatagccacgcaccaccatgcccagctaatttttaaattttttgtagaaatggagtctcactttgttgcccaggcaggtctcaaactcctaggctcaagcgatcctctcgccttggcctcccaaagtgctaggattacaggcgcacaccattgcacttggcccttttctttacagtgtaataatatttaagttgttgaatttttcaagattgtttccttcactagactgtaagttgtatagagggtagaggattgtttcgttctctgttatatttattggacttaattctatttaagtaagttgtatttaagtactgacttagatgtatttgttgggtttagtatccagttctgaaccaagcaatcagtgtttcttgaattaatagattcctcccatttgctgatactccattctatattaacatcacattccacttgcactattgcaatatccatcaaattaatctccagtctcctctaattggccttatatagtacttatacagtacatggttaaagtgttttttttaacctgccagtccccaggtcaaggatgcatgctattaatagttctcatttcttaactgcatcaaatctcaaactatttctgtataacatctaagcaactttgccttatcaccccctcaacaatcaaactaggtttcctcagtgtccccacacatgaacactaacaactctttcagtgctattaatcctcacctgtagtgtgagagcccctcctttctcattgctattcattcataacggtgtatgaatgtgggcctgacagctattgtggcaggagggcattgtgccaggaactctcctcattctgtgtgctaacaatatgatcttggtcaattcagcctcttttatttttatctgtaaagtggaatactgttgatacttcacagcaatgttgtagggatttcattcagtaatccacattaggcatctgtgtagcaccatacctagtgcatggtgagttcagtaaatgctagttgtttttgctcattgttcaagacccagttccagtcttccatctccagaaggctttcagctttttctcagatcctgcctaccaaggcttcagagccttggtatgggggaactaaaggtggttcttgcggagtgttgcaaaaagcttccaaggatttatccttgtgttaacacggtaggtcttaagtgagaaacagcatatagagtttagtggaaagaagatgaaatgggagtcaggagatttgggagttagcccttgctggactcctaactttctgaccctgaccctagtccacgcaaatcactttacccatctggccttcagatttatctgtaaaacgagtacattaaagtgtatagattctaatgattctttctagccctgctaagtactcagtatttaaatgatgatcaaaaaacagtgacaaaaatacagcatgacatggtttctctgggtcttttccttagacacctgaatctgaatactcttaacccttaagtatagagaacaacacaaggttcttaggaaagagatacactaacagccctgcagtgtttcaccatggagtgcaggccagactttaaattattttaagaataaggtttattgtctcttctttcctaatggggctacactttaagccatgtatgcagacttaagatgtattacaagcctttgatttacttggtaaagttatgtgtattctcttggggggataagtagtgagagccatgagttcctgttgcttttgcaaaggactttaatcatcatgtcatctttgtctctaggatccaaaccaagccgatgaagaagcaatgacacagatcatccgagtgtcctaaccccacgccatgtgatggagctgatcaaggtcatgtttctcactgttccaggaaattgatcaactcttccaatgggacattgatgatcacattctgccctttactacaggacagaaaccacttagtttttaataagtggcycagtattacaattgcagcgatgcctggcaaattgaagttgcaagcctttgtcttactctttcagtcaggacctatttcagactgttgatgacattgacatttcatggattcggatgatgcaaggagacacatgccaccccagcagtacacaaagcacttaccttgactggtgaagtcagccagccatctcagcagggaagaacaaccttctcaaccaaaactgcaatcaggaaagcagcagcccactccttcccatggaatctagahagcatttatccctctggtgggggaatctcacactgactaactgaatggacgctttgtattcagagatggcttccaggcaaggaagttctatcttgtgatacggaaacaataaattcctgagatacattcttccaatctgtggtaataataagaattcctctctgcccagatggtaggttgatatttctggactctagccaagaaaaagctaattctggggatagaatgataaaagactcaagcactaaaaatatacattgccgaatctctttttctagctttgaaaagttgtggcctgcttgtccctctgttgactggtcatctggaccatcgtacttgctgtggctacttctaagacaatgtagagggttattaaaccttgaaactgcctttcctaagtagagaacaagactattcaacaacttctttgctgaagcactgaggagatttgtaatactcctaaaggaagggccaaactagagattttcaatcatagactttgtgacagcatttggggaactaaaagattcatgtgtttcagcctagtgggagagagtgggggagaggaagagagagagagagcatgtatacccgtatgttatcatagagcacgattctccagtggatggatacctggaatggatcattaagatgaagagagtaattcacatttactctagaacctttaacaagcactgaaaggaagaagcctgagatttgatccttgacaatttctggaargcactggtcagtcacactgtcctggacagagtccaagttacccactaaagcttgaggtggatgttggcttcactcctgcagcacaatgctggccctagaaagcgagcattttcattcttcccatggcagctgattctttggtgccagttttcatgttttctccataggccttgtgcagaaaggttttctcattgcatccatactgtgagaataaactgcagactgaaagaaacatgcctgcagggtcaggaactgggccactgttcccagaacgggttgtgcctcagaaatctatttctcttttagatgttgaaccctgagagaactaagatgatatttcagaagagttggctgccttctctggaaacaaggaaaacccaataattccgaggaacattgggggttaaataccaagaataaaaattggttcttctttgacttcagcttaactgtattaagacagaaattaagccctctaaaaacaccacaaagagagatgattgtaatgatagaaatagaggtacagagctatgcaaaggaaacaggaagtgaaatattcctagtcccagggatctggtaatcgctcctggcttccagatgtcaaaggactgatcctttggtaagctcactagaaacttctagctctacaagagtttgggatattaatgttattcagtaagtcccaagtttttcagagaatagattactaacaatgaggaatttatattccttggttaatttaggagtctaagatgcagagttcagaaagaaattactcagacctaactttgagtgcttaagctgccaacagttagaagatgctatttatttgtgtctgtaagtttgtacatagtaatgccagccttgttgctgaattttttatttggggggagatgactttgaattttgtttgaaatgcttcagttgtcattttgtcattgcatttcaaatagctcatgacccttttcttgtggtcactttggcacaccatagtagcccacaaagtgggggcagggtattgacatttggattttttctttgatactagttcttttattcatttttatttgtgactgtagtgataactttacagatggagaaagagtgaatggatgaatgaataattggtttaatgcctagttatgcaacttgagtgcttttttttttttttgcaggataattttaagtgtatatattttaactgcactggtacattgaacatgtcagtgtcgatgccactggaccaacagagcattttgtggctatagggtgcctgataataatgtcttgatttttctttgggattcaactatatcgaaggtttttcccccagcagtatgggggcgtacaggtgatcgatcattaatgtcattgcaattgttattttttaaaataaatttataaaaataaccgaaaagtaatgtgacttttgaggaatctgcaactcctgggttctagtttgtgtttccagtgttgaaattttgatctcccccgacaagacttgtctgcatggacggtgtctctgtaaacagtatcaaacttgtaatgtctgagcctcttagctttatctccccttaatttcttcccttttggcccttccaccctgttgaggagattttttctgtcacctgcaggctgatcatacatttgatgctactactgaaagtgtttatcaaaatgtgatgaagtaattccatgaggaaaattagccgttatcacaaaaacagccttaagtattgtagaatttcaggtagtgaagatgtactatttacgttttgttagattttgttttggcagaagaccaaaacaaaagtacttttctgattgttaaaaatccacagcatgctcaccttgttactgttttaccttacggtcgctgggaatctaagcaacaaagactagaagcctccgatatgccattatcaacacacaagagacaaacagcccgaggaagcactcaatgatgagagcagtagacctgccctggcagatgagagaggagaaactctccacaatgaaggaaaagcactgacagtatttgatagctttagtcaaactgtgcttgagtttggcttagatttatgccagtggaacctgtccttaccaaattcagagatgacccaagattctactctgtggtatgagggaaagacctctcgatatttatctcacaccaacggctttatcgtaggagcgtcttcgcctcccccgtttccagtagaaaagacagctttgctcctttgaaagcgcagaccgccgcacctccagccccttctccccggggaagtaggccccgctaagaatgtgggaaggtggtggggcggcgactgaagtcgcttccgattggcgttgtcccaaggaagcctgcgcggattgatcggcggcaggcctccaatagagcctgctaggcggattggctgctacgcggctgggccctgtttccggtacctaggcgggcagccatggtgaccggcgagcggcatgcgacgccgcctctgtggcctgtggaggcccgcttggcggcgctgcttcccgacctactggtctttcggaagcctcggggatgggaacccgagctcgccacggcccagggcgtcctcctaggcgtccatgtgacgggtgagggcgacggccggcacttgcacttaagtctcctggcctgcgggagaggcggccgttgggtctaagcccctggaggcctcgacggttacaggcctagcctcccgcgagctaaggcacagtttaacttcgtgctgcggcttccttaggaaactttgagtatcttcgttttagcgtgggaggacatcttttgggatgaaccggctcagtccttgagctcaccccaaagatgatgaaattgaaactcagaggaaaggatttttacaggaccacgccccgggctttgaacccgtttttcccaaccccgagcattttctattaagcgttctgtttcaattattttattcgttcagttaattcgttcttggcgtcataagtatatgcccgccgttgttctggccgtagctatctagcagccactccgcgagtcgttcatttaacaaatacttactctgtgtcagggatatgaagatgggtaataccaggtgcctgtcctcactgtgtgagtggttctctagccagacatgaggagggatcctattgtttcccatagctaggcagcctaagagagtaggggaaagagctggctccagatgaaaagggcaccatctccagctcttggaagcagagagggtggtcctttggattcccagtggcagcagcaaccaacctggcccttagtagtttctaagttacaccatgttaatggataaaggaattactcagcttgaagggatctgtttcctttacactggcctgatgtgtggggagaaaggggccaaaaagtttaggatttggagttaacatcgtaatttctgctttgttggtcagggtttacagcattaatggacaggttcaccctgacctacaagtcggaacgtgacatggacaaactggcccatatcttcagttattacattagtgacatcgtggagcgtgagtgatcattgtagggtaacaaggtgtggtgctgggctcctgggggtttataaaagaagggggccagaagtactttaaaacaggtaccaaagggtcattcctttagcatcattcatctttggtttcttcaagttgccactgaaaagctagacctttgcctattatctgctaatctacccagtctcacattctattgactcattgttcaaagggggggcaggaggagctaatttcctttgcacatttgtattttatttcaaaataaagtattctcttctaacaataacgtatctcaagtgtgtattcagacaaaatttataaaacatctttttattattatattttgatcctgtgaggaaggaataggtgttttcttattttctgccatgtattaagcttttagatatttgccagatatccagtatctggaaaaaactcatttatgtagtacccatgttttgagtacctaccctgtgacatggactgtaataggtgcaggcagggcaagaacccactcttgaactttttagttaggcctacccaacagaaattactctgaccttataccttttagtacttacgtaacattctcatcctttactgacagtgccctgtatgcttccgtccatcattctgagattcaccagaataattactttgaggcatctccgttaagaatttgattatttgacttacctcttatccttaaggaacacatggaaggtcgtttgctttttcttataggtttggatgaaggggaagataaacattctatatcgtgtatgtactctaataccagcaacttctgggtactagaactacaggggaaagtaagacagagtaccctcgtggagtttccattttagtgggacagacaataaacacaataattgtagcttatatattctatcaaggaaataaacatagtatagtggtaaaaaaaaaacacaaaaaataattttagggtaggggagtatatgagacagggtggtcataggctcctctgaggaggtattatttaagctgacacttgaaggatgaggggaacagcttgtgaagaactaggggtaaagcatttcagacagaataccaagtgcaaaggtcctgagacaggagaaagctcggcatgctctaggagctaaaagaaggccagtgcaggccaaaacgtagctcgcagggtgaagagtggtttgaggcaaggttgggggatggtagctatgagaccaccacgctctgtagtccatagtgaagagttggaattatatatttctgtataaaggaaaactgtggaaaggtctagcaggggagtaatatgatctgattaacactttaaagctgattttggctaccttgtggagattgaatgctggtggaaagtgaatttaagaatagaagctggaagaggcaattgtcctggaaagatgttggagatttggtctagagcagtggttctcaacctcagctgtggttgcctgaggagctttttaattgttttttcttttttctttttttttttttttttttgtaagagactggggtctcagtatgttgccaagtttgtcttgaactctagagcttaaaagattcttctgcctcaacctctcaaatagctaggactgcaggtaccataccaccttgtctaacaaaaaatcttaatgcctaagcttcaccccaggccatttaaatcggactttcttaaggttggcccaggaataagaccttttaaagtttcataggcaattccaatgtgcggtcaagactgaagattgttggtgtagaggtatggcaggggagctgtgtggggtagattaacctgaaatatattttgcaggttcaacagacaggagttgctaatacgttgaatttcagtgggaagtggtgagaaaaaggactcagttttttggctttcataaatgaattgatcgtgtcatttaccaagacaggaaagactgaacattgagaaagaaaatcaagagttctgttttgagtatgttgagtttgagatgccaataagtcattcaagtggagaatgactccattcaagtggagaatccagctatgattgagcctggagctcagagaagagatccctgttagagatgaaaatgtgagttgatggcataaagtgggacttaaagttaagaaccgattgagttcatgttgggagagcataaataaagagaaagagcctttggctgaggcttgaggaactccaggggaggattatgataagggagaaagaacctgaaaaagagactacaaacagccagtgaggtaggatattgtggtgttcctgaagccaaaggagaggtagtgtctctagaagaaagctgcagctagctgggttgaaaatgacagctgtcaagtacagtgaggtcagagaggtattgaatttagcaagattaatgctgttgatgaccttgataatttgaagtggtggaggtagaagtcagagtggagtaagctgagaaaaagaatgacagagaaaacatttaagaggaagagtaaatgggagatgaggaaaatatatatagccaacttttttgagatttgggggttttgtttgttgtgaatgtagcaggaaaaaaaatggagctaataggcagaagataaggtagaaccaagaatatgtgggttatttttgtgtgttttggttttgttttttaagctattgatgagaatatttcagtagagagattaggaacggtgtgaagttcttgagaaggtaaaaggggataagattcctatcacaaatggggtggctttgaagagagcaggaattcttccattttagaaacgatgtatgtaggtgcagatagatttggggagaaaatgaaaagaaggaagaaggagcctgagtcttggagtgagcaaatggacaagaatgatgtcaggataaactcagtaggccattcttttgaccatatatgattctgccctgatctggtttatatctgattttgactcattttcctctctcttccttacttgatttcagatgttctctgttttggaggggatatcctaaatatcacaggtatttttttagtttttctgaatacttaaaagactgagtgaggaggactatatttaggtggaattcagcatattggtttattcagcattgtttgattaataggtactggaccctggggatacaaagatgaggaagacatagtctgtgcctcaaaggatcccccagtctaatggaaaagctttgcccaaattaaactctcacatgctttgcatttttgtttagattgaaggacagcaaaataagtgccaataaagcgttcttgagaaaactaatgagaaatttggt

SEQ ID NO: 98001 - DNA, 114667 bp, Homo sapiens
  misc_feature (1)...(114667): n = A,T,C or G
agtcccatttggatacccacctgacctggtaagcattggagcttctctgacccctgcaagacattctttccccagatgggcaggggttgcccagtggagtagtagcagaggctggaagacagaagcatctttggtgagtagctggggaccttaatggcagacatgaaaaactccacttgctgagaagccaccgccagcaccctggggacagctagcatatgaggcagggccacctcccttccagacctcgaggcctggagctcctgcccatcctggcttctgcctgttgccccagttcttggtccctcagctctcttcacagtgaacccctgttacttgagggacccaagtgtgtctttgtttcttgaaccccagtgcttggcacaccagaggggccacttggttgattggctgacatggctctgaaaggcactgggagttgctgtatcaccacacgcagcctggagagctgtgccgtcaaagtggtggggtggcctctgccagctctccctgtgccagacctgagtcgtgttgtctgaagcagctgagctgccgctgtcctatctgggcaggggacaggagactcctagaagtgacattgctggctggagccccgggtttggggcctgcctgtcctggaccaatttttgctctaaggacttgggcaggacatgcttgtcagaggtgcgttctaacagctgcttccagtacccaccactccctcacgcctggcttcccccggttgacagaagtgaagagtttggaccaactcagtaacaacgctttttagtagcactctttttaaaagacacgttacaccaaaatctaataaacataaaaatgatgtttttaaatgttatatttattatttccgtttataaaatgtacttattaacaaggtaatcagtaggaactctgtgaacagtaggaggctgttttgatgaacagcatagttggtgatttatatcaacctctgcttccaatttatttctttactatttttggttgcacaatatggaggaaatcagaaaaatccttattgcagtgttagtagttgaaattgttaattttttttaagctaaccttgcagtctcagggtacggaagaaatagaatctgcttttgttgtcaatgagtcagtatccatcaggatgaaccatgtcattggtaagaccttgccgttttttgcctacgaaaacggcaaattcacataattcagtcaataatagctaacatctctctgctgtgtgctgggccccatgccaaacactgtggaagctgcagtcatttaatccacacaccactctctgttgtgtgaggaccctgagataaggacagataaggaccctgagcctcaggggggttgtccaaggtgatgccggtgaccagagctgggctggggtggcgcaggcaaggttcaccatggctcagacagcccccagtggctgggcccctcctggccagtccacccctccgctgccgcccgcccagcccgggcccagaaaagaatccagcctctgtgccccgtggcgcccacaagctcgtggcccaggggctgtttgttttcttaacgaggttgaccaaacctcctgagcagcctttgtggcgcagcagaagccttgccggtgaaagggggctttgtgtgactgcaatggaagccagggcctgagctaaggcagggtctgtgggccagcctacccgtgcgcaggaatggggcgagtcggggtacatcttcactccccagcccttcctgccctctgctccttggttctatttccaagtggcaaactgccggctctatgcctgcatagaggagcgagtggagccaggcccccggcggggctgctgcggtaatcaggagaccggtgcttgcttagtgtgatctccaaccaggagcttcaggaccaccagggagcttgttgaagatgaccgcttcaggctccaccccagcccagcaattagaaaatccagggccagggcggccgggcatggtggctcacgcctgtaatcccagcactttgggaggccgaggcgggcggatcacgaggtcaggagatcgagaccatcctggctaacacggtgaaaccccgcctctactaaaaatacaaaaaattagccgggcgtggtggagggcacctgtagtcccagctactcgggaggctgaggcaggagaatggcgtgaacccgggaggcggagcttgcagtgagccgagatcacgccactgcactccagcctgggcgacagagccagactccgtctcaaaaaaaaaaagaaaatccagggccagggcactcaaatgtgagatttcacagccctacaggtggtggtgatgattgctaaagtctgagaactactataatctagtattgaaatacaatccatgtgctagatcgtggtggagaaaagacaaaagcttgtatcataaaacagctcattctaaaaacaagttactttgaggtctgcacacccatcatatagagtctggaacgtggtgttcatatgctgagctggccagcactgaaggcgtacagaaagcaaactttctttgattgtaataactgctatggtatttacatcatgtcatgcgttcctctttataggaaaatacttggccgggcactgtggctcacacctataatcccagcagtttgggaggccgaggcaggaggatcagttgagcccaggagctggagaccagcttgggcagcatagtgagaccctgtctctatgaaacaaaacaaaacaaaaattagccgggcttaataatgcatacctgtagtctcagctacttgggaggctgagcgcttgagtctggcatgtcaaggctgtagtgagccatgattgtgccactgcactccagtctcagcaaacgagtgagaccctgtctcaataaattaatacataattgattttaaaaaattagaaaatattctccatacctgttttatctccccaaagacatcttaaatgcctctgtgtcaaggatctcgtttttcttcttttgtacctgcactcttgtgcggtggaacactgtgcaattaggagctgcaggttccctatcacatgtttgacaagtcagttgcatggaatctctttccacaactggtgatgaaaatccactgatctgaggcttcctggaacacctgaaaattaagtaaatggaaaaagtagacaatgatctgccaagagagaagagaggagaagtgtgtttaattctggaggtaggaagaagattcttgttgtcccaccatgcaggcagcctctaacccttcagcagacgctgctccttcccctccctagttttttctcagcatacccccactgcccattcattcatatagtctttcaatcacaaatattatccatatagtctttcaacccaaatgtttttgagacacacagtaaccaaacaataattgcagactgtaatatgtgcatagaaaaggtcatatgatagggtggtcaagaaggaagcctcagctgggtgaggtggctcacgcctgttatcccagcactttgggaggtcaaggtgggtgcatagctttagcccaggagttcgagaccagcctggccaacatggccaaactccgtctctacaaaaaatacaaaaattagctgggtgtggtggtgcgcacctgtagtcccagttactcaggaggctgaggtgggaaaatcacctaagctgcagtgagccctgtggttgcgtcactgcactccagcctgggtgactggagtgaggccctgtctcaaaaaaaaaaacaaaaacaaaaacaaacaaacaaaaaaaaacctttttgagttgagttttaggctaagaattggaggatgagctcaatccttgaagagtcaaggaagggtgcccccaggtggagcaaacagcctaatgcaaaggccctgaggcaggaaagagcttgtcaggttggaagagcctagtgcatgatggggagaggagaggaaatgaggtggaagatggaggctgggctgggttgtttacagctttgtggattgcatagagagagtgggttttattctaagtgcagtgggaaacattggaaggttttaagcacatgccttgataacagtttgtgctgcagggtagagaatggacgttctattggggatgaaggcaggaaaaaatggagactcacagacagaggggcagacagtcattaggatgaggaccaagaagtctgaggatcccaggagaggcctccctggacagtgggagttggggaggccctgtaggccagggaaagctgggtccctgaatgatggggccgtagggaggaaatgaaagcacagcacttctcctcactctgggctgcttttcttctaggggaccccactagaatctgggaagtttcagcttcctgattctgtggtccttgtgtgatgcaatttggaaaaagagaatgtgggacatgatattggtgagacctgtttgccccattttggggtcgtcatctcagcccttctctgggggcagggctggggatggaggttttttgctccagctcagaggcgtctctgcagaagcaggggaggggtgagtcccctcaaccccagccccgaagacaggcactctgcttcctcctgcccaccccaagacctcccactacgtatgagctttggaaggcagggcctcgcctctctgcatgtcacggggcctttgtgggggaagtcagtggagtagaggacctgccatggtgctgctgatagcagctctccgacagctgaagggtgcagggctgagaggtgggagcagaggtcctttccagcacatggcctgagagagttctggatcaaaatcctgccacatatccaggaagaacctgcccggaggggtggacaagagcaacccggtgccaccccccaaagtctctcttcccatccactgccctgtgcccacttatcctagtcatccaggagaagcccacagtcaagctgctgctcaatgcttctgttaagggcctaacatgaatcatctcacttttttttttttttaagacagagtcttgctgttgcccagtctggagtgcaatggtttgatctcggctcactgcaacctccgcctctcaggttcaagtgattctcccgcctcagcctcctgagtagctgggattacaggcatgtgccaccacacctggttgatttttgtatttttagtaggtacggggtttcaccatgttggtcaggctggtctcgaactcctgacctcaggtgatccgcctacctcggcctcccaaagtgctgggattacaggcgtgagccaccgcgcccggccaaatcatctcactttatacacttgcctgaaggagccacgttatccctattttgcagatgagcaaaggtctacggagctcctgaaatccaggcagtctgacgtccaaatcggagtctaggtccctaaactgcctcttccccacaaacagcctggagccccttagggttggaagatatgagtgaatggatggatgaaaacaatgaatgaatgggggggcctgtggatgctggggaaaggggcatcaaagctggactgggtccaagccttgctcaggtgtggcctcagccggggaatccagatcacaatttcagggaccaggctgaaaggagggaaaggctcgggaagggactgaggaacccaagacaggtccctggttggccccaggaccggcgctgaggcccgggccccgcctccgtccgcgcctggagccacaggccgtccttggtaggcgcttaactcaggttgggtgacattttcgctcgccagttcctggcatcagtgagtgctccgtcaatgtttgacaaacggttgactccactgccccgcgctgtgggcgcactagacttcgggggcggcgtccaggtcccgcctaatcttctaggctcaggacccgcggcgcaagggaacgcccggggcggggtcgcctgggggcggggcctggggtggggcctgcggaccgagggggcggagccggccgccccggggtcctcagtccgctccgggagagttagggctccgagccgagcgcgcggagcagctggggccggggcgcggatgctggaagttcacatcccgtcggtggggcccgaggccgaggggcccaggcagagcccggagaaaagccacatggtgagcgcggcccctggatggggaggggcgccgggacccgcaggatttccccgcgctgcgctcagtggggacccggggcccgggcctgggtgaacgagcgctgcgggctggaccgtcgggggaaaccttgtcgagggtttgggggccgcttggatttgccagcctcgcggaccatggttcgagctcttgagggaccccagggctccgaggggcaggtccgccagccggttctcccaggtgtgcgggagcggagagtccccgggcagccgcggcgccgcaaggccgctttgtgcctttgagagcgggagggtgggcacgtcgccaggcgcaggtgctgcggcgtcctcccgcggggcctcacgcgcagacccgctgcccgcccgcgccgccaggtgttccgagtggaggtgctgtgcagcgggcgcagacacacggtgccaaggcgctacagcgagttccacgcgctgcacaagcgggtgaggcggcgccgacctcccaccggccccggcccagcctctgtccagcccccgcccaggccctgtgaggcgggcgggcgagccccagcctccgccacccccattactgcctcagtccctgcgcagccggtcagcccccgggcctctgtgggtgggttggggccttcctcgccctcggccggtccaccactcaccagggtctgtcccagtagagcccgaaggcgggggcgcgggagggcttctggctggggcgaagagggcttgagggctcagtcgggatgctgtgatcgcacgcggtaaacctccagtagatcaagaagctgtacaaagtgcccgacttcccctcgaaacgcctgcccaactggaggaccagagggttggaacagcgccggcagggcttggaggcttacatccaggtatgcgagagcacagttggttgccccccggccttctgtgccaggggtgtggcccagacagagaggtgtgggggcatggcagggagggaacccacaacttggggatgttattcaccacctcaagcatcaattttctgagtctaatataggtccaaacacccccctctggcttgttgaaaggactgaaagaggtaacggacacaggtagtcccagctccatgaaacccakgtcctgtcccctccatggtgaggtcctgtgctgccctcctgatggcatgtagggtgagggtccttcccccaacagcaaagctatgccgcgtcatggggtacaacctgtgcacacagcgcccagcgcccagaagggccctgagcctggttcaacgctctgctgtcattgtcgtgaaattctttttttggaacaaagagccctgcattttcactggcactgcgctatgcaaattagtagctgggtctgattgcaggtctcctctgtcctctccagggcatcctgtacctgaaccaggaggtgcccaaggagttactggaattcctgagacttcggcacttccccacagaccccaaggctagcaactgggggtaaggggggccgatggcgggggccaggggctgtcagcagtgagcaggtgaggaaaggtgttggagggcaagccctttcttttcacatctgccaggatccagcatgaccgccctcaccagctctcttgacctgggtggaggggcttttttttggacagacttggttacccccgccacctccggaactggggcttgttacaaatagaagcagtggtcccctgggaggtgcagttctgggctctggtgtctccaccccttcctcacgctcccccggcatccccaggcagcttacagtgtttctcttctcttcagcaccctgagggagttcctgcctggcgacagcaggcaagtcaaagccctagcccgcgcttggcccctgctgccccctagtggccatatgctaggaggcaggcctgctgsctgggcctgtctggcctgggccctgaagtctgttttccctttggtgcctcctgagcccatttcccactcaccttttccttcatgggtccctggtgatggcaaccccgtctccacccctctgtgggattctgccctgcctcccgcacccatggttcatgaccctgtttcctcccagctcccagcagcaccagcggcctgtcctgagcttccatgtggatccctatgtttgcaacccctccccaggtgaggaggtgcctagatatggggctacagggctgggttgtgggctttgcatttctcggctcctgggaccctcagacagcatctccttcctgctgcccacctctggagccactacctcctgctcctgtcccctggagcctgctttgtagacacaaggaaaacaagtttggcttccctggtctccatttcttcagcagcctgacttctttaccaagctgatgtgaaaagaatgtgacctgggaatgcggaggcttcatttggggtggacagctgctgtctgctgccttggcaggggctcctactcccaagtgggggctgagcccatgagcaggagctcaaggagctgcaggtctgaggccagacctgtttaattctatcccacagagtcgctgcccaacgtggtggtgaatggtgtgctccagggcctctacagcttcagcatcagcccagataaagcccagccaaaggcggcctgtcaccctgctcctctgccaccgatgccctgatcagtccagaggcctttggctgcctcctaagaaagtcatgtgcctctgtcctatgaactccatataaggctgggtcctcctttggcctggacccaggacttaattacccagtgcccagttgtgccacattcccactcaaggctcagaacttggctcgcattggtagctggaggtggtagaatttgtatgctcttagagcccaacasscaaggcagggtcaagaagataagtaataaaagaggaagtcagccaggcgcggtggctsatgcctgtaatcccagcactttgggaggccaagatgggtggatcacctgaagtcaggagttcgagaccagcctgaccaccatggagaaaccccgtctctactaaaaatacaaaattagccgggcattgtggtggtgcatgcctgtaatcccagctactcgggaagctgaggtaggagaatctctttttttttttttttttttttttnnnnnnnnnnnnnnnnnnnnnnnnnnnnnnnnnnnnnnnnnnnnnnnnnnnnnnnnnnnnnnnnnnnnnnnnnnnnnnnnnnnnnnnnnnnnnnnnnnnnnnnnnnnnnnnnnnnnnnnnnnnnnnnnnnnnnnnnnnnnnnnnnnnnnnnnnnnnnnnnnnnnnnnnnnnnnnnnnnnnnnnnnnnnnnnnnnnnnnnnnnnnnnnnnnnnnnnnnnnnnnnnnnnnnnnnnnnnnnnntcggcccaaggcaggagaatctcttgaagccaggaggcggaagttgtggtgagccgagatcgcgccactgcactccagcctgggcaacaagagtgaaactccgtctcaaaataaataaataataaaggaagaagtcagctgggtgcagaggctcatgcctgtaatcccaatactttaggaggccaaggcaggaggatgcttgggtctggaagtttgagaccagccagcgcaacatagtgagacctgtctctaccaaaaaaaaaaaaaaaatcaatttaraggtaggctatgaaaaagtacagatacatcccttaacataractggagggtggtggcaaggggagcaaatgtggaggcccagtagctggcaaagtttagaagcagggggcaaaagctcctgcctgacttttcctgggtagctcctgggtcaaaatttcaggcaggatcccagggaaggggcaggcacccattgccacaggagagttgcaggcatgttgggatgtaggcctaggggaggtgctgcaggctcaagaaccaggcccacacattatatattaaaaaaaaaaaaaacccacatttttttttattggtcagkgttggtaggagtttgttacaaaagtgagtccatgggcctgtggaatgtgaggggagkggktccgctccaccaratgccagcaccgrggccagtgcagctsaragccctgtggcggactacagggcctgcacagacggtcactcwaagaaagatgtccctgtgccctactccttggcgatggcaaagggcttctccrcctcgatcttgccgcagtctgcgatgatcacatccttcaggggtttatcccggctgtctgtcttggtgctctccaccttccgcaccacctcctggaaaagaaaggtggaagyaggagggcatggtggatcaggaggtccaccgctcaggagaaaggccccagcgtatggctcaggagggctaagacccacaagtgatcaacagcacwcaaaactggaggcaccaaaattctaacagactcctggccagagcagggagaatgcagatttgacgakggggtacaggaattttgttcctttgaagtaagacccaggttgggccaagggtgaggaggaggaaragggtgaccagggcatgtggcttctcagggacattgcgttcagctgcactctgtatacctcaggggtgggaccagcacgtcactgagtgaaggaggggagggaggctctggcagttgtgcagccttcctggctgggctctgagggggctggaagaatttagaaccttggaggcatggaggtacagggtttattctggacaggagcactgggctgcatctgtgggttgggtccttttgggaaagggatggacacatggagctcctgccctggggtctgtgttgaatccccggtgaggattgcccagtagtagcccttgcttccacaactcaccatgccctctagaactttgccaaacaccacatgcttgccatctagccaggctgtcttgactgtcgtgatgaagaactgggagccgttggtgtctttgcctgcgttggccatgctcacccagccaggcccgtagtgcttcagtttgaagttctcatcggggaagcgctcaccgtagatgctctttcctgggaaaaaagacagagcaggtcagggrcgctggattgcgccaaaccaagcagacattcrgggccaggactgagggggcttaacctgtcctctgtgccaggctaggctggagtggactacaaggacataaaagcagcgtccttcctatcttctggcctcagagccaagccatgctgactgaggccaagtggggcatcaggccaggctgatgtggtgaacagctcacagaaggattactttgagaagatagttttgtggcttttaaataaggcgcatgttatcagctccccttagctatggcccaggcctgccacggagggactttggtggagggaagtgccgtgcaggatgcaggggagtcaacagggtcggaactctccagaaaaggaggactgctgtggctgaccagcctgttttcctatgagcacaaaagacacaggcatagctgcagaggagaaagcagccagagatgtgtggggaggggcagaaaagaggggctgccccttggattctggagagtcaaagcctcttaacaaggaatgaacaggaataaaagacagctgtgagtgtgtgtgacgcgtctgtccacgtggggcttggggatatggtaagggcaatccggagtgatctctatgccatttcagagatcctagttccaaagctgcttccacgaggaacaccgaaacccttctttttccctatcaccccttggagactgacactgtgcatkaggccccaagaaactcagccaaaaatggggtcattttcattttgttttatctaacacctttcaaacatatttgcatgcaaaactcttttttccttctcactgcacctaccttcatcctgtggttccacagaatggaactgagctgggaaactgtcctagacagatgccaaccaggaagatgtttctgattgggcagcaggtaggatgactgaaaaccaagaatgaccagactctggctggtggggacagggtgcttctgcctgtgctccacctctcacccccacgctggggagactggactctgccacatgtgcagtgagacctggctggagtgctggctaaaagcctcccccatttgagccaactgtgggattttgattatagttgttatccagaaaacccccaaatctccatccttagctccagccactctctcaagatacaggggttccaaactcaaatggacatttctatttaaactcaacataccttgtcatctttctctccagacctcagttattcttttgaccccttttcctctgcacgtggctcaggttgtccctacccactccccatgtacttactctttctttccattcccaccaccaccgctgcagtaggcgagtgcttagggtgctcatagtgtgagccagagactgttccaagcatcttacatatttaacaatccactctatgaggaggagctaactccacttcaaagatgaagaaactgaggcacagagaataaaaggagccccagcagagcaacagcggggctagagttcagaccaaggtggtctgctctcgaatctctgctctcagccacctcaggatcaggtccaaatctccctgcccagggtcagtggcaccaatgcccccagcagcctgcctgccctagcctccacatcctggatctgccaccacatgactcccctggcaccccaagtgaggggtcatcctcttactcagctctgtggccctgactccctgcaggccgaagcccaggctgcaggacatcacccacctctctgcactccgggtacagatgtcctcaccccacctttggccaagctcctgccacagaacagcaccgggctcatgccctaaccctgcctcttttctgcccgttcaaattctcctcattgaggaccccactgaaatctttcctcacatccgcaaggtcattcccccgttccctggcctgaggggatccctctgcttgtcagcacttcaacaatggctgacttactaagcactcactgcatgccaggcacttcacactccagatctagcccaatcctcatggccccacaactctctccaccctcactgtacagaacaggaaactgaagctccaaggactcacttgcctgaggtcacaaaacaagaaggtggcagacactggatcgagcccaactgcgtctgactccacaaatacagttctttggtctcctttgtgagcctgagtcctaaacgctgcatcatggctcacttgtacattttcagttgttggaagtaaaagggagccactgccccatgggtcttcacatcctcaacccccaccacagagccccatagacactcatcgaggagtgagctgtgttctaagggagcagcaggctgtacctgagctcagtgagactcatgcaggcgtccgggggtctttctgtcctatgtgtgcaagttaatgccaaggtgagggtcggccctcacagagtggtctctggtgaaagactgtcaaggaaagtaactgctcccactcttttttttatttttttgagatggagtctcgctctgtcgcccaggctggagtgcagtggcgtgatttcggctcactgcaacctccgcctcccaggttcaagcaattctcctgcctcagcctcccaagtaactgggattataggcgcgtgccaccacgcccggctaatcttttgtatttttagtagagatggggtttcaacatgttggccaggctggtcttgaactcctggcctcaagtgatccagccaccttggccttccaaagtgctgggatcacagagtcaccacgcctggccctctcactcttgctggggcttccagggtagcctggacaggctttgggcatctgacctagaatcgcgtacccacatgtcttcactttgcttccacacgcctctctccccaatccccattctgaagaggtatcaggaaaggtcaccaggctataggcctggatcagcaggacggtcacctgggagagattctcttagatctaccatcaggtccaccccattattctctctcctttgtactgggttccctcttcaaagaagggtgccgctggtctcaaagtaggtaagtaataagtaggcctgcctctagagctggggaagaaaraggcctggtctccccagcagaacctggccctcccactgtggaggctacactgacatactccttggcccagaggacctgtggttacctcctgtgccatctcccctrgtgaagtctccgccctggatcatgaagtccttgattacacgatggaatttgctgtttttgtagccaaatcctttctagaaaaagggaagagaaggtaaggaggtggtatggggcagcaggaagacattacattaaataggcctcacaggaacaagtccacaactcctgctcgcagaagagacaccactgctgaccactttcactgttcagtgtgctactaagtgagcgggcaggcgccacaggacaggcatggtacacacagatgtggaaatccctctgcctccatacaattcccaagctttatacaattctacatcacataatgcttttcccctcatttcttccaatcataagaacagatacaagaaaactgagaagaaaggtcacctgctggctcaatggaaagttaatataaactgaaatagggcactgttgtttccttaaaacccactgccctcaccctaggtgaagtctccccaggaagctctggaccccttactcttttttatctcattttttaaattttattattatttttttgagacagagtttctctcttgtcacccaggctggagtgcaatggcacaatctccgctcactgcagcctccacctcccaggttcaagcgattctccagcctcagcctcctgagtagctgggattacaggcatgtgccaccacaatgcccagctgatttctgtatttttagtagagatggggtttcaccatggtgcccaggctgctctcaaactcctaaactcacatgatctgccctcctccgcctcccaaagtgctgggattacaggtgtgagccaccatgcccagcctgtttttttattttttatttttatttttgagatggagtttccctcttgttgcccaggctagagtgcagtggggcaatctcggctcactgcaacctccacctcctgggttcaacaaattctcctgcctcagcctcccaagtagctggaattacaggcgcctaccactacacctggctaattttttgtatttttagtagagacaggatttcgccatgttggccaggctggtctcgaactcctgacctcaggtgatctacccgcctcagcctcccaaagtgctgggactacaggcatgagttactgcgcccggccttttatttttaattaatttattttttttttgagacagggtctcactctattgctcaggctggagtgcagtggcatgaacatggctcactgcaacctccatttcacttcagcctcctgagtagctgtagctgggaccacaggtgcaccccgtcacacccagctaattaaaaaaaattttttttggccgggcatagtggctcacacctctaatcccagcactttgggaggccaaggcaggcggatcaccagaggtcaggagttcgagttcagcctggccaacatggtgaaaccctgtcactactaaaaatacaaaattagccaagcgtggtggcgcatgcctgtaatcccagctactcaggaggctgaggcaggagaatcacttaaacccgggaggcggaggttgcagtgagctgaggccgcaccactgcactccagcccaggcgacaagagtgaaactccgtctcaaaaaaaaaaaaaaatttgcgggggtagagacagggtcttgctatgttgctcaggttggccttgaactcctgggctcaagcaatcctcctactttggcctccaaaagtgctgggattttaagtgtgagccactgtgcctggtcagggccccattactcttaagaaagggcaatactgtgttcccagggcaacaggcagtcggtgctcagtgaggtccacgctacagatcggctgaactctgcaggtcagtttgctgccatccccagtgccaatttcacttcatgtgagttgactacvcctgctccagccacttacctctcctgtagctaaggccacaaaattatccactgtttttggaacagtctttccgaagagaccaaagatcacccggcctacatcttcatctccaattcgtaggtcaaaatacacctgaggaaagagaccatttccaacttagcttctttaaaggggcgttgctaggggagggaaggtacaagaagctaacctgaggatgggagagagaatagagccatatttttagagaagtggttctgaatctgattttggtgacggtaaaaatcctatragaatctaatgaaagctccagacccttttcttggaaaacatgcttatctataccctccttggactacaggataacaatatttgctctraacagctaatggacccagattctaaaaattaacattagaaaacccataaggagcggagcctaagttcaccacttaagtttgaagtatacatactgtgctttgtaattggaagtggctaaaatttggcttaaggagagaaaggattcggaatccggcaggcgtgatctttcaccatctccccagcactgaggggtgtttgcaaaaagcctgctctgagactgccagtgtcggccccagatgggtatccggggatccaactaactccctgggtcagggcaggggctgggggtgtcggggtgggtccgggtcgttccctggactgaatgggcaggacggcccagacgccacgaggccacagacagaagccgagggaggaggggctgagccaaggccaagccaaggccgcccgggcccgagctccggcaccgtaaatgccgcggactccaccggaccttgacggtgactttgggccccttcttcttctcatcggccgcagaaggtcccggcagcagcaggaagaagackgaccccgcgatgagggcggcggcaaggagcaccttcatgttgcgttcggagaggcgcagcatccacaggcggaggcgaaagcagcccggacagctgaggccggaagagggtggggccgcggtggctagggagccggcgccgccacgcgcgggtgggggggactggggttgctcgcgggctccgggcgggcggcgggcgccgtttcccccctccggctcggcgccggatagtaggtccccctgcggggcgggcaccgacgcgggctcgtgggtggttgccacgttattgctccctcattgggctcccggccgccctctcccgcccacaggaaggccaccggcggaaggcggcctcgcagagcacgggcccgggctccgagaagaccacaagccccggcatgctccgcggcccgccccgcccggagcgctgttccactggcctgcggtagctggcgcttgaggttagcaaatacgtgggcctggacaaggggcacgggaagcttgtcactgttttgggccagtcaagtgtttgtcaccgccaaattggctctaaacgttgtggcttccaaacacttcagggacatttatccttaccgagcgtggccttgtacggctcctccacttgtcttgcaaaacttgctgcacaacccacttccttttttactgaggccgtcaagttactacccatttttctctcccttctgtaatcttgctgtgcttactgttgtgtatatcaatggacatcttattgtatacgctgttcttaacttcctttaccttttcccccaatagactacatttttttttttttctgcggaagggactgtgttgcatttactctgtccacagctccctcacagcgcggcagtactgagtgcccaacaagtcctggttgggatagcttcacatccgcactgacatgagaaataatttatgccacggcctgaggatacaatgcctttttccggaggtcaggaatagttactagatgtccccacagggctattttaggtcttcacacacttagtgttgtcccamtctacaacatagatactttggtactgggagtcttacacaccaaaacaaaccaaaacacaaacttccaaaatttggacctatggcgttaaaacgtctttaaaactaattttcaacgattaacttcgtagaaattccaggtcgtcacagcacagattataggcagggctccatttacataaattatgcaatgtagtcttcatgaggcgctgacctgagactgaagttatgcaaggccactggcattaactttgttgttcattacagcggccttacacaggttgtagagcttcaagacagttctcttatttcccatccttgcacctcaattcagacaaccccaatcaggaggaagttttaaacattgttatactgacaaagatgatcttccagatccatctctcatcccttttttttttttttctcctattttgttaagcctctttcttcactcactggtctcaggctgccatagccagagaaaaatgtttactaaatcatgttttcaaagtagcctccagctgggcacagtagctcatacctgtaatcccagcactttgagaggctgtggcaggcagatgacttgagtccaggagtttgagcctgggcaacatggtgaaacctgtctctacaaaaaatacaaaaattagcagggcgtggtggtgcgcatctgtagtcgcagctaccccagaggctgaggtgggggaatcacctgagcccagaaggtcaaggctgcagtgtactgtgatcgtgaaactgcactccaccctgtctcaaaaacaaagaaacactcaaaaaacccaagtagcctcctgcacatgaggagctaaggctaaaatggcatcacagcagcctttctcccactcccactttcaaaagaaatcaggttgatggataaaatgctctcaatgtgaaacttttctctcatgattcttccactgctacctgcctgtgaaaaagtaattaaagagtagtaacaaactggaaggagtcaatcatgcccagattgacagttgttctgttggctacatatgcagtatggttttacattgctcatcatagttctatcttctgtctggacacatattccgcatttgtagaggagaattataaagctactaaagttgttccacagagcagatcctgatttcctgtgttctassacctgagaacaacagggacccaggaactaacgtatgagtgataatgtccaaattcttccaggaatatttatttatttgagacggagtcttgctctgacgtccatgctggagtacagtggtgcgatcttggctcattgcaaactccacctcctggattcaagcaattggcctgcctcagcctcctgagtagctgggattacaggtgtgcaccaccacgcccaactaattttgtatttttagtagtgacagggtttcaccatgttggccaggctggcctcgaactcctgacctcaaatgatccacccgccttggcctcccggagttgctgggattacaggtgagagccactgcgcctggccaatatttatttttttaattaaaaaataattttcttcttcagcactcgaagagagacagcagtatttatttttgaagtgactcacaggagaagacaatatttaatccaaggaatgaaacaagaatgccaaattatttttgttcacaggagtcttgaatcgcatcaaagttagtcctagctagattgttaattacaaatgagccgagggagattaaaaacagacaaaccaatcaaccaamcaaacaagcagaagtagccaagaaaggtaagacattttattttacatacaaaaagggtgcaaactgagtcctttcctccccaaactggggaagaggtatacttaaagatcacatttgtgttttccatggtgccctaggaaatgggctactctgagatcacatatcagaacccattttccattttctccaaagaaggctacttcctctgcagagaagattttcctaatggtgcacaaatatctctcctggaggaaccatttcaaatacacttgaaattgacattcatgtttaaaaatactacaaatttcattttcacagctgagctttgtgaccagtgccagggtttatgaaacattatacatytaaaaaaaaaaaaagtaaaaaaagaggcatttaacaataatcagacacwtccacacattaaaactgatttccactgctgatttatacattatctagttgtttaaaaatcgcaatcaacatcccamcatctttttaagagtacaatgggcaaagatcaaagacagataaataataatataataaattagagcatgtaatacatcctatgggaattgctgaatcaacattattttccattggggggtatatatttttggtttatctttatcttttctgctgttattttttttctctgcttgataaaatggggctcattcctaaagccagcttgctgagacactaatttcagaagctcacttgtcacttgtttaacctctgagaatactcaggaacacatggttcccagcagcttgggctgggtctttatggaagtgaaatgcacatagatgaacacacgcactcacgtgcgcacacacaccacacacacacacagacacgcagtcacacacttccatctgtaaatatatttctccccaaagaaatggctcatctttcctgagacattcctaatagactgataagccttctaaaaaaggcttttggtgcaagggctggcctgggatttggtctggagctcatgaactgaaaatgtctcacctgtactgaaagaggggtgggtggggacattcagaacagctgtcctcttgtgggtgttactggaatggctgcaccacacccccacttattaccatgaataatcctctgctctgagaccttatagatggtgatggcactgggaaagtgattgtgaggagtaaaagaagaaaaataaaagaaattctgtctacagaacggaggtttctttgtaacatcaggtttggtaatcaaactagaaatacaaggaatacgtgttcactttttcccttgaaaggtgatttacaaataccggaagtgggttttctggttgtgttttgagaaaatatgtcaactaccactgtgtattatccagggaacctactcactattttgaatacaatgagaaaactwtttttttgtacttagtcacctgcaaaaggagttaggaaaaacatttttaagactgcttgctggayaaaagactttcaagattccttacttgtggctaaaacattgctcaaaaaggataaacccacataagggccatggttgcctcttctttttcttattcagaaacaaaatcaccccccatacaccaaaaaacaaactgaaaaccaaaaacaacaacaaaaaaacaaaacccaaagccaaaggaatcccaatttgattcctatcaacccctcatggsaaagactaggagtctctgccatcgacctctagacaggacttccctggagtctgcaaaagcaagaacccgagagataagtgcctgtcacttacgtggccaattcagatgggttgcctaattatcctggctccctgagggtttctggaattcatctgcccaccatagggcaatggtggggatggtggcagtggcgtggcaaaggcaatgttggctgtatggtgttgcaggctcccaatctgagaaacgaaccttaatatggttctgacactggagacaatgttgttagggcaactcaatgggaatggagagctggtttaaatgtgaaatggaagaggtggctggaacacaggaggcatgtgggcttgggagatgcatcaaacgaaagttcctctgagaagacgttttcttggctgccatggaagttctcatttttgagaaatgcaagccatgcttgctcactgggaggaggaatggattttatcttttacataaaaaagttaaggctataatctttagtaaccactttgacgttacattatcattgttacatatttctggcattaaaagtggttactagcactgaaaatcaacactgaatatgcactaccagcatatcttcccactgaactaagtttggaaattactttaggggtgatggtcaccttttctggctgatggacagggactgttttctaagtacttggagttcatttagaaaaaagagacaatcaacatgtctagaaacctcaggatctctgctgtcatctgtagctcatgcattccaatataaaatgggattttaactggaagctmatcttgtaccttcctagaccctgtttattgctggacaggctccataatagcagaagaatgttaattaaggcagtcatgagtgcacactggctgtcaggatactctatccacccttgggggcagtctggagtgagatctctggaaagcaccaaggtgcgtagagcaacttgaccaactcttactgcagagacacaagtgataccctggtcaaaagggagtaggggggaccatttatgccttggtggagtcttggcctgtgtgcctcaaatctgtttaggatgcaatgtctgagggactgtagagcttgggaaaactcctaatgtatactattaagggtttttatgaatagatgctgagttagctttcaggaaaaacaactgcatcaatcctaaagaaaaagatcgttaggcaccatacttgtgaaatggagaaagctcagaaactacagagcaagtggatgggtggggacagtcagcgagtgcatgccctaaccccaaggatctggctgaggcatacagctaaggaactgtagcagtagggttgaggagggagccctgattcgctgatgggcctgaaacaaatggccaattgcatctagggtactcaggttttttgcttatttttaaggaagatcccaccagaatctcccaggtctgggaccactttgaagtgccaatggctctggagggatcaccattactctgcatgctaaagggacctgggattctttacccttgttataaaaaccaaatatctagtaagagatttgtgaggttggaaggtgagaacagtgtcttaggaagtacagtcccctacaactgatccagtaaaaattttaagacaaaaaaaaagtcgcaaatccagctgcaaggcagcttgccctgcagccaagctggtcagtgcctttgcttttgtgtgtgtgtgtgtggaagcagggtgaggggctgaagagaggcactcagtagagtatagagtgccaggatgctccaggcattcccaccatttccctctgcccttttttttttttctttttagacagagtctcactctgttgcccaggctggagtgcagtggtgcgatctcggctcactgcaacttctgcctcccaggctcaagtgattctcctgcctcagcctcccgagtagctgggactacgggagcatgccaccatgcccagctaatttttgtattttttgtagagacggggtttcaccatgttggccaggctggtctcgaactcttgacctcacatgatccacttgccttggcctcccaaactgctgggattacaggcgtgagccactgcacctggccccccctctgccctctcttgagaggcaaggcattttctatacaggggtgaggaaaagttaaactttctatacagtaagttagcaatgcccaaatcccaactgagaaacgatgtaaattttagtgatagggctgtaaccactaggtaatggcaaggacataaatcccaatattcacagtccttgtggggaaggggtgtgatattgtatctccctgccactttatgtttcatatatagaaacatttatagaaatgacatattaccatcttttcataagctaagcaggtttgatgccagtgaaatgatattccctagccaaggtccaatggaacagatgaagcccagtacctctgatccatgttaatgttatttctgctctgtgtaaggtacatcaagggaatttttcaagaaatggcaactatcagaaaatatccccacaccctccagtacaaaagacagccctgcacctcaaaccagaggtgaagacttctatggtccacaaaccatcagactaagtcacccaccagccactgtgctccatggttagctctctactcccagatacaagacctctttcctgatgtaaatgaccctttctcttctgtcaccgctggaatgaggagtcattgtttggttaagccactaaactcaaatgaaaattgggcatgagaagagtaactccacacatgaaagacttgtcaaacagtgaatgaggaaccagatccttcacagtrgtacctcatatgaaaacaccatggggggaggcctagggcatactgggaaaaacatgcttagaggcacggccacctttctggaaggagtccaattgagaagataatttcagacctttcattccagtctccttttccctggaatgttccagcaccaaacaatctttccctccttttaaatgcggccccatatactgcatcctaagcctactgctatggacctgctgggagaagatcttcataagcttggtttctgataaggcaggccagcccaaatgctacagctcagctattggggcagataggatacaccgattttcttttcctggccctataatgccacaccctgaggtccctctggcaggtggaaggcaggttcactgtcctctttttttccactaatggcaatatggtggtggctgtttcatcactaatttttcccccaagtcaccaggacgtcacatggctatctagttggaagtccctggcagcatgggaaacaatttcaatttttttttgttaagcatctccttctctgggatgagctgtttcctggtcacagtctggctcggctggctcatctcatgttctggagagctaggttttcaaactgtaagctgattaggtcaagatgctctggtagggacattcttcagctgctgagaagatgaatgaaaattcaagtatgttttcttgccaacctgagtgttcactcagaatgacaccgagtttggcttctcttctgggtgctgcagatcaaactctttccactgagaatgtcctctggacccatgttctctctgaatggcttggccggccccatccccctcaaaacaggtaaaagtaaaacccccaatataaccagacacaatatgcatctgccatgtttttgtttttgttttttttaaaaaaactaaaagtgcaacaaagtcagttttctttcctttgcttagaacaattttcattgtcctactacctggagaaaagagtttgtcaaaaaagctaagaacgccaacacacagggacagtagactgcagattgctcacagcttgtgtcctacagtgtaacttcacaggagggagggaagaaggaacctgaaccccaaggccagctgggatgaatgctgcacaggcacagaggaagaggaaaccatactgccaggcacacctgggatacggagaaggttcttctccagcccaggtctgccattttcctcctaccttcttggccttacccccagcctcttgatctccttctgcagacaaagcctttagctcactargttttatgctggagagggttgagggtggggtaaaaaccaggagtaaactaaggggaagaaggagaatagcagtccttgagtttttgtgaatgacaccttcactgtaaacaatgggaaggagagtcaaccaggcagccctatgggcaagcagtggaggaacagcagctctgggacctgctcagagccttaggcaggcggagatggccaatgacccactaggccctggctgcccgcactggccccttctgggggcatctgttttcttctttttggtttggatatccaccctcccccaaagaggagtcccttccaatgagaaatggcaggagctgcaggtacaattgagtcagagtccccagggcctgaggactcctgggaggcactggtcacttgtggcgctgagcagtcttcttccttttcctcttaaagaaacagcagcacctggagcacaaggaacattgcaagtcagtgcgggaggcctgcagcttccagcagacttctgcctgcttctgcttactgcaggggtggaattttccccctagcacccacccatagggaccacccaccatctacagtgcacgcactggaggcagtgggcagtgtctgccagaaaagccaaaggaaatagctgcttgatttcaatctgcagtcatcctacctaattatcaagatggtgcaggctaggcagggctgaaataggcattactggaaggagggtgaagaaggctcatagtttagcacccaacccagatgcctcaccttatcaagagtcatgactgggggtcctcagggctgcataaaaatagtctacattgtctactccttgatactgagggcacaattatttaattcaactcactggccagagggcagggaggctaaaataaggcaaacaaatcccatgataagtatgatgtctggaactctaggaggatctcaggatgttaccaatgaaggattaaggattctctccatccccctctctgtcctcacccaccgaagtaggcaggagaggccctgactctaataatgacggtgagccacatctcctgacatcagtacagctccccttttcatttgcaggggaccactgtcacagcccaagagctgaccatcaggatgctctcactccccagtttagggagtgagatacagggcactccccaatttagcttcctgagactgctgctgtgccagatggggtttatgaactggccttgtttaggatggaggtgggattggctcctttatgagtcctccaagttctgcttcctggggactagccacagttctggcacatcccaaagtctgagtatcccccatcctcactcctgtctttagaacaggaagtatcactcttgctcaggcagtccagaagcaggtgatgagtgctgtggcaaggtgtacaagatatgtcctttctggggagctgacacatggggaatgagaatgaaagggacagaaggtggtggatgagtcaaagatgccggatgatggagggcagtaaagttggaagcatagctcagacttgctagatccttgaaagaaaacttttctgaaaaaactatctttgagtctcttgcctaattattgcaggtgtaaagccagcaatattcatatggaaataaagactattacttacttcccatacccctaggtattccattgtagccaagattccctctctttttagttagactctttggcattcctacatccaatggactagttataaaaaactggagaaagtttctaagaatgcagaaacatttacacagaccatgatgggctttaatcatatctgaatgaatcaaacatgaaaattttagaaataggactttcttaagagggtctttggaaagattttctctgaaagtatcaatgacatttgtgaggtactattaatgggtgcaaatataatcactaagcaaagtgtcatatgtatttggaaactaaattcttttaaataaaagtgaccaacatttttgattgttaaaaataatcctcagtggaaaccctggataagaattcaagaacaaatggtgttttttggtgtttttctttcttttcttttctttttttttttttttttttttgagactgagtctcactctgtcgctcaggctggagtgcaatggcgccatctctgctcactgcaacctccacctacagggctcaagtgattctcctgcctcagcctcctgagtagctggtgcccaccagcacacccggctaatttttgtatttttagtagagacggggtttcaccatgttggccgggctggtctggaactcctgacctcaaatgatccacctgcctcggcctcccaaagtgctgggattacaggtgtaagccactatgcctggcccaaatagtgtttttctatacgtaatgctttagaaatggacattttccaagttgaatgtcctgaaattaacaataaaagaggcaaattaaatctctatttcaatagacttacctcttttcttctgaatcatgattttcagaggtattactaacttttaagtcaacttctattcttaatctttttggaggatgctaagatgatgattttgtgtttttaagaaagcaataaaaaaagtttacaatactgtttaggtccatttcaaattgtacaatgacttctcttttacctcctccaaggcaagccataagaattaatgcctgcttacaagcatatcataactggatgtgcaatgctgaacccacctaactaaaaggaagtgtgagttatggttcaaaggagttggaatatttcaaatttagagccctggatttatctttgctagttattgtagttaaagcttcagcagtggcaaaggcttttaatgattctacctacaagaaagcaggccccacaatctgttcttcaactctttggtgtctgtggtgactactagcaacaggatctattaaactgggtcagactctagaccaagtccactgattgactttcagatgtgttcctctcagaagagaatgaaggcaggtggtggacacctcatggcttaggtttcctttcagttgattctttgactgtttagatgacaagaagttctcaacatgctggagtcaaaatcgatccaaatctccctactctcaaagccatctagtgctcttaccccaggcctctgacccactaccttttccatatggcattcttactatgtcctggccctctctcttcagctattcccttgctatgttccttttctctgccatatgtgtacattcttcctttcttctaatacttaactcaagtcctacagtgtttacaaggacttctttgaccatcctgtccatggtgacctcttggcccctcagcctctcaagggcagtaatctcaatgtcctgcagaactccttatcctttcatgtgtatgtctgatctcttcagctagatggtacccaagctctttggggcaaattttgtaaccccaccccccaccccactagagttccaagcacagggttggataagcatatagcaggccctcaagtatctgcagtaaggatcatgtgactgacacctcacaggaaaaaatagaccaccacaatgtcggattacacagacacatgtttgcaaaacaaatagccaaaggtattctttgatcccctaagactataaatctgacctccacaaaacccagttgttttctttaatacattcctgtccctgaggaagcccctgtaggcaatctggcttagatagttagggttcagaaaccagtgcccaacccagtcactgaagacaaatagaaacatggcagtcatgaaactagcaggctgttacctccatatagagcatgactttatgcgtgcggacaatgtgggagagttaaaattccagactgcaacagaccaacaagttcaggagtacctggaaggtcacaggcaagagagcaggggaaggggctatgtcttgtagcaagaatgttcctcaccacacatggattcttgagggcttctccttccataaactccatgttattcctaaaaatacattccaggaaccttttccaggagtggaaaagacaggctccaatatatcaattagctgagtcagtccttggcctactaaactctcacataggaataaagaaaaagacaataaacaaaaacaaaacaactctcaaaacaacaacaacaaaacatccacctctccctgaaggagctcccccttttttgaggttgctactctacagagggaagagccagctgaatcaaaaagtcagattttcccaaagcagccaatttccaggttagagaccacattgcagaatgtgagattatccagcaacaactcactatccttgcggctgtgagtaaacacaactgctacataaaaactgatacagtaatcttgcccttttacttctgtccctctccatatctggttgtattaatttgggagaaaatttactcagctaaaaatagataattttggatactgtgggatactgttatggcaggaggagacagcgataagatgggtttgaaagaaggaatagattaattcctgggtacaggcctgccccatccccaccttatggatctagatccccagtcagggtggttatggcacaaggagtcctatggaagctatttaatgttcctaaggcattttgtttggctttgccagtcccagcctagtctggtccactccccttgcaatggactggagagagggactcaccacaggttgagcattttcaggcagctacagagtatataaagagaaaaacacagaaaggaagagagagaaagagagagatattagtccacagaggtgaaatggaagcgactccctgtgagccatgcaaacatgcagtatgtgtctgtgtttagtttcttcttctgtcaaggtaggctgagtaggcccaggccacttggtccccacgttaaagtggagggttcggacaggagcctgacagaagcatcaaggtgggagctggatctcaggggtaaggcaaaacagaaagagttggtaggagctccagggtgggctttcctgggcaacttctaggaaggcagcaggggaaagagcaaatgaccctgcctgtaagaactcaatcaagcaccaggggtgaaccattttggttcccatatgaagtcttactgtgcaatattaagctagcctctcaaatattctgagggaaaaagaaagtccctagcctttgtgcaagtccaacatgcctgatcaaagcagctagcagttagctcttcctctagagagggagaaaaggtttaagcgacacttactttatcttattagaagatgaatcagaggaaggagggtcactgctctgtattaaggtataactaccagagaaggacctaaattctactcttgttaatgctcaggagaaatgaggttcacatttgttaaattatagctaaagtctggataaccaaaaattcctgtattcttactgtaacaaaaatcaaccaaaaagctgcctgccctcaccaccctttaaaccataaacaaggacatatgtcctggagctagagaaaaagggaattcacatgttcgttttgtacacagaacaaaacctaagaccctgttatttctttccacctttacactaaacaagctgggtgaggaacccaaaatcaaaagcctgaaagtgaaggtttcacatggtctccccagtactgaggtgtgtctcaatataagcatcatccccttctaccccacaagcaggctgcatgaacaaatggcatcacagctgcgtgcaatgaggggctgtttggaacacctcgtgcttctctagctgtgacttcttcccatgaaaatgatcaaccaggtggacacagggctaccctttccttgcccccacacgcaaaggccaagaaaaataacacatggctgggccctgacagttctctgggcaagatggattgatagcccatgaaatcactaaatgccctaagccatgagcttcgggatgacatctggtcaaatataatttctcccctatgctttctacatcttttagaaggtccaaacctgaagctggtggcaaagaggcacatttgtcctttttgctaaatgacaagactttaaactctccttacattctagaggttagattataccaatacagaatacaccagattgaaatctctgtgtgaatgagcccatatcttacacacagaacacaaataccacactcacatacacaattagtatacacatttaccaaaatgagatgagatgaatgggttcaaaagataaacctgtatagggcataacataaaactaaagcccatttgattactgcattcaaagtatactattaaatccaaagctaaacttctagccttcaaagtaatagccacaaaggtgaattgagaatggggtgggagctgggaacaggtacggccatccttcaagctctgacaatgtttgaatcagaccacgcttggtacagtggttctcaacattggctacatgttagaatgacctgaacttttaaaattcctgatgctcgggccacatttcaataaattaaatcagaatgcctgaggccagactcagacatttgtattttctaccatgccccaaatgactccaaagtgcagccagttgagagcccagagggtgggagtaacatattgtttatttaagataatgtaattttgtatggaaatcgaaaaactgtgagtaccattaatatctccaaagtccctgagaataggagcatgtttccttattaaaatggccttttcctggcataaccagcataaccctcacccccttatatatcagtgccttatacaagctgggagaagagctctgaagctgcctacagttagcaggggctcaacaaaagacagtcaagtcatcctcatttacttttgatgtattgggtaggaatcctcaagccctggttttccaagcaaaaattttcttttttttttttttttttgagatggagtctcgctctgtcgccaggatggagtgcggtggcacaatctcgactcaccacaacccctgcctcctgggttcaagcgattctcctgcctcagcctcctgagtagctgggactacagacgcatgccaccacacccagctaatttttatatttttagtagagacggggtttcaccatgttggccaggatggtctcaatctcttgaccttgtgatcctcctgcctcagcttcccaaagtgctgggattacacgtgtgagccactgcacctggccaaaaacttttgtgtgtgtgtgtgtgacagggtcgcacctatcacccagattggagtacagtgacatgaccatagctcactgcagcctgaaccttccaagtacctaggactacaggtgcataccaccatgcccagctaatttttaatttttttatagagttggggtctcattatgttgcccaggctggtctcaaacctctagactcaagtgatcctcctgcctcagcctcccaaagtgctaagattacaggcatgaagcaccacacctggctagaaaggacttcttgaaggtaaaatgagttcatcaaatagactggcagggctgggcacagtggttcatgcctgtaatttcatgactttgggagactgaggcaggaggatcacttgagcttggggaatagaggctgcagttagccatgatcgtgccactgcactccagctttggcaacagagagagaccctgtctcaaaaaataaataaataaaaaagatgggcaggagaccaggggaataggcaggaaagacaacaatacaaagtacatctggaaggtggaagaatgcaggtctcagtggcatctcactaacttacatttagaggtataagagtgttctggcttgtattaagctacctgggggctcatgagactacttaggtacaatatcactataaatacgttgtctgcttcagaaaacaagaccctgggatatcctgaaggttctcaaagggctcacaagaaaggtcctccatatcagggatagcagcagttactgactcatggtgtctctatctctccctacctggtatcttcttgaagtctaaatctggatctaaatttgggatggggaaaaaagtggtagaaatgctgcttttgcagcagaattggcagttatctcaccttccaccccagattttaagagtttaaacacagaccatgcagcgcaccaaggggctggtggtatgggtggggcaagacatacacatgcaagagaagcagaaaagggtgtggggcaacctccttaccctcctgagatgagtatgacttccattcttttcccacactctcattcacagatgcagactataatatttttcttgcctgacttagtctctctgaagccagaatcatttgagagtgaacaaaatggccctgaactccttgttccatgattgtacatccagttgctagcccacaatcagaaatcgaatgctattcagcatggcccatggtttaacagcagatttttctctatatcccatatagagcaagaagctccacagccccaagaagctcatggctactatccactgtagccctgataacatgattctttcggttcactatgtctttttcatgtgaactagaaaaatgtgactgtcttccccgaaatcacagctaaagaagggcagtagcagccttaaggtaccatgcaaaaattaaaacagttaaggaagaaagctgtggttacaagcatgagaaatccagtctgagacgagcagcacacagagaggaagagacagaaaagatttttcaacccatgacttaagagcccccttgaaagatgtacgtacttagcttcctccactacctccacctcggcatgagctgtgattggtgcattggagtgggctcccgtgggatcatcaacattcagctctccattggttgagctaaccacctgaaacagaaagacagaagtgtgtgacaggcaccatggcaacagaaatctcttgccagcgccagacagggtcgctaaacaggcagtgtctggaatgtttgttttcctgggttaagggatcaatttagggaaggttcccaggcccatatcatgcgagaacactaatatcaatgatgtaatcatataatgatgataataacttacatactgagtgcctactccgtgtctgacactctgctacattgtgtgtgtaaatctaatccttacaaaaatcttatgaaataggtttttttacagatggaaacactaacaaatgacttaaccaaggtttagagttaatatctgtgaatttccatgaggaaaatttgttctaaacacagattctttcatattgcaaaaacacacacattactttgttaagttaaaaataactgcatggctgacttctaaaggtaaaatcacttggctcccttgaatgtgatgggtgaagtctagttctctcagtttattatgctataatgatatagacttagtgctgatgttgaaagaaaaagttctaaaaaggaagtcaacagtgggtaccagaaactataaataatcacactttccttcagaaatttcctcatggctttgagcactggttcgaagttacaaataacaagattgtcacatcctctccgacaagagggaagatggtaaaaaaacactctcccttggaaagccagtcttatttcaacgatctttatttcaggttcactgccatcccagttctcactgatggtccccgaaatgtaagtgaaggctctcactcctgtcatctggttaatgtggacccaatcaggcttctcttgcatgtgtagctgcttctgccacctggtttcatttccagcacattattcctgtttatgtgggtgctgggaagtgggaaaaggggcctcactgctggacaaaacactctgcttgttaaagaccttggctgaaacatgggagagaacacaaaataggataaacaatttggatatcatatgcccttggataagtacttccatctatttgagattgtttcttataggttgatgagagaattatacaagaaaatgtatgagactgtctagtataatacctagcataaataagggaagcagcatagtgtagaaattgccctaatcagccctaagtttgaaccccagctccaccagttatttgctgtgggtctttgggcaagatcctcagtctatgcctaagcttcctaatctctaaaatgggagaacaatgctgcttacctaatggtgtttactgtgcagacaacccacagaaagtgcttagcccagtggcatgagacatggtaacagctcaataagtggtcatcttactgttattctctctccgtaactgtttattcttatctgcctctagctcaggggtcctcaccagcagttaatccacaaaaatttcctgaatagtcataaagaggagggtgggaggaaatatatagtacacgtagcctttgggacagatagggtgaatactacttactagcaagctatatccgctattatttctaaacaagaaataattattgttctcattagtaacccgttttttttttttttttttttttttttgagagagagagtcttgctctgttgcccaggctggagtgcagtggcatgatctcggctcactgcaacctctacctcccaggttcaagcggttctcctgcctcagtctcctgagtagctgagattacaggtatgtgccaccacacctggctgtttgtttgttttgttttgtttttagtagagatggggtttcaccatgttggccaggctagtctcgaactcctgacctcaggttgtccacctgccttggcttcccgaagtgctgggattacaggcacgagccactgtgcccggcctccagctgaatctttatagaagacttttatttgtttaaacacagggagacttaaagattaaaacggattaaaagagactaagacattgtaaaagactgatgaggcatattgcattggttaatgtgaggcatgaaccttgattaaatcctggacactacaatattaattctggggacaactggaattaggtggaatgtgacatgaactatatattagatattatgaaattaactttcttagaatgtcttcgttcttagaagatacaggctgaagtactytgggataagatataatgatgtctgcaacttactttcatatggtttagcaagcaaacacacacacacactttcactcatagatttaaagcaaatatggcaaaatcttaataattcgttcagcaaggttaaagatatacaagagtttattgcatttccctcccgatttctctgtagagttgaaattttcaatacaaaaagttgaagaaaaaccagcaaaaccaaaaagttgaggaaggagggtatatggattggaaaaccacagctcctcactctaatgctatcctgttaatttcctcagtgcttcatttgcttcttgtggacatattctggctgcataccagtgataatactggtaaactcattctgtgagcacaaaggttacaggaaacatagtaagtttctagtggacaattcaggaactagacaagacgttaaataaaatgtcttggcttctactcacacgaatgaaacattagtaagcatcaccactgagaattacctggtgactctgggtcatggggcctgctcacagcgtttcacatggcttatacttcctaaattctcctcgctacaaattgccacttgggccataagcactgtccttgggcaatctaaggaataagaggttatccccattttacagactagacatcttgtctgtatcaatgagcatgtggtctcaaatgaatgagacataaacagagcctccattctctacttttaaacttaattgtaccaaaaacatacctaagacttaaaggctacacatctgggccttcacagcatccgtttaattatttcaggttggaggtctggtttgtcaaactactgaactgcaggcagtggaacaaacactgtgtaagtgatggaagagttggattctaggccttgttctaccattaacatcctctgtgagccctattttctaattccataagacaaggcaaatgaccatgatcctatcaacttcataaatatgaagggaattaaatacaatgatgtttagaaaataaattttaaagaattaaaaagaatcttatgaataacaaattactgacattttaaacaatattatctttatgtttttcttttttttttttttggagatggaatctcgctctgttgcccaggctgcagtgcagtggcgtgatcttggctcactgcaacctctacctcccgagttcaagcgattctcctgcctcagcctcccgagtagctgggactacaggtatgcaccaccacatctggctaatttttgtattttttagtagaaatggggtttcaccatattggccaggctggtcttgaactcctgaccccaagtgatctggctggtattttttttctattaaatttttagtataactttatggccgggtgcagtggctcacgcctgtaatcccagcattttgggaggccgaggtgggcggatcacgaggtcaggagattaagaccatcctgactaacacggtgaaactccgtctctactaaaaatacaaaaaattagccgggcatggtggcacacgtctgtagtcccagctactcgggaggctgaggcaggagaatggtgtgaacctgggaggcgtagcttgcagtgagcagagatcatgccactgcactccagcctgggtgacagagcgagacttcgtctcaaaaaataaataaataaataaataaatttttagtataatgtcattataaaagataataaaaaataagcttcattataaaaagctttatttgcggccaggcacggtggctcgtgcctgtaatcctagcactttgggaggccgagacaggtggattgcctgagctcagcagttcgagaccagcctggacaacatggtgaaaccccgtctctattaaaatacaaaaaatcagctgggcgtggtggcgggcgcctgtaatcccagctactcaggaggctgaggcacaagaattgcttgaacctgggaggcggacgttgtagtgagccaagatcatgccactgcaccccagcctggacaacaatgcgaaactctgtctcaaaaaaaaaaaaaaaaaagatttgcatacttcaaatagacatttattttgctttaatcactattaaaattaatcgctcattactctggctataccaaacaagaccaattaatatcttaaagcattactcatgagaaagactaagatgaaggactgttttgacgttcagacctggtaatatcccttttaggagtctcaataatttgggttattagtttcatttctcaaaatgtcactgtgaggagaaatcagagctgtgtaccaaaggaaacagtacttcaactcatgtgtcattctaagtcttatgtccttacttggtcctgaacatttctaaaagctccctaaacattttaattcagacaactttagaggaatctttttgaaagggaaaatatattatcttcttgcatttaggccttccacacataaaagatctgtggaaatactggaaggatgagaaccatgggggtctgcccattaaatatgttggaacaggagccttcatgtgccttatcagagcaaacttttcttgtcttagattctgcactccctcccagggtcatggtgtctgcaagtcacccaggttaggccaaacatgattttactacattacctctggcaagtgagacaactcagaaatatgtggacatctgttgtgttaggaaagtattgttaatctggtttgcaaaaggtatgctaaaaacagtgtcagcccaaagaggccaaagtaatgaggagcagcagagctgaacatagtattaggtaaatggtgtaactgcctgtcctctatctaagtgccaaggaagctggtaaaacttagtttatagggagtagaggaagttgcatgtttcaaaagagttgccaaagacacctcagttggatccatttctaaaggacactttacgaggccaggcacggtggctcacatctgtaatcccaggactttgcgaggccaaggcaggtggatcacttgaggtcaggagtttgagaccagcctggatgacatggcaaaaacccatctctactaaatatccaaaaattagctgggtgtggtggcacgtgcctgtaatcccagctgctctagaggctgacaggagaatggcttgaacccgggaaacagcagttgcagtaagccaagatcgcgctactgcactccagcctggatgacagagccagactccatctcgaaaaaaaaaaaaaaaaagagagaaaaagaaatatgcttattttgtaattataaaaagacaaggataaaccataatgttaaaaaggaaaataccaaagagctgctcttgcagctctgttttgaacaagctgctctcttctattggtgtacagatcccaggatctcctaactttattattatattagggattccctttgtttctttcctgtgctggatctctggtttcctggatcccagatattcctttctttttattttttttgagatagagtcttgttgtgtcgcccaggctggagtgcaggggcgcaatctcagctcactgcaacttctgcctcccgagtttaagtgattctcctgcctcagcctcccaagtagctgggactacaggtacccaccaccacgcccagctaattttttaaaattactttttagtagagatggagtttcaccatagtggccaggctggtcttgaactcctgaccttgtgatctgctcacctcggcctcccaaagtgctgggattacaggcatgagctattgcacacagctgctactctcttgttctattaattctgataacacacatcctcatgtggcttcacaagaaagtgtgcctgagaaataaaattgagttttttgttttgttttgttttgttttgttttaaagagacagggtcttgctctgtcacccaggctgaaatgcagtggtacgatcatggctcactgcagcctcaaactcctgggctcaagcgatcctcccgcctaagccttcctggcagccaggactataggcacatagcaccacacctagccaatttttctgttttgtgtagagacaatatcttgctatattgccaggatggtcaagaactcctggcctcaagtgatcctcctgcctaggcttctcaaaatgctggaattatcggtgttagccactgtgcctggctcctaagagcaatgatttttttctctttttttttgagacggaatctcagtccatcacccaggctggagtgcaatggcgtgatctcggctcactgcaacctctgcctcccaggttcaagcgttctcctgcctcagcctcctgagtagctggaactataggcatgcgccaccatgcccagctaatttttgtatttttagtagagacggggtttcaccatgttggccaggatggtctcaatcacttgaccttgtgatctgcccaccttgggctcccaaagtgctgggattataggtgcgagccaccacgcctggccatcctagctaattttttaactttctgtagagatgagctctccctttgttgctcagtcttgtccaatccatcatggtttttttkgggggggatggagcctcattctgtcacccaggctagagtatgcagtggcatgatctcggctcactgcaacttctgcctcccagattcaggcaatcctcccacctcagcctcctgagtagctaggattacaggtatgcgccaccgggcctggctaatttttttttttttgtatttatagtacagatggggtttcaccatgttggccaggctagtcttgaactcctgacttcaagtgatccacctgctttggcctcccaaagtgctgtgattacaggagctaccacgcccagcctcaatccatcattttaacctatatgatcctatgtggttttctatagggccaaaactgtctttcaagctgtgattaagatctttccatgaatcactccttgtaacagcatatcctagatgatcaaggctaccaagatgcatttctacatgtacaaacctgtctgcacctttataagaatttatgtttgacagctctgagttcactgtgtgtcccaactgatggtgtcacttaccagtatgagaacaatattgaggctaagattattaaaaacattcacatgtaagacaagttaagagataccagatgttctagtactaaacagaaaaaagagattcagaatagcccaaatgaaatcagaaataattttcttaagatcacattgattccagggagaaaaaaggaaacagcccaacttcctgggtacccactcagaaacagatgacttatacaaattaacattctcagcttatgcgttaaggcacatatcatggaatgagcaacatatgcagtcctttagtcctctattcaaaaaatacttgtaagtttcaggtctttacaattcacagacttgacactaacacaatcctaccttgatgttatttttatggtttatcatgaatgcatcaaggtggtaggactaggttaaccagaaatcagtatcagaaatcatatagatgtttcttagtcaatgacaacaggaagtaatcattttaacaagcgactcttacccaagtccacctagacagaaaatctacagagatattcaattagcccttcctgtaagcttcctttctaaggctgccgaaggttcagaagcaagccaacattccaccagccaagctggaaaggccaggaaaaggcaataaaggcagtaaatacctgcactgatcccccatggcggtctgcagccaagtgagacgttaggtatgaggtattggtctgccggctgggctgaatttcccactctcctcggcgctctgatgatacattctgcttaggcgttagaaagcatgagagcaagatatggaaggaaaggtgaagcaacagcaagcaataacaaaatcaagtacattcgtgtccctgtaggtttttctttcggttttggattttaaactaacaaccactggaaagcagtgaggaaaagtaagcttgtctacattcattttagccttaatgagtcaatacatgaatctatatcacaccctccttacccagaaccagaaaaccaataacgaccaaaagaggagggagggggaaaaaacacacagtcaaagctgggatcatcttttagtttccatagaggtaaaatttcagtagccactaagcagatcaaactcagaatgttaagattgttcggagtggtggcatacgcctataatctcagcactttgggaggccaaggtgggcggatcacgaggtctggagttcgagaccagcctgaccaacatggtgaaagcctgtctctactaaaattacaaaaatgagctgggcatggtggcgcacacctgtgatcccagctactcgggaggctgaagcaggagaattgcttaaacccaggaggtggaggttgcagtgagccaagatcgcgccactgcactccagcctgcgcgacagagcaagactccatctcgaaaaaataataataataataacaaaaaaaatagctacatcgtttgcctggttcttctagctaacagcgtctagactgaattagaaaaagtttacttattaatatgatactatgaattattttcttctggaaagcaaaaggagggtcgaccttcaactaaaaacctctttggattctgctttcaccttagtatcattcaggctctccttctttacctgctttttacatctgctactattctgatcttgctcatatgtgacttttgtccagaagaatctgtttaggtgcctcttcccctgtgccagatggctgagttgttaacatcataatgctcagctgtaacagtcctaaggctctacaaaaatgaaaaatgagtagttggagaggcagcaatgagggattagtaaatcaaattttaattgctgctgatataaacagytgcaggggttaggatgtgatattgctgctctgcatgaaaaccagaaaggactataaatcttacaaatgttcacagctataaaagttgtattctataaaaaacgaagggcaaggaagtaatggtttgagggtctatattcactccccatatttcagtatctcattgacaagagttgcttaaagctcacccgtaagtcaccaaaaaggcatttctcgtaaaaatcagagctttgtacaccagctacaatttactttttttttttttttttttttgagacggagtctcgctctgtcgcccaggctggagtgcagtggcgcattctcggctcactgcaagctccgcctcccaggttcacgccactcttctgcctcagcctcctgagtagttgggactacaggcgcgcagcaccatgcccggctaattttttttgtattttcagtagagacagggtttcaccgtgttagccaggatggtctcgatctcctgacctcgtgatccgcctgcctcagcctcccaaagtgctgggattacaggcgtgagccaccacgcctggccaatttactcctttttattaatggaatacgaagtcatatggacaagagtattataaaggatcctgttcatattttctctgctcttcctcagagaataaacatattctatgagaaggcagctgtatggacttgctctattaccttataaatgaggggtttgattttatgctgctagttatgttagagagaatcaaagctacccaaaatattcccctactacaattatttctgccaaaagaggttcaaatgtttcattttccaaaataagactggtgtacaacataatcataaacttatttttatttttttggttgagatagagtttcactcttgttgcccaggctaaagtgcaatggcgcgatctccgctcaccacaacctccgcctctcaggttcaagcgattctcctgcctcagcctcccaagtagctgggattacaggcatgtgccaccatgcctggctaattttgtatttttggtagagacagggtttctccaggttggtcaggctggtcttgaactcccgacctcaggtgatccacccgcctcggcctcccaaagtgctggaattacaggcgtgagccaccgtgccggccatattttataaacttactgacattgtctatatcctcagagcacttagtctcatttattctgactgctggagatctgagaataaacctattcttgtaatattagaagtaatatctataactaaacctatcagtgatagactttttcagttctctagaactttttattttttgtaatattgaaatataatatttaagctcttaaactattatacagtactgtcaggtttctaaaaacttaagtgcttaaaaaaatccagacaatggtaagccatttaatgttgagttctataatacatactaaatgcaattacatctcatgaatgctctctgtttttgcatttgtttttttgttttgttttgtgtttttgagatggagtcttgctctgtcacccaggctggagtgcagtggcacgatctcggctcactgcaagctccgcctcccgagttcacgtcattctcctgcctcagcctcccgagtagctgggactacggacrcgcgccaccaggttgctaatttttttatatttttagtagagacgcggtttccctgtgttagctaggatggtctcgatttcctgacctcatgatctgcccgcctcggcctcccaaagtgctaagattataggtgtgagccacggcacccagcctgcatttgtttttgaggcagataaaatagaaaatggctggaaatgtatgttcatgtatactcatgggcttttaaagttaagaaaaccctggacagctgatcaacaattatttccatttttactgactacacataagaactctggttttatgctattgtctgattcacagggctatgtggttctttatattcattctagttcaataaataatttgttgaaagatttaagatttttgtttaaatgaaaataccaagacatttttcaaaggcctaaaaatcacattccatctccattctcaaagcaatatgytatttatcttttaaagataaatagaaaactaatgttaacactctagattgcttcataaatgcttccactatgatgaaggaaaaacacactataccatactactgcccgccaatgccttctgtatctgttgaaaacatcaaaactaagtacagatgtgaacctaggggttgcgggtttattactttggaagcaagttttcggtaagatgttaaattctagggctactgttttctggaatttaagagcttggaccggtatctagaggataacatagtagaaagggccatttgcagttttagaaagcaacagaatgcctaggaaatagatgaaaccaaagaaagctgacaactacagcagtctgctagtgtaactctccaagaaaggtattctaggcaatactgtgtacacaggagttatgattaggcctcatcagcacagtagctagttagattaagcaaactagtggaagagatcagcatgtaaatccttcattcttaaagatcactcatgcatacacatctaattaaatgtcactcaagaggtgcatgagtagaaaagtcattcagcaaagtcaatttctctgcattacttgaaaagcagagctccacatggagtgtgtaagtcccccaaagcaggagcaggaatctcaagtagtggtaactccttgggggaacgctttaaaattttcagtcgtgattgcatcaccttcatggaaatgattggtttactatgtagtaggtaaatcttgaaacaagaaagtagcaatccagcatagcataaatgaaaggtaaaggtaacaaaaatacttgagaaaacacagaagactgttgaaaaagtgaaaacccccacctatgccctatggcaggggaaaaaaatctctcccagcattcatttggcagggattaatgtaagagtgacactaacaaagtgccataatcccagcactttgggaggctgaggggggcggatcacctaaggtcaggaattcaagaccagcctcgccaacatggtgagaccctgtctctactaaaaatgcaaaaattagccgggagtggtggcatatgcctatagtcccagctacttgggaggctgagaacccaggaggcagaggttgcagtgagctgagattgtgccaccacactccaccctgagtgacagagtgagatctgcctaaaaaaaaaaaaaaaaaaaaaaaaaaaaaaaaatcaccaaatcctattcttcataaaaaactcattttaaaaaattatttttgattacatatacaaacaactttatctacttcactttatggctcaaaaaataccttaaaagctgccatttataaagaaacattttggcctctcatgtaagtcttctcagcctcattaactgtcttcaactataaactaacaagaatgagactgaatagtaccaaaaggttagcaaagagaatatactggattacattctggttttatcacacttccaatattaaaatttcttttttttcttttatgatatggtgggggtaagacggaagaagaaaagaatggaacaggagccagctgtggtggctcacgcctgtaatcccagcactttaggaggccgaggtgggtggatcacaaggtcagaagattgagaccatcctggccaacacggtgaaaccccgtctctactaaaaatacaaaaaaaattagccaggcatggtggtgcacacctgtagtcccagctactcgggaggctgaggcaggagaattgcttgaacctgggaggcggaggttgcatgagccgagatcgcgccactgcactccagcctgggcaacagagtgagactctgtctcaaaaaaaaaaaaaaaaagtatatacttgaacaaaactaaaaacttccttctattaagctcatgaaacataaccagttttcccatgccagacaggggttatgccatgtaatctgtcatttgtgcagagatatcctgtattctataaaccttatcaaataggagggaagtttaaaaatcactgacaacaacctgaaaaggggattattcccaggctcaacactatccagagacgagagtatcaattctgtgacgcttttagaaaaatcacggaaaccaccctagaagtctgcaattctctattcaaactctgccctatccttacaatggtgtaagatacctccctaggaaatgttggtttatctagataggattacttcagaatcaccaagtttcctcctacaaggagctgggttagaacacaggtgtctgctgaaatacaaaacacttaacacatacagaaagaaaaaaacttttaatatggaatacagaattaagagaagaggtgagccgcagtgactaggtgatagaacagaagacgctaaggaatctattttcagttttgcacttgcttgtttcaaagctcctctcagagtaaaggtcccagaaatgaggaggggcagacgtctcctgcactgagctctatgtggagctgtggccatcctgtggccaggaggagtgtgcaatctctgtctgtgctcctactggatggcaggcagcatgttaggaaactgcacgcaggtcacaaggaggcagattatctctgcgcaaacttagccccttcaactagcaaaccctgagcctcggtcagaactaaacagtactctgtaaaaagacagaaacarataactatatcagctttttttttttttaaggtattcattttatgaagataactgactaccttgcctatttagcaatgtggcctaatgtttcctttagaaaaattatgctcataacaagctgtagtcactaagcataacagcacaaagccacaatatatttttctttttctcttcttttcttttcttttctttttttttttttttttgagacagagttttgctcttattgcccaggctggagtgcagtggtgcgatctcggctcactgcaaactctgactcctgggtcaagcgattctcctacctcagcctcccaagtagctgggattacaggcatgagccaccatgcccagctaattttgtatttttagtagagacagggtttcaccatgttggtcaggccggttttgaactcctggcctcaggtgatccaccgccttagcttcccaaagtgcaggtgtgagccaccgaccccagccagccacaatatatttttctaaggctttatgtcctttaaatgtattcccttacagtctagatacaaacaaatccaaaacactcttttactggaggcatatcttcttcagacctcacatgatttgactcttaaattctgcgtttatttttccgtgtattataaggtattgagttagtttaaatatggttcttttggaaggatgagagattacctttactgatctttgattcatattttcctagtcaaattggagaatttgcaagggaacagtccacctagtacaaaattacaaagaataaattctttcccttaaacatatgctacgcatctcttttcacatggcgaatgaaaacaaaacaaaacaaaacacctatgctacacatacaaaaacacaaaaaagagtaagtgacattttggggtaggataccatgtctgttaccatttaaaagcttttaatagtcaatatgactctctccactgtcaaaatgggatctgttcctctaacctgctagttactaagtagcccttctttttcacatacccacaacaaaacccaccataataaaagaggtcagccagagaaaaaggagacgctatcataactcctgaaccattgcggtgtaatgtttatgtagcatttacgtaaggattgtcacaagcttggatttaaagtactgaaagggcaggaagagtgctgctgcatgcacatagtagtcaatgcaacagtctacatttactgtgttgaacaagcacactgaataaaacctatgacagtacaatatgttgtactctaatatcagatctgtggataccggcaggacttacttcctgattgaatttgatcagataatgcaaaggacgttttgccaggtagaagcaagcaggcagaactattaaggttttcatcccctttctgccggattgtaatacgcagttctttagagaggaatcagacccatggcaagatttacaacttttggtactgggaaaggacaaacacgaagtataaaatgatggaaagactaactcaactgggatctttctgaatggatctagcttttaggaacgtttattctatccaaattcatagtttaattatagttctctagttaggtaaaatttatgttcaaaaaaattgtgcttggccaggcatggtagctcacacttgtaatccccgttacttgggaggctgaggcagaaggatcacttgagcccaggagtttgagaccaggaggccctgtctctacaaaaaataaataaacattagtcaggtgtggtggctcacgcccatagtcccagctgtttgggaggctggggtgggaggattgcttgagcccaggaggtcaaggttgctgtgagctgtgatcacgccactacactctatcctgagaggtggagtgagatcccatctctattaaaaaaaaagaagtgcttggaataaagatagttttaaaaggcagatccaatatatgtgagtttaaatgcagtcctttaggaaccatatttgggatttattattgtatatagataaaccaaacagtactcaattcaatatacctaaaatctaaacaagcaaagcaaaattttcccagaatacaaggaaaataggattcttgttgtgatggaaaagaactaataagatcacctgaacttttttttttttttgagacgggtttcacttttgtcccccaggctggagtgcaatggcacgatctcggctcaccacaaactctgcctcccgggttcaagtgattcttctgccttagcctcccaagtagctgggattacaggcgggcaccaccatgccgggctaattttgtattttttagtagagatggggtttctccatgttggtcaggctggtctcgaactctcgacctcaggtgatccgcccgcctcggcctcccaaagtgttgagattacaggcgggagccaccatgcccagcaatcacctgaactttctttgctgcaaaagactgctctgtgtgtgttttttttttttaaacacccctccccttgagcagacaatccagccctactctagctgccaaacagaggcaaaatggctctttgtggaaacaaaaacgagtaggaagaaaagcttaaaatttatttttcaataaaggttaaataaaaatctatgctataaaaaaatatctatttacatctgcacccttcatttggcagattcattcattcactcattcattcaaacaagtatgcatcaagtgcccactattctaaacattggtttgggtgttagggttaattaaagcagtgaacaaaacaacaaaaacctctgctcttacaaggctccaatttgagaatgctgacaccctaaataggttaaatgtcctatggccaaagttttgggataagataaaaccaaggtctgagctcttctttctccttctactgtaagtatgagactaaacagtttgttgagccctaggctcagatttcccagaataaggagactctttaggcattatcatcaatgtcatctctatgccttgactcccaaatatctctctagttgtctctggagaaccatcctctgcctgctagacctcttcaggtggaatacattgctagtatttcaaactcaagatgcctaaattcaaattccaaacaagttcctcccccaactttgccatctctagtaatagtaccacatgcctcctaattatccaggctcaagatctctgcaacagctttgactcttccttctcccttaatcctgacattcatgtgggctgccaattctggtagattatatcactgtagcattgttcaattctgtttcatttgccctactataacccatctagactccctctacatctcaagggaattcactgcctgcttaatgatttccatgtttgctgccagactagtaccacattctgtgccaaaagatttcaaaagcagagttttaatcatatcactcctttgcttaaaaatctttagtccctattcctacttaaaataagcaccaactcgccagcccagcattccaggagcttcaccaaatggtttcaacctactttcctagccttgtctcctaggactcctttactcgcatcatatattttagaaaactgaactagataaaacatttgttgttgatcatatattcttctgcttggaatgcctcttccatctcatttaattctgctaaaagcatgtcaaatgcagcttctctcatcaaattatttgtcttgctcagactagatgaaatttcttcttccaaacccagatgataataatttgcaacttgggatgcttatctgttctgccttgtgttatagttatctgtccatttggcttatctacttgtcagctctttgaggacaaggactccctacttggtatccacaggatatacttttttttttttttttttttttttgaaacaaagtctctgctgccccggctggagtgcagtggcacagtctcatgtgcactggctcactgcacaacctccgcctcccaggttcaagcaattctcctgcctcagcctcccaagtaactgagattacaggcgcccaccaccacacccagctaatttttgtatttttagtagagatggggtttcaccatgttggccaggctggtctcgaactcctggcctcaagttatccacccgcctcagccttccaaagtgctgggattacacgtgtgagccaccttccctggcccacaggatacagtttcacatagcaggtcctcagctcagatttactgagtcaaagttgctgatgaaaggttagctgttcctaaagtcaatacctgtcaatctcgctcaaggagaaactgtatttttcttttgctaatttcaaaacttgaaaggaattagtctagaaaatcatcttgttttcaattcttagagtaataagagagagatttggctgcaaattttcttaaaaaaaaaaaaagggcataagaaaacaatcctaaagatagaagaaatgtaatattaacatagaccaaaggttgaacagacactagaaatccattacccagagtgcatagtgcagaaagaattttacccagcaaggattcagaatcctggtgggaaggcgttataacatttacatcaacgtgaaggaattccaatctcttagcagccacaggatactaaaaactctaaaattaaaaaaatagggccaggcatagtggctcccagcattttgggaggcagaggtgggcagattgcttgaacccaggaatttgagaacagcctgagaaacacagtgaaactgtctctacagaaaatacgaaaaaaaaaaaaaaattagctgggcgtggtggcgtgtgcctgtagtcccagctactcaggaggctaaggtggaaggatcactttagcccaggaagttgaggctgcagtgagctgtgattgtgccactgtgctccagcctgggcaacagagtgaaatcttttctcaaaaaaaaaaaaaaaaaaaaaagaaaaagaaaagaaaaagagaaaaaaatatatatcaaagagagatattcaagattcaacttttcaaaaataagcatagtagttaaatacagatgagattttcctaaataattatatactgtggtcagagacttttcatttaaaagtacattgaaattcactactcagtttttaccctgacaaccgaagttttcaatcatctcttttcctcatactttaaaaatccatgcaaaaccacagcattggttataaattcactgaagcaggaaagtaaaggaaacacatattttaagatagtctaggacgggcgcggtggctcatgcctgtaatcccagcattttgggaggccgaggcgggcggattgcctgagctcaggagttcgcaaccagcctgggagacagtgaaaccctgtctctactaaaatacaaaacattatgcaggtgtggtggcgtgcgcctgcagtcccagctactcgggaggctgaggcaggagagttgctcgaacccgggaggtggaggttgcagtgacgcgagatcgygccactgcacaccaccctgggcgacagagcaagactccatctcaaaataaataaataaataaaattttaaaaaaaattctatcacattctaagagaatggaggtaaaaaagaattttaaaaaataaaaaatattctaaaaaataggcacaaggtgccgggcatggtggttcatgcctgtaattgcagcactttgtgaggctgaggcaggtggatcacctgaggttaggagttccagactagcctggccaacatggtgaaaccccatctccactaaacatacaaaaattagcccggtgtggtggcaggcacctgtaatcccagcttctcaggaagctgaggcagaagaatcgcttgaactcaggaggcggaggttgcagtgagccaagatcatgctccagccttggtgataagagctaaactctgtctcaaaaaaaaaaagagacacaaggatatatgttgactgtgatatgacactacttatctattttttctttacatacattttctacttaaatgcatttttgttttttgagatggagtttctctcttgttgcccaggctggagtgcagtggtgcccaggctggggtgtaatggtaccatctcgtctcactgcaacctccacctcccaggttcaagtgactctcctgcctcagcctcctgagtagccgggatttgaggcatgtgccaccacacccagctaatttttatatttttagtagagacagggtttcaccatgttggccaggctggtctcgaactcctgacctcaggtgatcgacccgcctcggcctcccaaagtgctgggattacaggcgtgagccactgcgcctggccgcattatagagtaataaaacttcatttaaaatattttagaatatattactacacttccaaccctatttctgttaataattttgatctccttccattgattctgcttatttccccatcccgtccagctcactttactataacccagtttattcaataaaggatgtgaagtagatttataaccatgcctttataggtggataggcagatcatttctatatctctgctaccaatgacaatgcaacagttttatgcacataacctatactttgagtggttttattgattgatttcaagaagtaaggtatttcatcagagaagaaaataacttgatcaaattgctttctagccaggcacagtggctcacgcctgtaatcccagtactttgggaggccgaggcaggtggatgacctgaagtcaggagttcgagaccagcctggccaacatggcgaaacctcatctctaataaaaatacaaaaattagccaggtatggtggtatgtgcctgtaatcccagctacttgggaggctgagacaggagaattgcttgaatctgggagacagaggttgaggtaatctgagattgcaccactgcactctagcctgggtgacagagcaagacactgtctcaaaaaaaaaaaaaaaaaaagaaagaaaaagaaaagaaaaaagaaattgctttctagagaatttgtacaattcgtaaaatcaacagcaatatgtcagtttaactgtgccctcacctgcactagctattagcttttaaaaagggagggatgggagagaactgcagaagtcaacagtcttttgttgtcaaaccagaagtcagtcaaattataaatcttaaacaacgactttaaaggatgtgactatggacccaattagtgcccagagtttgcttaaccctttcttttttgcccacctattttctcgtttatatgtactctctagtaaatggctttcctccttttacatacttttttcttacccaccaaaccacatattttgccaagagtatatacttactggtgagaaaatatatttgtgggtgtactccattggacatgtgtgtgtgtgtgtgtgtgtgtgtgtgtgtgtgtgtgtgtgtttatatactattcttaacctatatacttgcacatgtgcatctatgaaataaatgtttttgtattttcttgtaaaaatgttaatacaagaaagtgaaatcataaggagaggaaataagctaatttgatatgtgataattattttaaaaatatgtaatctgtttattatgctttgcttatttacctactgtggtctctgtttttctcttagcaatatatttaatataaagataaaaatcctatgtcatatttacttcccaaatacataagccctttttaaaaatgtcaaacttgttgattttttggtgtgtgtttgccttatctgtctttaggctgagagatgtccctcactgagaccactagttttccaaacaacgaacaatgaaggacagatgacatcgcctaagctgagtcttcactgcaggtccatctcaaatcttgaccagctctataatttgcccgggtagaagaacaaggggtggtgtggaggttccatttcatgcccaagtcagttggaagtccaaagtacctaccattcttaaccagcaaggaaaaaccagaactggcaagagctctagaccagactacagatgagacccaaagtgggctacctggtacatcctgtctgtgcgacaggtctttttttttttaaactgctccttggcgagtagggctactccacaggcactgtgcccagagtagcctccaacaggtcttttggtcctatggtagatgcctctgatcctaacttatagctagttccccccaacagccaacagactctgacaggcccacacacttttttttttttttttttaagacagggtctcactctatcactcaggctggagtgcaaatgcggaagcaatcttggctctctgctgccttgacttcccgggctcaggtgattctcccacctcagcctccaaagtagctgggactataggcacgtgccaccatgcccaactaattttttgtattttatgtagagacagggtttcaccatcttgcccaggctggtcttgaactcctggctcaagtgatctacctgccttggcctcccaaagtgcttggattacaggcatgagccactgcacttggccaggctgactctttagactggatgcttcatatagggcacctggccacatctcagtgcaactatacatgccctgagggttgcttgaaagtcataccacacctgtaagaaatggcaagcatttgatctttattttcagtacatacactaaagcggagaagctgaagaatttgggttttaatattagccaagaagaagggtagtgtctgaaagaatggaggatcaacacatacctgatttcgaagaggctgctgttgtgatggccgatccctatgtgtgtggctttctcgagttattgcagatgcaccagaatctacgtgaactgaccctactggagtaggctagaaaaatgaaacaaaaagtcaaatgggggaaacaggtccaacttgatgcatatgcaaaggacagaatgattctaattctaatagagtagtagtaattattttcagctaccaagagcactttcaagttgtcttgtcttctcagtttgctcatctgcaaaagggaggcagcctggtccttaatagttcattggagagtagcttaccttcgaaaacaaaaaaccagggccgggcgcggtggctcgtgcctgtaatctcagcactttgggaggccgaggtgagtggatcacctgaggtcaggagttcgagaccagactgagcaacatggagaaatcccatctctactaaaaatacaaaattagtcaggtgtggcagcgcgtgcctgtgatcccagctactcgggatgctgaggcaggagaatcgcttgaacctgggaggcggaggttgcggtgagctgagttcacaccattgcactccagcctgggcaacaagagtgaaactccgtaaaaaaaaaaaaaaaaaaaaaaaaaatttcctccactgatatctgtttggccctgtgaacccctgaccagaacaacaaattcaaaagcttcctatgatgctgggttccactgctacaaaggtcaagtacattaacagcgtatgtggcatcaacttctgaatcatggggccaggtgtggtggctcacgcctgtaatcccagcactttcggaggccaaggagggcagatcacctcaggtcaggagtttgagatcagcctggccaacatggcaaaaccccgtctctgctaaaaatataaaaattagccgggcgtggtggtgtgtgcctacaatcctagctacttgggaggctgaggcaggagaatcgcttgaactcaggaggcggaggttgcagtgagccgagattggcgccattgcactccagcctgggaaaacaaacaaacaaacaaacaaacttctgaatcattcaaatgaaacttctcctaaaaactgggcttaaattctgttatcttaggacacacaagttattatcttcctatattactaggaaaaaatacttcctacttctgaactagtaagagcaacctatggcaacacccagacaaggctagtaaatatacagtctacgatcaaaggaatatttttaccaaagattcaagcagaaagactggcaagtaaaggcatgaggcagtgctggttggagaaaggaggtaatgaggttaaaaaaaaaaaaaaaaaaggatacttacaataggtctcccaacccaatcataggcatagtcaaaggtgtagcctttcttttcaaagaggtctgtgaagagggtccgtaaatactcataatcaggtttttcaaagaagtccagtcgcctgacatatcgaaggtaggttgccatctcctctgttaggaaagagatgaaaggccctgctcattagctgaatgctttccatagcagttgtggggaagcattgggccacaaaggggttatttatacrgacaatttgacactgatgttttctttactgacaaaataaaagygataaaacctactttggtctgtatcacaaaaggaaatgttaattacctaaacagcacccctatctagagatacccagtcatggactctacctagtttcaaagctcagtcacmctggaatgtctttttagcatcccacctggaaagttctcacagagagcttcaatgggagtattccttttggtgtcaccaattttttgatatctctcttttaatgtgtcagcctgtagagagtaaagagagaaagttactttaaaagagggcctaaacatgggagattcartatgtttttggacacaatggttgtttcactcaaattcgcagtatttgttggtcttgattttttttctaacactaacaaataagaaatgtagtagaaattatatatttagatatatacaaacatctgctgtgttctggaaaattttacttgtgaaaatatttagttgtctcagataaacaccatcaaatataatggatgagtggctaggataagaaaataacaatattatgtggccaatattttcaaaattgcagaagcttagtaatatcccatggccaccataattcaatatgattcagcattctctcttagatcagctctaaaagtactgctaatccaggtgggggaaacagataagtaattctactacacatatattgagactttgaacagaaaaaaaacaataactgaaaaatgtctttcaacaatgtgcttccagagggaaaaaagttgtctatggtacagccatggctaacaggtttggtgtatgtcagtaactcaaaagcagcccaagtctggtatgctcagagctatagccagagggcttctgaaccctggatcaacagtgggctcctagggaattcttgtcaggctttacctagcttgctgcactcagacttaagcaatagtgttctgaagtaaataggagaaattttagatctacaactaccactaaaatgatttatggacaacgagagagtttcaagcaattaataatacactaatgcattgtgtggctgtatgatgaccaagtttgacatgaaactctatttgaaagctataaaaatcaatgagaagatgtatatgacaggagaggaatttaagagtgaagaaataaaatctcaaagggaatgggtggaagtcttacgttttaggacaatagtctagaaagcctacagcaaaatgaaccatcctgcctttctggaagagggggtgtaggagtaccccaaactactgattaagtttctttccatattaatatgttgaaataaattacaaccaaaaaatatgtcttgggccaggcgcgatggctcatgcctgtaatcctagcactctgggagacctagatgggtgatcacttgaggtcaggagctcgagaccagcctgaccaacatggtgaaaccccgtctctactaaaaatacaaaaaattggctgggtgcagtggctcacgcctgtaatcccagcactttgggaggccgaggcaggcggatcacaaggtcaggagtttgagaccagtctggccaatatggtgaaaccccgtctctactaaaaatacaaaaattagccgggtgtggtggcgtgtgcctgtagtcccagctactcaggaggctgaggcaggagaattgcttgaacccaggaggcggaggttgcagtgagccgagattgcaccactgcactccagcctgggcaacaaagcgagagtccgtctcaaaacaaaaaccaaaaaattagctgggcgtggtggcatgcacctgtaatcccagctattcaagaggctgaggtaggagaaccgctggaacctgggaggtggaggttgcagcgagcccagcctgggaaacagagtgaaactctgtctcaaaaaaaaaaaaaaaaaaaaaaaaaagtctcacaagatactaatgggacttacaatgggttagaagctcaccatttcctagccaaacagccaaaggcacagagtaatgataatgctcataattataatagtaaactgacatgtaaccactgtactgacacctacctaaggaaggctatttaaactctacacattttgcaatgaatagatattgtctgaataggcatttattcaataatacacttgaaaagcaatcttaaacctggattttcattttagttcaggtgagttcttarcctacataggataaacaaatattttccaagttttcctgaggagtacaccctgctggcctttctggtaaaatgtgtagcagctgttgtcaacaatttgttccagaaattcccttacatactgggaacactcctcctgctacataatggtagtggaggaggaataccaacacagagagaaaagcagcactgtcaagcctgggaggaaatgagggaaaagatcatggaaaatccaagaacaaggaaaaattaagaaacggaagacaaatgtgaacaaaacagtttccaaagcccaggagagcatttataatgtagactaatgtaattagtccctgcttcttatctccagagccaattagccaataatcctttttgtgtgttgttttaaaaaaatatttatttgtttatgtttaaatagagatggggtctcactatgttgctgatctcaaactcctggactcaagcaatcctcccacctcagcctcccaaagtgctgggattacaggcatgagccaccgcatctggccagccccctacacatttcttaaaaacatgaagccagaggctccttcattaacaactgagcattgaaacaaagccctccactgaacactttcaaggataccttgagtccttgccaggggaggctgcctcgaaggaaatacatgaacatatggcctagggcttccaaatcatctctccggctttgctctaaaagggaagacagatcacacattatgtttgcagttattaaagcagaaagaggttcaaaaccaagtaatcccttcagaaacccttcrgctctggaaaggctctgcttactaattacttgtatatttaaaccaaggatagtattttagatcaaaaccctaaaccgatgtgtacttcctttgcctagatctgttgatggtaagtaaatatcaagagaaaagagcaaattctgaattaaaaccaagcccaaatcactaaacagtgaatttccacccctcactcaatgctgtcaccttcctgaaagtgataaaattttaatgaaatgctatttccagtatatgggctacaattaccytttagttaccaccagagagtgagcagcagattaagcaacccaaactgttaaaacagtccattctggctaggcctgcaaagatacaagctgcaaaatgcctagcaaacatgccaagtgctttttattcatcataaaaattaacacttaaaattaagtttcatatcaatgaacatcagtacatactctcttggctcccattcaatttgtaccatgtcctataacctcaaaaacattttagaatttattactaaggtctcctcaaaattagatgggtaaggctacacacatctgtagtgccagctacttaagaggctgacgtgagaggatcgcttcggcccaggagttcgagataagcctgggcaacataatgagacctcatcccaaaacaaaataaaacaaaaaatcaaagtccctgcattctggaagcgtatctaaaacaagttgctgggtttttctctccttttaattgggaaggtgaagatgacaaagaactgcaaaatagttaacaaaaaactgcaacttcatctcagaaaacatcctacacattctttgattgttagaatctaagtagtacacaccttcgtttctttattcttttttacagacagagtccttgctctgtttcctaggcttgagtgcagtgttgtgatcatggctcactgcagcctcaaattcctgagcccaagggacccttctgcctcagctgagtagctaggaatataagtgtgtggaaccacactcggctaatttatttatttttattttttgtgaagatgggatgtcgctatgttgctcaagctggtctcaaactcctggcctcaagcaaatctaacatatcagcctcccaaactgctgggattacccatgtgagccattgcacccagtccatgcattcattttgaatttgccaattatggtttagtctcagatttcttttttcttttttttttttttttgagacaaggtctcgctctgttgcctaggctagagtacagtagcatgttcttggacactgcagcctcgccctcctgggctcaagtgatcctcccacctcagcttcctcactagctgggactacaggcatgcaccaccatccctggctactttttgtattttttatagttactgggttttgccatgtttcccaggctggtcttgaactcctgggccaatcaagcaatcaaccagccttggcctcccaaagtgctggcactacaggtgtgagccaccacacctggcccatctcagacattttatgtgtttatttttcagaatcaagtttagggctttatctgaataaactacagaagcaagactaagaggctaccttcaacttgattgtgctttctttgtacagaaagtaaaacccaagagagccagagaaagccactcagctaactcaaaatacagaagtgcaacatgtttaactattgccttaaattatagggaatttgcatgaaaaagaatagtagtctacagggtagatgaagaaagaaaaggcaactttttaaataatgatttgatggaggttgtaaaaagatggttactaatgggaaggagaggtaccctgacagagataaataacataaaactgagttggtatacaacaattgaaacaatcttaaaaagaatgaaaacagcatgaccatcagaatcctttgtctacatggcttgtctgaagtttgcaataaaatattcataattgaaaaaaaaagcagttatacaaaaacagtttgttgacacaacctaaggatgcacaaatgaaaaagagaaaagaacaaggagagttgagtggaggcctcccacaaagcagggcagatagagaaacgactctgcagtttctcatactgtatcacacctactcattgcctctccatttttatatccacttcctgtaacaagaagccccttggttattaaaaattcactggacaaatgtttgaattttaaacagttgagcactagagggcgaaaactctccacattttcaatattgatcaggcctacagaaaaaagatttcacagcaaaataaattatgagattaatatatttttaaaactcactggaataagtaataaagtaacttttcaaatcctgagaactatgaaaaagaactatagaatatgggacaataggaaaaataagggttcctaaatcaggaagggtacctaaataaggtacccaaaataagggtacctaaatcagctcaacgatttaggtatctagatcttggtttatcctttccactaatttaatccagtgaaattaagcatggtcaagtcacctactttgggtctcagtttcctcatctgaaaataaagtgttcaatctggggagaatttgaaaagtcattttccagctctaaaattctaaaataatctgataacttaagcctttagggcctttcaggaaaaaaataagagtgaaaaccagagcatgctttattttcatacgactttgaacactccacacttgtccaattcattatttctacatgccctcattttttcatgcagcatattttcattttcaaagaagaaaggtttccaataccagtgagaccagcaggacacaaaattcttcaattcttctgattggttgaaaggtgtgctttcatccaatcagaaagatgtgcttggtttacatgcataacatccctgattttaggttaaatatatttgttgaaggcagggagcaaggtaacccagtgttctcaccctaatttcaaccattaaataatataaattgggcttctcagtaaaagcttaatcagtgggaaggtggctactatggtctggatttctgtccttcccccggaccccccaacacacacaaacctcacgttgaaatttgatcccaatgttcgaagctgggccaaatggaaggtgtttgggtcatgggggtatatccctcattaactgattaacgacctcccttagggatgagttcccaagaaagcaggttggtgagaagagcctagcaccccccttcccatgtgatctgcacatgctggctgctccccttccccttacaccatgagtggaagcagcatgaggcccctgaggccctcaccagatgcagatgccagtgccatgcttcttgtacagcctgcagaaccctgagccaaatttaaaggtcttttctttataaaatgacccagcctcaggtattcctttatagcaacacaaaatggactaagtaagtgtggctactctgatgtggcaactaatgcaaggtttaggaggcttcttctcttgtcctcctcctctgtaaaattaagaagtgattttctcaaagccatttgaaaatacacatctcagtcatttcttctttgcaacacaaaaaaatgcaacacatttaaaaaccaatagcattagagttcctacaaaaacttctatcgtttgaggcatgggaaagagtttaaaaagcagtgacaactttctttatgtattctctgtaatgcagagagcacaaaatatgatgacaggttagatttgacctgaaaaactctggtactcagtaagccaagtctgggggtaaactcaaaagtcccggcaggaatggcagtacaccaagagatgaaacagactgatgcacagtagatgcttaaaacagattttgttgaataaataataatcgggataattacaatatggactgatattactattatcaggcattatgctaaacattttacatacattatctcatagaaccatatattacaggcataattatcatacccattttatacatgagataaccgaggctgagggaagaaggttattggatcaaaattacatagctattaagaaagagcgccaggatttgcatcctttttcttaaccactactctgtatcttatacaaacataacatgaacacccatcccttgtctgttcttgtctttcctcttaagaacaataaaattagtacacaaatggctgagcccaggaagtgggcattaaaacaacttctagagtttgtcagttaaaccacataatcttaagtttattatttaagatacagtttttgtttccttgtaaaatggaaaattacttgtcattgtgaaggaagaaggggatgctgagcactatgcaagagacctatgtcagacatggtgctttcacatatattatccattcaaccctcaaaatatccctgtgaagcattaccctcattttacagaggagtttcagtgagattaagtaacttgtccaaagtaacgctgatagtaagtaccagaggacctctagtctaattttaaagtattacatttacttaagtgaggatttccatgtggttactgaaaaaatcttgataacatcataatttcaaatcgaattgtatcatactactttgtaatgccattttttactcttcactatcacttgaattcctcaggtgaataacctgtgtagtttactcaatgagggaacttagtagatattacattagtctttaaaatacttattaatgtgcaggccaggcatggtggctcacatctataatcccagtgtgttgggaggctgaggcaacaggatctcttgaaaccaggagtttgagacccgcctggggaacacagtgagactctatctctataaaaaaatttagaagttagctgggcatgatggcatgcgcctgtaaccctagctactgaggctgagaaagatctctccagctcaggtgactgaggttatagtgagctatgatcacactgctgcactccagcctgagtgagagtgagattctgtctctaaaaataaaataaatatgctgggcacggtggctcacacctgtaatcccagcactttgggaggccgaggcaggcagatcacttaaggccaggagttcaagaccagcctggccaacatggtgaaatcccgtctctattaaaaggacaaaaattagccaggtgtggtgatgcatgcctgtaatcccagctactcgggaggctgaggcaggagaattgcttgaacccgcgaggcagaggttgcagtgagccgaaatcgtgccactgcactccagcctgggtgatagagcgagactacatctcaaaaaaataaataaaataaaatacatcttagtgtgcaatagttcactaatatttaagaatattttataattatttctgcctaggagtatggaatctgagaatattctgcttgtctactctctagaatgttgattttcaaacatgtttttttcaatcacctaggagtcttttcttcaaatagaatcttccatggaagcccaatatatgaaacataaaaaagggaggcttttttgaagtggataagcctagggctctgcctgcttggtctccccactgttccttaggcttctctgacaaatactctcccccttgggctagttcctcacaggtaaggtcttctgccttgattagagcatttaacaatatttgtgcaggttgtttatcctgagtaaattgcaagactaatggtaaaccaagtatattttcactgaataagacagaagctcttccttgaagacttctgtgcagaactatgtgcagtgaacagaagtctactccatttttagtgaggcactcttccccaccgctgacccagcctgatgtcctcttcaggactatcatatatagggtcatacataagtaaataccaaattcattactaaactcattaaaatgctatcctctttttacaataattcaagtactcacactgctcagaaactaaacatttggaaacagtgtaaagaattaagaacctatgcatagtctataggattctttgaaaagtcattaacttaccatctcaacttctcatgtataaaaatcactcaaccttgtgaaacaataaaaaccacaagttgtaatgcacaatggggatataatgttacagaaataataaactgttctaatgactcgcccctttcatggaacagaaaaaaacacacctttgccaagatgcgtgttgatagacatatatcttgcagttccagttaaacttttgtgttccctataaggtatgtgttttttggtttcggggtcaatgtattccttggccagtccaaagtctataatgtgtataacatgctctttcttattgccttgtcgaccaatcaggaagttctctggcttgacatctcggtaaatgaggttctttgagtgcacgtattccattcgagaaagctgaaagagaaacaaatgatagaaagactgtaaagaagtatatcaggaaaatacatcaaaacagtttctttagccagaccaaggttttaattattgaaataacagtaaaattcatctcctttcaccgccctgagtcacttcactgacttgtaaacaaaaaaatattttgctataaatacgtacacaacaaatatcaagactaggaaaaaaagtgggatagtacaggtctgctaaaatgatagctcaattttacctcataatgtcacaatttgcaaatgacaaatgaaatcagttgtttatatgctacgtcagaaaattaagcatttgagacaaaagaagtattcccaggtaggatatcaaactgttggtgacctttgagacaaatgccactgctacattcaccttctgcccacatcttcttatgcttatttggacaagactacccaacccagttttcgatgttgtgaggcccagagaagttaatactggcctgacatcacatagctaattagcagcagagacagggaaacagttcattattattattattatttttgagacggagtcttgctctgtcacccagggtggagtgcagcctcagcctcctgggttctagcaattctcgtgcctcagcctcccgggtagctgggattacatgcacatgccaccatgcctggctaatttttgtatttttagtagagacagggtttcaccatgttggccacactggtctcaaactcctgaccttgggtgatccgtcctcctcggcctcccaaaatgctaggattacaggcatgagccaccatgcctggccgaaacagttcatcgttgttgttttaaatttattttcagattatttttgtagagatggggtctatgttgcctacgctggtctcaaactcctggcctcaagtgaccctcccacctcagcctcacaaagtgctgggattatagacacgagccaccatgcctggccagggctatagtttttatgttaagttaaatataaccaaaaataataatcataaaagcatttcaaattttattaagtatttctatctactaagcttttctactaactttttttttttttttttttttttttgagatggagtcttgctctgtcgcccaggctggagtgcagtggcacgatctcggctcactgcaagctccacctcctgggttcacgccattctcctgcctcagcctcctgagtagctgggactaaaggcgctcgccaccacgcccagctaattttttgtatttttagtagagatggggtttcactgcgttagccaggatggtctcgatctcctgacctcatgatccgcccaccttggcctcccaaagtgctgggattacaggcgtgagccaccattcccagcccttttctactaacttttagtagagaaagagaagctcagatatttgaatttggggctcaaaagtcaaagtcaattatctaacatttccaaatttttataggacagtgggagagaccattaccattttaaacaaatgaagatatatttgcatccttccccaaagggcttgtgacaaacttctcaaaggaactgttggaactgcttcttaaactggtatttgtgtataatttggtaggagctacaagagctgcctcttcagctgaaatttgtctctgagagaactggaggcctgagaactacagcaaattcctagtcacacaattttgaatctgagtgttagtgcaatgggttataacatcaatcttttcttggttgcaacagtgaagggagagataggacatgacaaaaccttacagctatatttaaaacacataaataggctgggtgcagtggttcatgcctgtaatcctagcacattgggaggccgaggtgggaggactgcttgagaccagtttagacaagcctgggcaacatagtgggagtctgtctccaaaacacttttttttttttaaatgagctggcatggcacctgcagtcctagctgctggagaggctgaggcaggagaatcacttgagcctaggagtttgaggttgcactgagctatgatcatgctactgtactctagcctgggtgacagagaccctgtctcaaaaatgaaaaacaaaacaaaacaaaatcaaataaattattcacatttttacaactccatctaatcgacctctttctccctaatctaaattatatacttcctcttcagttaagggcagagcattgctccaaggtgcaaagtcttaaaatagagcaaattgcagatgtagtgtgacttctctgaatttaccctttttgccccagccagcttcccagaatgccatcaagmctgtgagtactaattcttgatgtgttgctacggctagtaaatcaccaaaaggcccacaaggatgtggctgaggaaccagcttattctcttctagaagagcaattccaacttaccarctggatggctatcattaacaccgtcttcaaagtaaatgttcggtcacagaggtcaaacaagtcctccaagctagggccaaggagctccagcaccatggcattatatttcccacatggtccaaagtaatacacctgtgggagaccttcacctgaaagcagaggggaaatgggggtatacagtgggagacacaaaagccaaaatatgagataacagtattagcactgaataaaatatttttaaaagtacaatttgtgagatttccattttctttcatagtccctactggaaactcaaactgagcacaacagcttcaatgggaactaataatgatgggaaaggctaagtcattgcacaatacgttcaaatgagtagttatttaataccacagtgccaaaaacatttccactgctataagatagagaatggtccctgatccattggatcttcccaaaaggatgcctgaaagtgcagtatcataaaaggctcaaaggatggctcactgagctcaaaggccaggctaacataacttgttacattatctggttcatgagcactctctatgcttactgccatagccacatgggctatttggaactgttgccctatggacaactcagactgaagaggcaaggtcacagagcgtgcagcctggccccaggccagcacaactggccctcttttcacagggagtctctatagttttttgttttttatcagctggagaaaagtcaacagacacttagtgtttggttgctgataagtgctgatgaaaggaaaagggggaaaaaacacaaggctgggttttccccagatttgaaattcataactattaagaagccaaaatccagactttctcacctaagtggcaaattgtgaatgaatttcctttataaagtgcattgtaaatatgaggcattcactaaatatataactggtaccatgagaatagtagatattaaataggattacagacgccaggcgcagtggctcatgcctgtaagtccagcactttgggaggctgaggtgagtggatcacaaggtcaagagtttgagaccagcctggccaacatggtgaaactgtctctactgaaaatacaaaaattagctgggcatggtggcacgcacctatagtcccagctactcaggaggctgagacaggagaatcgtttgaactcaggaggcggaggttgcagtgagctgagatggcgccactgcactccagcctgggtgacagagcgagactccatctcaaaaaaaaaaaaaaaagattatagaacacttaaaaaattatctggtttcacagagcagaaacattcccatcttatatatttatgtatatagtggtctacagttgcatatgttgtagattattgtttgcttctgcctctaagtgttttaacttgagacaaggtctcagtgttacccaggctggagtgcagtggtaagatctcggctcgcaatctctgcctcccggactaacgcgatcttcccagctcagcctcccaagtagcagctgggactgtaggctcgctctaccacaccagactaaatttttgattttttatagagatggggtctcactatgttactcaggctggtcctgaacaactcccaagctcaagcaatcctccctccttggcctcccaaagtgctgggaatacaggcatgagctactgtgtccagccccattccctttttatttctatgggtgggatatagacagatgtacatctaacacatacttctctcgagggtaggtctcacatatttggaattaataactatttcatatattgtattagtctatcttgattcattaaatcctaaacaacttttttttttttttagacagagtctcattctgtcacccaggctggagtatagtggcgcaatcttggcccactgtaacctccgcctcctgggttcaagcaattcttgcgcctcagcctcccaagtagctgagattacaggcatggtgtccaccaatttttttttgcattttttggagagacagggttttgccatgttggccaggctgctctcgaactcccgacttcaagtgatccatccacctcagcctcccaaaatgctgggattacaggcgagagctaccatgcccggcctaaatcctaaacaacttgaacattttctttaaatatgtttattcctagcttgtatcctctaacatatgttactcctgctagttcaataaatatctgttcaattgtttttgttgttgtcttgattctccctatctccaaaagagaaaaggatttaatttgaagtgttttttttttttttttttttacatggagtttcactctgtagcccaggctggagtgcactggcgccatctcgactcactgcaacctccgcctcccgagttcaagccattctcctgcctcagcctcctgagtagctgggattacaggtgcacaccaccacgcccagctaatttttgtatttttagtagagacagcgttcccccatgttggccaggctggcctcaaactcctgacctcaggtgatccgcccgcctcagcctcccgaagtgctgggattacaggcgtgagccaccacaccaggccccaaagagtctttttttcccggttgttttgaagaagtcatttttcagctttttaaaaatatataaaacccaactagttgtttccaatgactcctgctgagacatccaaagcagaacactctgtcctagagatttactgcttttattaatcagacacatggtaaatgcagtttggggatcttttaaatttatgtcctatataaggatttaatgccactaaaatgttattttcctaatataaatattatattcttcaaagcaggttgtggcagcgcctgttgtttgcatgcccaatatccattctccctctccttttttcttttgagacagtgtctcactgtgtcacccaggctggagggcagtggtatgaccatggctcactgcagcctcgacctcctgggaccaagcaatcctcctgcctcagcctcccaaacagctgggagcacaggcacatgacaccacatcgggctagtttcttaaattttttccagagatgagctcccactatgttgtccaggctggtcttgaatttctgggctcaactgatcctcctgctttgacctcccaagtgctaagattacagggatgcctctccccttctttttttctttttcttttcttttctttttttttttttttgagacagagtctcgctctgttgccaggctggagtgcagtggcacgatctcagctcaatgcaacctccacctcctgagttcaagtgattctcgtgcctcggcctcccaagtagctgggattacaggcacgtaccaccacacctagctaatttttaaatttttagtagagatgggatttcgccatgttggccaggatagtctcgatctcctgacctcgtgatctgcctgccttggcctctcaaagtgctggcattacaggtgtgagccaccacgcccagcctccccttcttttaaaataacataacttttttttttttttttgagacagagtcttgctctgttgctcaggccggaatgcagtggcgtggtctcagctcactgcaacctccgcctcttgggttcaagccattgtcctgcctcagcctcctgagtagctgagattacaggcacctgccaccatgcctggataatttttgtatttttagtaaagacgaagcttcatcttgctggtcaggctggtcttgaactcctgacctcaagtgatccacccaactcagcctcccaaagtgctggtattataggcatgagccaccatgcctggcccagaacttctaattgttgcaaatagcaacttgcccagttataactccagtctcccttgacaattaggaaagaccaatgagatggaagcagaaatgagtgtataactcttttttttttttttattcagagtcttgctctgctgcccaggctggagtgcagttgcatgatcttagatcagtgcaacctccgcctcctgggttcaagcttttctcttgcctcagcctcctgagtagctgggactacagactcagctaattttgtttttagttttactcttgcctcagcctcctgagtagctgggactacagactatggctaattttttttttgtttgtttttggtagagatgagatttcaccatgttggccaggctggtctcaaactcctggcctcaagtgatctgcctgccttggcctcccaaagtgctgggattacaggcatgagcctccgtgcctggccactgagtgtataattctaaaaaaattctttcaagagagatggctagaatgaaaggtccagaagccatctagaatcaccagacatcttgacgatgtaaagtagtgccaagaatagatggagcaaaaaacagaacctaagtccctgatggctgtggagtaaccatgctaatgttggacttttcttctctctggattttttttatcaaaaagaaaaatcaatctccaccttgactgagctacttgtatttggatttttaaaaagcagccaactctaatcctaattaataaacatattactccattcgttggttaaattgcaaatctgggcataatatcctctttctaaagtacaagctaaaagtcaggcttgcttagaaatataatattggcataatttcctacacttgttgccaatacttaaggttcagtttaaatgagacaactgatcttgttcttaataatccttagtatcaaatctagattatcttttgccagaagtttccatgtttacaatgaagtcacaaaaggattttgagtaatatctacaatttctaactataatgtcacccattactcctacctaggaacttggaagaattaagagttcctgctcgctgcattattggttttattaagtaccctgagacctcacaacacactggcaggctttgggatgctcaaagcaacttctagaccactgagtggttttgaagcatttctaggagagggtcaaggtccgagataccagtgtagaaaaagctcaagtcagagtcttagatctagtatttgcttctgctttcaactctggcacattccttagcctctctgggttagcttattcatctgtaaagaggagggggtttacacaatgagataccatctcacgccagtcagaatggtgattattaaaaagtcaggaaacaacagatgctggagaggctatggagaaataggaacacttttacactgttggtaggaatgtaaattagttcaaccattgtggaagacagtatggtgattccttaaggatatagaaccagaaataccacttgacccagcaatcccattactgagtatatacccaaaggaatataaatcattctactataaagacacatgcacatgtatgtttactgcagcactatttacaatagcaaagacatggaaccaacccaaatgcccatcaatgatagactggataaagaaaatatggtacatacacaccatggaatactatgcagccataaaaaggaacaagatcatgtcctttgcagggacatgaatgaagctggaagccatcatcctcagcaaactaacacaggaacagaaaaccaaacaccacatgttctcactcataagtgggagttgaacattgagaacacatggacacagagaggggaacaacacacaccagggcctgttggtggatggggggtcgggggagggaacttagaagacgggtcaataggtgtagcacaccaccatggcacacatgtacctacgtaacaaacctgcacattctgcacatgtatcccgttttttttctccttagaagaaataaagaaataacaacaacaacaacaacaaaaaaaaaaaaaaaaaaaaaagaggagggggtttagactggttcctttcaaaatccaaattcttatggccaggatttccttctagctaccttctgggttcctctttgtaaagccacagaactatgaatgaaactcacctccatattttatgaaataacgtgtggcaccaattcaaatataagctggtagtgaaactcaactggaagtgtatctatcagaaatatctttaaaacttaaaaaaaaaaaaaaacccaaaatgagatgcagtgacttcacctcctacctactgagtcagaatttctaggagtggaagcaaacattgctccacaagtgattctgatgtgtaacctcagctgaaaaacactatatctagagagtagaaataaagggttttgctttgttttatgattaatataaggattcagaatacagtgacaggtctctttcagaagttatttcagatcaaaacaactggactcaataccttttgaaggaaagaattttaaggcaagttaaaaagatttctctgtttaaagtttcttagttattttcttacagaaaatatacctttgagcataaaagtttctttgggagatgtagctgtaatttattagaactatctgtacagaaagctccccatgcaagttctactctgagcctggtttttcgcaggagtgcccataaagtggtctgtgctggtggtaaaagacacaaacacaagcacactaagaaagtctgtctctttggtcagagattaccacacagtaacggcttatcagctgggctgcatttaaatgaaaaaaaaaatcctgtatatttcattcttcttttgcagagccatctctaatccactgcttaagaaattttaaattaatcaacattatgctatgaaatcctttaatgaggctggggagaagggcagatccttaagtgcaacataaggtacacatgcggtaaacaggtactttctataaataattatgagggaatggaaaggaagtgggagactcaggcarggaagatatgtgctggattctttgatcaatggtatattggaaactaaggtattaatagttttataatctctcatctgctctggaaataatgtgctaatgaggtctccccttcctaaattggtaaactgcatagaaacctggaaactaaagaagtgactactgaattttacttttctgaaggatttccaatagatttcattatatttcctttaactacaggttaaatctcttataaaccaaactgcaaggttacatatacagtacatatgttatcttgtatatttttcttagtactatgaaagagcctttccatcatcaataacatgatgttataaaccctgccagacatatggctcacacgtacatcaagctgcacagaataggcaatgaatgtagaacactagagctaattttcagtctgtatgaagtttaacttgagtcaaatacaccaattcaaggaaaatggcttcttttatcatccaagctgttatctaaaaacaatctacaacacattatgaaccctaactactctaagtagagatattttaaaatgcacatcaggttgagaactgaaatagaaccacctcaaargttttggtaatttgatcctattattgcctaataattagtctttcattcttttttaaaaactaaattacctaactatgaaggacaacaaccttggcaagcccattcttttgctttgtttatatagtttattttttaatgtttaaagaaaatagaataatttttctcccaaattaaattaattctcttctcagccccatcaatagtaatagtttctagcacaactactaaatgctctgtaaygtttctgagggatcaggcaattattattataatacatgggcaattatcattaaagaaaataatattaaacatgtacccttagcaagaaatcagaaataggcagataaatgagatgttattccattgtaagtaacgaaagggaaaaatggaagcatagcctttaaaactctgagaataaacccatgaaacaatgcattattacaaagatatgagataatacgtagtatatcttttttaaaaaagaacaaacaatccctctcatgtctctgactctgaaaaatgtctctttgcaacatgaaccagttaaacatatgaatttactcaaaatgctggtttaataacaaaaacagctaggcccagaattaagaaaacaggattactttgtctgtcctgtaatgaaaaatgttttacaatcatcttgtttaaaggcctcctgggaactggaatactgccaaacataggctgctaacacgagctcaaatttgtatggtgggggaagaggcagtgaggaaaggcaaaagaagaggaataatttcacatttccgagccacagacattgagctttaacagtgtctctattacatacacataattatgaatgccttgagccttaaagcaggcttaacattttatttacccaaaaggagtcagaaaagaaagcccaagacaggacagaggacagatttcttctatagtagatagaatccaaaatacacttttctttttttttttttttttttggagacagagtcttgctctgttgcccaggctggagtacagtggtgcaattttgggtcactgcaacctctacctcctgggttcaagcgattatcttgcctcagccacccgagtggctgggattacaggcatgcaccaccatgcctggctaatttttgcatttttagtagagctggggtttcaccatgttagccaggctggtctcaaactcctggcctcaagtggtccacctgcctctgaggcaggagaatagggtctggaaacagtaaacctaaggccaacctatggctgccttcttggaattggactaagaggaaaaccccacctgtccacaaccaagtcataacaggccaaaggcccatccctctccgaacctcccctcccctatgtcaggaatgggaatgtctggttttggtccattctgggaccttcatctgcatatatgccataggtgagatgcctctgattggtcctgggcagaatcttgattctgactggtcctggacagaatcctgcctctgattggcctagggcagaatccttcatttacatagggcataacctatcagaagcccctaaaggtacttagatgtgttaccatgatcttttgttgttgttgttgaacagagtttcactcgtgtcgcccaggctggagtgcaatggcgtgatctcggctcactgcaacctctgcctcccaagttcaactgattctcctgcctcagcctcccaagtaactgggattacgggtgcctgtcaccacatccagctgatttttatatttttagtagagtcggggtttcgctatgttggccaggctgatcttgaactcctgacctcaggtgatccacctgcctcggcctcccgaagtgctgggattacaggcgtgagacactgctcccggcttaccatattcttttaattcaataaaaaccccaaggaacattacaatcagggctcttgagccacccgctcaagcccgctcccactctgtggagtgtactttcacttcaacaaatctatgccttcgtcttccattgctttgtgcrttttgttcaattctttgctcaaggcaccaagaacttggacaactcacagtcaagactttccatctggtaacaccttggccacccaaagtgctgggcacgtaagccactgtgcctggcccaaaataaaaacaggtaaaagtgtgttgtgtattggaggtgggtaggggcagaggagtaaagtcctttccctttccaaaaagactamctcggctgggtgtggtggctcacgcctgtaatcccagcactttgggaggccaaggtgtatggatcacgaggtcaggagatcaagaccatcttggtcaacatggagaaaccccgtctctactaaaatacaaaaaattagctgggcgtggtggtgcacgcctgtagtcccagactagggaggctgaggcaggggaatcgcttgaacccaagaggtggaggctgcagtgagccaagatcgcaacactgtactccagcccagtgacagagcaagattccgtctcaaaacaaacaaacaaacaaacaaacaaaccaaaaaaaaaaaaggagactaactcagctcagctcagttactaacagactaactttactcagatggtaaattcatgagattaaaaaatccagtatttgacatttttccaccttccttagtactgtagttcctgtgatttaagataaaaagatggattatctactgaatttcaaaatctgcctcaaaacctaagaaaatacacctgattcttcttaaaatccacctgaacaattaacaactaaaaagtcaagaaggttctagcaagcagctagaaggaatgaaaaggaaaaaatgaggttacccaaagtacagtgatccccttcctgacaatcgtgccccagtcccattacactttctttatccatgtgtctgtcttccctactaacagaaggctatttgaagacagcaactactgtgtgttaattttttgtatgtcagcacctagcactggtccaagcatatggtagatatggttaaaataagtactaagtaaattaataactacaactcagtgcgatggcacttgagttttccatttggaatgcctaatgctttcctcaaaatgctgaaatacacacaatacatacagagcaaagcaaattcagtggatttaaaatgtgcacgaatactaacacaattgatttttctgagttcttgcttacatttcatgggaatacttttaaaagacagttctgctgggcaagccacaagtatgaatactccaagtaaattcagagttgcaatatttctacattgacttctgtgtattttaaatcttccatgatgattgtaaatgatatctacagtttatcttgctgttcccatatgtaggtaaacaactatgcagaattacttatttcagttaacagcactgaaaactacacacaaacaaatgtcttctcctctctcaaaacagcacctgcccatccaaacagattaaatgaccaaaaaaatgagacatctaaatcatctaatatgaaaggaagtccagtaacttcttcctacccttatcttctccctctcaatttataaacaaattctttattttggtcccatttaacttggaaatacacggtcttttcttcacctaagtagtcttttcctaccacacttgaatctcatggtcatcctgtaaggaaaaacaggggaagtactaaagaccccattttacagatgaaataaaaaccctgagaaatattgtgtgaaatctcctaggttcccaaataatacaaccaaatctctcaattccagattcactgttctcttctctacactaagctgcctacattctcttactctcaatgttctttttcatctgtgttgttgccaaaattattctccatgctccccaacccaactcttccaaaccctatgtcctgcccttttggttaacattttctttttccaccaattctttatcacctttccagtacataaatcccccactatgctccacaggcagcttgatttgtcctactcacccttttggcttcccttatttttaatttttaagaaattttcttgccctctcccccattattttaaaatcagctccacaaacactatcttttcacctttcctgtccacctctctgtggttctcaagccttgtcaattccagtccctggtcttgaacaggaaccacctggggcattacttttttaaattataaaagtgataaacagacagatatagcatggatatctatattacccatttttagacaaccaaacataacagcaaaccaaaagcagtaaaaagcatataaagaaaaggtattcacacccgggcacggtggctcacgcctgtaatcccagcactgtgagaggccgaggcaggtggatcacgaggtcaggagctccagaccatcctggtgaaaccccgtctcactaaaatacaaagaattagctgggcgtggtggcgcacgcctgtattcccagctactggggaggctgaggcaggggaatcacttgaaccccagaggcggaggttgcagtgagccaagatcatgccactgtactccagcctggcaacacagcaagactccgtctcaaaaaaagaaaagaaaaagaaaaagtattcacaaccacaaaggcacatgattaagaacagtgtactgcaacttcatttttaatttaatactatagcatgggccagacatggtggctcacgcccataatccgaacagtctgggaggccaaggcaggtggattgcttgtgctcagaagttcaacaccagcctgggcaacatggtgaaacccctgtctctaccacaactacaaaaaattagccaggtgtggtggtgtgtgtttgtggtcccagctacttgggaggctgagacaagaggatcacttgagcttcagaggcagcagttggcagtaagctgagatcataccgctgtacaccagcctgggcgacagagtgagactctgtctcaaaaaaaaaaaaaaaaaaaagaaaaagaaaaatactacagagtggatattttttcttatcaacatatagacctaccttattcattttaatagctacatattaatagtagtataatagtattccaccatgtaacatatctgtttaactttccccctactgatgggcattcatgctgtttccatgtgttaattagaaatatatattatagtgaacacctattgcttttgcctggtctgcatccttttgttccttctgataacaccaccttattcttacagtggaaagtaccatttccccagtgttacttcatgtggttaaagtgggggcaacccatctcccactgacatcccgaggatgccacaagcccaattactcagaatactctatctgcctgcctgggaaaactggctcaggaatgggtgccatgtctctcatgtaacaagagtcaactctaggacttttgtggaactatagagaaggaggagtattctctctctttctctctctctttctctctctctctctctctctctccctgatcgctaaactgaaagcagctcagcctggagttgccagggaccaccacatggagaaagcctatttgagaatgaagctaatgcagagaaagaagaggtgagaaaaaaagagaggcaaatgtatcacatacctatggaccaaggacattattagtcctgtatctggatggcttgaagtgagaatgcttttgacttctcagttctgtgagccaagaaattctcctctccctctctcaagtgagcttgaactgggattctactcttggcaaataaaagcatctagacaaataggcatgcaatactacaaaaaaaaatccttaagcctatatttttgggcatgtttgtaaattttttttttttttttttttttttttttttttttttttttaaracagaatctcactctgtcgcccaggctggagggcagtggcgcgacctcggctcactgtaacttccacctcccgggttcaagggattctcctgtctcagcctctggagtagctgggattacaagcatgcgccaccgtgcccggctaatttttatatttttagtagagacagggttttaccatgttggccaggcagatcacctgacgcgctgggcctcccaaagtgcttggattataggcgtgagccaccatgccctgcccggtaaacatatcttgaatgttaattccttaaacaggaaatgctgagtcaaatgcttgcatagttaatattttagtatatagtgccaaattgccagttttggttttttttttttaagtcagggtctcactctatcacccaggctatagtgcagtggcacaaaccatggctcactgcagccttgacttcccaggctcaagcaatattcccacctcagcctcccgagtggctgggacttacagacgtgtgacaccacgcctggctaatttttaattttttgttgagacagggtcccactaggttgcccaggttggtcctgaagtcctgggctcgagcagttctcccacctcatccttcccaaactgccagagttctaaatcttctttggtccctattctgactctaggcttgggcctattttcaacatttagcacgacagtccccattacttgagtactcaggtctgtgagggtatttaaaaataaaatggcagccgggtgcagtggctcacgcctgtaatcccaccactttgggaggccaaggtgggtggatcactaggtcagaagattgagaccatcctggctaacacggtgaaaccccgtctctactaaaaaatacaaaaaaattagccaggcgtggtggtgggtgactgtagtcccaactactcaggaggctgaggcaggagaatggcatgaacccaggaggcagaggttgcagtgagccgagattgtgccactgcactccagcctgggtgacagagcgagaatccgtctcaaaaaaataaataaataaataataaaataaaataaaattgcaggttatattccttttagaacattaattaagcctgggcatggtggctcacacctgtaatctcagcactttgggaggctgaggcaggaggattgcttgaggccaaaagttcgagactagcctgggcaacatagggagaccccatgtttacaaaaaataaaaaaattagttgagcgtgtgatgtatgcctgtggtcccagctactcaggaagctggggtaggagaatctcttgagcccaggaggttgaggctgcagtgagctgtgatgacaccactgcacttcagcctaggtgacagagcaaaacctcatctccaaatatatatatattatatatatatttatattttatatttatataaacatatatatatttggagatgaggtcttgctcatatatgtatatgtatatatatattaggatatatatatatatacacacacacatatacatatatatattaggtgctgtgcctatcttgttcactactgtatccctaagacttagcttagaatagtacttaacccaagtgggatgctcaagaatatctctttaataaatgcatgaacagagacatagcagcctctgggacttggtttattttttgtacttggaaagctttccttactcttccatttttatatgttcaaataaatcatagtcgttttttaaagctcagccccatacatgccactctctctataaaaccttttctctttctcaaaattagaaaccattttttctttcagaacttcctcattttatatgcattttaaaaatatatataacattctactgttttagcttgtgttacagttacttaccattattgtcctaccattaacctcactgtcctaacatgaacatactgtaagctcagtaaatattacattttccttccaatgacactctagtgtactgaagggcagagatcatcttatttataattctttggccctcaaattacccagcatagtggtagctataaacacagtgatgtgtagtgttttgttagtgaaaacttcatctccttgcattatcactaatgtagaagagattacctacaggctggctttaaggcaatatgaagtataaagaaaagaaaatgcagaaaaatgttaaaagtgtgttagactgctgaaagcacaagaatgcagaatcgtgcagatctgacaaactcttcttttaatggatggaatataaattacttttgtagaaagaaaatgacaatataattgtcacaaatgttaaaaattgatctttttattggtttttgttccaagcacacttacaaataacttatattctcaaatagaaaagggcttagctagcagctagattactattatgatagtaggcacaaggagttatctatctttaaatagtttgttactggaacttaaggaaatgttttcttaccaatgacactgacagatactggaaaggaactagttaagttttaatataatacagtagatacataattctgccttctcataatcataggaataattctcttcaatgactcaccttcttcattccatagtactccacagctttgggaatgctaaatgttacctcccttctaaatgattaaccttgacatactatgagctaggaagaagagtgactaagggctgtggtcagtcctttgagggtcactgagcttacttctagtccttattttagactgagacttcccttgtctttgacctccttaaacaagcattctctaacggcagccactaaaagctctactcaatgccagaraaatggctgtgagaatacggatggaagagaaacatacaggtatacagtaagagaaatacgagtaaagaccaaaaaaaggtcaaaatatgacatagaattaaagggagaaaatagcaccagaaccttcagggtctgtgtctatttccaagcaagctcccactgacaggttttggtgatccacctttttgaaacctctgcctgcataagcactatattgatttcctataactaatcacaactcttcagtccagttcacttatatgtaagttacatgggtgtatttctagaaccttaccttctatttttcatgaagccctttaaaagaaaacaaaatctaagtagcaaattctaccttcacactgagcaaataacctcaagcagttctgcactttgcaaaatgatgcgctgaaaaggtgtcagtactttgtgttactgtgggatgtatgaaggccaaacaatttttataataaactcacaacagtctatttgcaattaaggaaattactggtccaaaatgtgtaaaatagaaatgtttttcttttgcaggagggaaaaggacagattctctctctctctctttctctcttttttttacattttcctttccccagtgcaaaattctctaaaattttataaatgtaattaaaggcaattactctatgtggctcaggtgatttagagctatttgagaatttaaagaggcagggaaggaccacaggaggtctggccctaaaagataagcaagtctcttacagcattatatatgaatatctcttgcttatatttcatcacgcagtagggtacactgttagccacagtatcagaaatgtcctaaaactttacggaaattacaaaggacacacaactggaaaattcgtcctggtccagaagtcgggcctcagaaatatcaggattttgtttttgttttttgcaaactagtatagctaaaggctgaggtcctgatatttcacccttggaagaagagatggaaattcatagtatcactatttaagctccatttaagactagaaattattagtactgagtatgtgaattatacctttccaagtccaataaatgaaacaactcttcctatttttttcttcacaaaattaagcatttgccacacactggacttaagctacaacatcaatggaaacatttaaatatccttttaaaatgtttcctgacaatgcaggtagatttgaaatctctctctccctcccgcttcctctctcaaatgaaaagatgaccacaccacacttttcctcatctgacatttgttccataagatagagctggttttcatatactgatcaggttcttgctactaactcaccaaatcaggcacacttttatatttaagttctgctccctaagaggaacaactgtgacattagtgctgctcagatattttcaaacacccccctcaccctttacccagtgaacgggattgcaactttttgtttttaacatgaggctgttaaaataaatataaaatattataaaaaataaaatataaaataaaattaggttgctgttgccctaatatttacttatttcaaataggccactcacacaggagcaggtcctgagagcataaaagttaggcagatgttgctttaaacctcaactcatcattccagaccccctcaaagtatgagatgagctacctcacttaacagaggctcaaagcaggtttttctccaaaatgattattttcccacaagaggtggtgagtacaatacattgtgaaaggtgtagttctgtttctgggggtactcactgccctatgccaggaccacacactagctctcagtttctactccctactttaacaatctcaagatgttaaaatgtctcaaggcaaaatggcttgctatttagcaagtgttactagaagagaaagaaaagcatggtctgtaagctctccatttccttgttatattgtcattttttttctcccagctcttaaacctcattcttagagaatctgctctctcttgagtggtgggcccatgtggttctgtacccacaagtaagctacctggaccaggattgaaaagctgacccaagatgggtcagccaatcttcttcttaggaatgtgcagttgtgacataagggctctactcaatctctgctagggcttaaattgaggagaagggctatgcaggaggccttttcccacaaaatacaagaagcagagaaggctggtaatgtagacaaaatgatactggtagacgcaagctgaggcaagagattttacagccctaagcaggaggagggtcaaaaaaagtgtcagagacaagaagagttgaaaagaaagccagggaccaagagtagttgtcttggttcctaggaattatccaagtgttttgttctaatccctagataggcctgtatatttcctatcttggtttcatgacatatcctgctggtcttccagtaaatcttccttttgagtttaagctaatttaaatagatgctgttatttgcaatcaaaacagtgttgactaagaacatatatagctgctctacctcctcttaaaccaacattttttattggcttgtttcacacaatagataactggaaaagcacccaaacatgagatgacaaaatgtttgatggcaatttaacacatgtatcagtaaaatgaaatttcagccccaaagtgggtgtctgagaaatcatggcaaaccagagtgatgcctcagtatttccaaagacactgaaaacgaaaaaaacctcattgggctttataaatcaacaaaatatatgtagcttaaatctgttccgtataaatatagcagaagcagaaagagtctaaaagtctaaaaacccacaaaaagtttttgggtaaaggaaagggggttctggattatcttccccgcaaggtagaagttaaactcctgagtggatagtaacttaaggactgtgttaatgagaacatatttggcaatgattgtgcaactccgaggtgactgagaaagattcaaacactgaactcatttgtattgtatatatttattttctgtatttcaaacatttcttaaatacttactatgtacaagatactacactagacggttaagggaagaaagagaaaaaagataaataaggtacagactctatccatagggaacataacaggtagaaaactgttaggtaaacagctaacatggtcctggaaatatgtaacgtcaacaaaattagctgggtgtggtggcacatgcctgtaataacaactactcgggaggctgaggcaggagaatcgcttgaacctgggaggcagagatggcagtgagctgagattgtgccaccacaccccagcctgggcgacagagtgagactccatctcaaaaaaaaaaaaaaaaaaagaaaagaaaagaaaagaaaatagtgaggaaaagttgagctaaactttttctcacttcaattcatggctatctccacttattcacactatctagaattggagatgacaatgtctaaatcttcagtcctcaaaatgtaattgcaaggctatccattcatacttttgcacagcaaaagaaataatcaacagggagaggagataacctgttgaatgggagaaaataactgcaactattcatctgacaggggactaataaccagaatatacaaggaactcaaacaacaaaacccaccgcaaataatccaatttaaaagtgggaaaagaacattaatagacatttttcaaaagaagacacacatggccaagaggttattaaaaaatgttcaacattagtactcattaaagaaatgcaaatcaaaaccacaatggcatatcatcttactgcagtcagaacggctactattaaattaagaaaataacagatgttagcaaggatgcagagaaagggaactcttttacactgttggtgggaatgtaaattagtacagtctctatggaagacaatatggagatttcccaaagaactaaaaatagaactactattggatctagcaatcccagtactgggtatctactcaaaggaaaagaaatcaatatatcaaaaagatatctgtactcatgtatttttcacaggactatgcacaacagcaaagatatggaattaacctaagtgtccatcaatggatgaatcaataaagaaaatgtggtatacatacataatagagtaatatttagccacaaaaagtgtgagatcctgtcatttgcagcaacaagtatggaacctaagttaaaacaaaccaggcacagaaagacaaatactgtatgatatcattcataagtgctaaaaaataggtttacatgaatgttgagagtggaattatagagaatagaaatttggaatggtgagggagtgggagggggaaggaagatgagaaattggttggtaggtacacaatgtatgttatttgggtgatgaataccctacaaaccctgacttgaccactatgcaatctatgtatataacaaaattgcacaggtatcctcaaaatttgtacaaatgaaacaggaagacaaaataacttttccctgaatttaggagtataggtaatacctctggcagagagacctgaaaaatttatacatggcaagaaaagatccaaattttactttcttttaccaggttcactatttcatcctttcttcccaggttatgtaaattttctacccaaatgaagatcaaaaggtttcttctaagttccctaagcactcctagaggacaactaagttcaggcatgttctttgttcacaactacctgtgttaaaagagtcctctttaagtaaaattcccattttttctagtatatcttcagaagtttgtattcttgaattcttgtattctgtttcctgtgttgctcagcttatttataatgtactcctaaggatgttcacaacattataaaagggtcttatcaatattacactttcttatgacttcttcagatctatagttaattgctctattgaaacagaaccatgctcctgttaatttacagttgcctagattcaaagctcttttgtggtaccaaccagcactgcttatcttttatgagggcatataaaaccattccctccaagcgacttcgaaattgcaaagcctgataacctctattaacacttactttattcacaccacaaaggtttcagtgggtgaaacagtttgaatacaggagcactaagcttctcagttgtatacatggcacatgcattcaacatcaatgattgatttactgtgggaaaaaaatttcaaaacctaaaaaactcaaggccataaaaggttttggaagtaacgaaggcagccttctgagtcacaaaattagggggcatcatgtgaaacaggaaatcttgctctttcactgggggaaatttccaatctttgccccagttaaaagcttttatgactgtcttctgccactgttttaaaattaggtaagggataatgtgtggatggctctaggaatctgctgggtttataggtatatacgcacataaaaaaaatctgtacaaaaacatgcagcctgggcaacaaagcaagatcccatctctataaaaaataaaaaattagccaggcatggtagtgtgcacctgtattcccagctactctacttgggaggctgaagtgagaggatctcttgagcccaggagtttgaggctgcagtaagctatgatcacgccactacactccagcctgggtgacagagcaagaccctgtcccttaaaaaaaaaaaaaaaaaaaaaaaaatatatatatatatatatatatatatgaaaaaaaacccacattcctagtgcaggtttgcttactgtgtgactttaggtaagttactgaagttcctgtgctcaaaaatgggaaaaaaagaaacaaccacataaagtgcctattagactgagccctactgacttgggctcctgaattacagctatggcgtgtattctgaattcaaacctccagagcacccattttttccctggagttgggccagggctgtgccatgcccccccagggatagagattcacagctggaacccaaccccctggatctgggctgctaaaggtacctcaagaccctgagcctaggatcctagtctcacggctgcttgtaggctatgtcagataccaagagtctccccattgtggggaaaatgagaacaggaggacccaaaagtcttttccaacaaggatattaacaaccttctgccatcactaccaaaaaactctataccctaggccactaaggcatccacatttattcctgatgtttaatgtagccaaagaagttgcacagaggctgtatcactaaacctacctgcacacagattcatcacactcttcccaaccggcacactaagacccaactgcaggtgaaagtctttgtctatcaaagccactctagaaagtttaagagagtcaacagttccattagatgcacaaacatcaacacagtggtacagaaacatgaaaaagcaagaaaatatgacaccaccaaagaagcataactctttagtaatagaccccaatgaaaagaaattttaaaactgctggaaaaggaactccaaataatgatcttttgttgttgttgttgtatgttttttttctttgtttttgtttttgttttgagacaggatctcactctgtcactcaggctggagtgcagtggcacaaacatggctcactgcaacctcaacttcctgggctcaagcaatcctcctgcctcagccccacaagtagctgggactataggtgcgtaccaccacacctggctaattatttttgtctttttcatagagatggggtcttgctatgttccctaggctgatctcaaactcctgagctccatcgatccacttgccttggcctccaaaagtgatgggattacaggtgtaagtcacccatgcctgacctaaaataataatcttaaggaaacttaatgagataccagaaaatacagacaagtaagtcaacaaaaccagacaaataattcatgatataaactagaaattcaactaagagatagatatagaaaagaaccaaacagatttcccacagatgaagaattcaatgaattaaataaaaagtacaacagaaattcaacagcagacgtaagcagaagaaagtctctgagcttgatgagaggtcatttgaaactactcagttaacagaacaaaacaaaataaggcgggagcaatgtttcatgcctgtaatcctagcactctgggaggctgaggcgggtggatcacttgaggtcaggagttcaagaccagcctggctaacatggtaaaaccttgtctctactaaacatacaaaaattagccaggcatagtggtgtatgcctgtaatcccagctacgcgggaggctgaggcaggagaatagctggaaccccggaggcagagactgcagtgagctaagattgtgccactgcaccccaacctgggtgacagagtaagactccgtctcaacaaactaaacaaaacaaaacaaaaataatgaaaaagagtgaagaaagcttacaagacttatgggacaccattaagtgaacaaacatgcatattatatgatttctagaagaagagatgaaaaaaggcatagaaaacctatttaatgaaataacaactgaaaatttttcatgtctaaggagagatatgaacatccaggtccagggagctcaaaggttcccaaatatatttaacccaaaaaggtccactttatattacagtcctaaattgtgaaaagtcaaacacaaagagagtactctaaaaacagcaagaaaaaagagtcaagaaaattataagggagtaacagcagatttctcagtggaaaccttacaggccaggagagaatgaaatgatatgtgcaaagtaatggaaagaaaaaaaaaactctcagccaaaaatactacatatagcaaagctatccttcagaaatgagagagcaataaagtctttcccagacaagcaaaaactgaaggaatctgtcactactagactggacttacaagaaatgctcaagagaatcctgcatctggaggtcaaaagatgataattaccatcataaaaatacgtaaatctataaaactcactgataaagcagatacacaaaggagaaagagaaaaagaaaaagaatcaaaccgtatcactacagaaaaccaccaagttgcgatgattaacagtaagagaggaataaagaatatataaagcaaccagaaaaagattaacaaaatgagaggagtaattcctcacctgtgaaaaatagccttgaatataaaccgattatattctcccacttacaagatgcagactggatgaactgataaaaaacgatgacccaactatatactgcctacaagaaactcacttcacctataaagatatatacagactaaaaatgaagggatggaaaaagatattctacacaaatggaaaccaaaagcaaggaggagtagatatatcaaaagatcttaagtcaaagctgtaaaaagcaacaaagaaggtaattatacaatgttaaagagaacaatccagcaataggatataaccaattgtaaatatatgtgtgctcaatgtcagagcactcagaaagataaaatattattggatctaatgggaaagatagattccagtacgataattgttgggggcttcaacatcccattggatttaaacatcactttagaccaaatagacctaacagacatttacaaaacatttcatccaacagcttcagagtatatacttttcatcagcatatggaatattatccaggacaggccatgtgttaggcctcaaaacaaatttcaaaaaatttaaaataaatggtataacaartatcttttctgaccataaggaaataaaaccagagatcaataacaagaggaactttagaaactgtataaatacatggaaattcaacaacatgctcctgaataactatagtgtcaataaagaaatcaagatggtgtacagcaataaacacatcaaaaaagtagagatttcaaataaacaacctaatgatgcatatcaagaaactagaaaagaaaaaaaaaacaagtctaaattcagtagaaggagagaaataataaagagcagaaatcaacaaaattaagaccaaaagttgcaaaagatcaatgaaacaaaaagttgtttttttaaaaaaaaagatagacaaaaccaacaaaccattagctagactaaccaagaaaaaaatgagaagactcaaataaataaaatcagaaacgaaaaaggagacattacaactgataccacagaaatacaaagaatcattagagactactatgaacaactatatgctaacaaactgaaaaacctaatggaaatggataaattcctggacatataccaccaaccaaaactgaaccatgaaaaacacaacctgaactaattatgagtgataagactgaagcagtaacttattccatcaaaggaaaggccagaacctgatggcttctgatatagttcaaatatttgtccctgctcaaatttcatgtggaattgtaatctccaatgctggaggtggggcttggtgggaggtgtttgaatcatggcggtgctgtcttcatggtaagtgacttctcattagatctggtcattttttcccccactttcccccgactcccagtcactcttcttcctacttttgtattgtgatgtaccagtccccactttgccttctgctatgactgtaagctttctgaagcctcatcagaagccaagcagatgcctggtgccacacttcctgtgcagcctgcagaaccatgagccaattaaacctcttttctttataatttatacagtctcaggtatttcctcatagcaatgcaagaatggcctaatacggcttcactactgaattcaaccagatttatatcaataactaatataaattcttctaaaacattagaaaagtgaagaggagaaaattcttccaaactcattctgagtccaggattaccctgatgccaaaaccagaccaggacacaacaacaaaagaaaactacatagcaatattcctcatgaacatagatgcaaaaattcttaacaaaatactagcaaaccaaatccaacaatgtataaaaaagataattcaccatgatcaagtgggatttattccagggatgcaagaatgattcaacatacataaattaatatatgagatatatctcatgaatagaatggacaaaaccgtatgatcatctcaatagacacagaaaaggcatttgataaaattcaacatcccttcatgattaaaaaaaaatcctcggctgggcgcggtggctctcgcctgtaatccaagcactttgggaggctttgaggagggcggatcatgaggtcaagagatcgagactatcctggccaacatggtgataccctgtctctactaaaaatacaaaaattagctaggtgtggtggcgtgaacctgtaatcccagctactcggaaggctgaggcaggagaatcgcttgaaccagggaggcagaggttgcagtgagccaagattgcgccactgcactctagcttgggagacagagcgagactccatctcaaagaaaaacaaaacaaaacaaaacaaaaaaaaccctcaacaaactaggtacagaaggaacatacctcaatgtaacaaaggtcatataggacaaatacagctaacatcattttaaacagggaaaagctgaatttctcctcaaaaaattggaacaagacaggatgcygtctctcaccactctaattcaacatagtactagaagtactatccagagcaaacaggcaagaaaaagacataaagggcatccaaattgaaaaggaggaagtcgaattgtccctatatgcaagtgacatgattgtatatgtggaaaatcctaaaactgccaccaaaaaaattctcaaaatgaatttaaaaatgtagtcaagttgcaagatacaaaagcaacatgcaaaaattactagccatgtgcctgtagtcccatctactcaggaggctgaggcaggaggatcacttgagcctgagaagtggaggttgcagtgagccgagatcacaccactgcactccagcctgggtgactgagtgagaacctgtttcaaaaaaataaataaacaggccgggcatggtggctcacacctgcaatcccagcactttgggaggcctaggcaggtggatcacctgaggtcaggacttcgagaacagcctggccaacatggtgaaaccccgtctctactaaaaatacaaaaactagctgggtgtggtggtgggcacctgtaatcccagctacttgggaggctgaggcaggagaattgcttgaatctgggaggcagaggttgcagtgagccgagatcacgccactgcactccagcctgggcgacagagcgagactctgtctcaaaaaataaaaataaaataagaaataaataaattagtagcatctctacatcccaataacaaactagtggaaaaaaatcaagaaagtaattccatttacaatagctacaaaaaaaatacctaggaataaattcaaccaaggatatgaaagagctctacaagggaaactgtaaaacactggtgaaggaaactgaaaaattaaaaaaaaaaaaaaaaaagagtgtgggccggggggagacatcccttgttcatagattggaagaatattgtaaaaatattaataataccaaaagcaatctatagcttcaacacaatccatatcaaaatacctaagacattcttcacagaaatagaaaaaacaatcctaaaattcttatgaaatcacagaagactctgaatagccaaagcaatcctgagcaaaaagaacaaagcaaggccaggcataatggctcacacctgtaatcccagcactttgggaggctgaggcaggtggatcactggagtccaggagtttgatgcctgcctgtgtaacatggcaaaaccccacctctacaaaaaattagcagggcgtggtgagggaggctgaggctgtagtgagccgtgatcacatcactgcactacagcctgggtaacagagtaagaccctgtatcaaggcggggaaaaaaaaacaacacagctggaggcatcacccactaatcacgcactacctgatgtcaaaatatactacaaagctacagtaaccaaacagcatgttactggcataaacagacaaagagaccaagggaagagaggagagaacccagaaataaacccacatatttggaaccagctaattttcaacaaaggtgccaagaacattcagtagggaaaggatggtctgtttagagaaatgaaactagacccctatctctaactatacaaaaaaaaacaaatcaaaatggattaaagacttagatgtaagacctgaaactatgaaactactagaataaaacattggggaaatgcttcatgacattggtctgggcaaaatctttcaggtaagacctcaaaaacacaggcaacagaagcaaaaataaacaaatggaatttcagcaagctaagaagctcctgcacagcaaaggaaacaactgagtgaagagacaaccagtagaataagagaaaatataatatatgcaaaccatgtatctaataagggattaattaatagccaggatatatatgcaattcaaacaactcaatagcaaaaaatagtaaaaataataatctgatttaaaaatgggcaaatgatcttcacagccattatcaaaatcagtttatcaaaaacatgtgtgtacgtccatgtttattacagctctattcataatagcaaagatatgcaattaacctaagtgtccattaacagataaaggacaaaaaaatgtggtacatatacacacaaggaaatactattcacccataaaaaagaatgaaattcacacctgtaagcccagctctcagagaggcgaggtgggaggatagtttgagcccaggagtttgagacctgactgggcagtatagcgagaccccggttctccacaaaaaggaaaaaaaaaaaagacacacacacaaaaaaagaatgaaattctgtcatttgcagcaacacagatggaactggaggcctttataataactgaaataaggtaggcagggaaagacaaatatcacatgttctcgctcatgtgaaaacttaaaaagttgatctcatatagaatgatggttaccagaggctgggaatggttgggtgtggggaggatgaagagagcttggttaatgggtacaaacatacagttagaagcaataaattctagtgttgatagcacagcagagtgactatagttaacaataatttattgtatatttcaaaatagccagaagagtagatttgaaatgttcccaacacaaagaaatggtaaatgtttgaggtaatgagtagcttaaccaccctgacttgataattacacatagatatgcatgtatcaaaatatcacatatatcccataaataggtatattatgtatcaattttaaaaatgaaccgcctactaggtatttaacaagttaactggctttctctgcccaatgagattttgttttgactactgcatttgtgaagtttcaaytggggtcttgttaaggctggacacagtggttcatgcctgtgatcccagcactttgggcagccaaggtgagaggatcacctggggccaagagttcaagaccagcctggtcaacatagtgagactccatccctacaaaaaactaaaaatattagccagctatggtgcattgcgcctgtagtcccagctacttgggaggctgaggcgggaggatgactagagccaaagaatttgaggctgcagcaagctacgattgcaccactacactctagcctcagaatcagagcaagagtccgtctctttaaaaaaaaaaaaaaggggggggggaggaatcttgtcattttttaatttgaggattagcttctcctttataagagagccaaatcagaagagtcactagattacaatagctgctgggaagccaggatatgggagcctagacttagaaatttcaggttatgtcagagacctccattttcctgtcatttactgcaaagaatcctattatcctgccgtttacctaccctctaaaccctcaatcctctttcatttgctctggtccttgctgactcatcccctccctccctttttcctcccacttcagctgcatgcttggttctggcttattcatcttctagtcaattaacgaacatataccacgctgttgtcatgtggtcagctatggagtcattctcatactgtcactcttcctaatacggatctgtttcggccacagactctttcatatctctgccccaaacctctcatccaccaaatcttgttcctgtgtgctagaatacaagcaaaactgagagctatgctggaaaaaagatttatggattggaaaatttttaaattgataatgtatgtatcttcctaagtaaaagaccctaaggaaatactgaaacctaaaatcattcccataaaaagaaaagaaattaaaacttgcctatggtgaccataatacaattaacataacattgatgattgaagaaaataagaaaaatagttataagattttacaatttggtttctataagaaatgaaaaaatgatagctaacaggaaaataaaatgcttattctcagtttcaaggttctcatggtcccctttactttcttccctgattatcttggagatatcaattcttaagcattaagtcttgaaaatcttggtggtaaaactgtaatcaagaaacaaagcttgaaaagtgtgaccactcactagaaaacaaagtggaatggaagagaaagagttagagatcacacaaggaaaagcagagacaatgtggaagacctccaaccagaaccacattcacaattacccagtgctgtcatttttgttctatctctacrtaattagagaattggtatgaatttctagatcaggtcatcaatgtgaaactggggtccaaaaggccaaggtaatgattaagagttgggtactgaagaaaatggtcatagtcccaggacaacaaaaagttcctattttaggaatttaatgtctcaagctctggatatcacagcaataggtattctttaaattcataatcaatcatttttcccaaataatttcatacatttataagcaatgattaattcactgaacaaacctaagtcacaatgggctttttgtttaagtattcattgtcaggaaatccaaatattttataawtcactggacagtaatgaacaatgacagacaaaacactagtgagtaaaaayactaattatgttactgtggtctttgtgtggctttggcacaaaaggttgtttatttacaatgctgcaacatcaccttggtaatcaaaagagtggcatatgcgcactggctgctcaaacattaactaccaatgagtcatacttgcagctgagaacttactctgaaaaaatagggggaggaatgctgtgcctctaagttaaaaacaagctctggtgttcatgctcacatttacaaggacacatggtgaaatcttgtctattttcttgtcaattgatcttctttcaaaataaatttcctttttttaaccatcacaaggaatatttttattaataacattggtaaaaatctaaaaaggcaagcttattaaatctttctaacttctttctgccactgaactacttgctgactgctatgtgacagaatgacatcacaccaggccttaagatacgcttgagatacaagggtaaagaagacacaaggcttgttttcaaggagcttataatcttatggcagggagtggggagagtgggaccaatatgcaattacaataaaaaaatagtcaatgcctaatcatcaataggataatataatcaggattttaaaaatatcccaatgttcttcctcatctggactctggaaaaaataaaataaaaaatatggccaggcacggcggctcacatctgtaatcccagcacttagagagggcgaggcaggcagatcacgaggtcaggagatcaagaccatcctggccaacatggtgaaaccccgtctctactaaaaaaatacaaaaaattggccaggcgtggtggctcacgcctgtaatcccagcactttgggaggccgaggcaggcggatcacgaggtcaggagatcgagaccatcctggctaacatggtgaaaccccgtctctattaaaattacaaaaaaaaactagctgggcatggtggcgggcgcctgtaggcccagctactcgggaggctgaggaggagaatggcgtgaacccgggaagcggaagttgcagtgagccgagatagtgccactgcactccagcctggtgacatagcaagactccatctaaattttaaaaataataaatatataaataaatggcaaacttgggcctaatatgaagaacttcaaatacactggactttcccacattaaattagcctgaagagtggtgaactctatgattagaactaagtagtcaagccgatttagatgactgtaagaaaatcctaaaagtaattcttacactagcgggtaggggtagcaaggggatttgaaacagaaaactaaagcacttcctatcttggaaaagtctgcagctaccttgttagttgcaggcaagggtattaagatgatgcccaccgcagctattttagaagtagtgggtgatctcaagaagcagaaaagaggccagtagtcaccactgaactgcatataggacctagaaggctttgtgacctttacatgtttgttagaaaaggtactgggagacagaccaacgatggccagcctacctgactatgagtcaacagttggcctaaccagtacaacagagccctcctattcccactcatgacaatgatggatataccagtctcagagattccagtttttccttgctgcttaagtgaaaagcaatttgtatagtcacctttcctctaatgccctccctgtttactcctcgctttcagtgcacagagaatgctgaaacttcaagagcttgcaattttctgtatttgggaagagtaccaacccagcagcacagatgttattcctacctaacaaatacattagattttttttggctctatattgaaaagggaagattggtctgatttggtggatctatttgaaagggcttacagaggaaatcctgaaaactggcctgtccacttccccacttaaacttctaagctggactggattaagcatgttgttacctgacccttggatttatgagacatatacaaacatgcttatcataaatgggctgtgacagtcttttccctaaaacttatgaaacctagaataacttaacaacattataaaaccaggaatgtaagaggaacaacaattaaaatgtagtcctggggcatgtgggaagataagcctcaagttatgtatacaccctgtgaactcagttgccagtcttaaatcttatgccaaaaacactccaatcaattaacaaatatatactgagaggctactgtkagcaagaattcatattaagttcaatgaaagacaagtccattgtgggctccctgggttataactatagctgattattgctatagtcagggtataataaaacttgaataacacacaatgactcatataattctaaatattttaggatgcagaactcaaattccttcagtagtaccttcatagggttacttgaaatagaacaaacagtatgatggctcatgcctgtaatcccagcattttgggaggctgaaggcaggaggatcacttgagcccaggagttcaagaccagcctgggcaacatggcaaaaccccatctctactaaaaatacagaaaattagcctggtgtggtggtgcatgcctacagtaccagctactcaggaggctgaggcaggagaactgcttgagcctagaaggcccaggctgcagtgagccgtgatcgtgccactgcactccagtctgggtgatgggagtgagaccctgtctccaaaacaagaaagaaagaaagaaaaaaaaaatagaaaccaagctttagtcattcatataaaacctgtcacagtgaagggggcataaagcagaggaaattctactaatgtcaaatagtgaaaatagctctgaaagatttcatcttctgagagacttgtccctacaggtaaacattagcaaaacatttttctggaagccagtaagatatttgagaaattagagctttttggtaaaaacaaacattttttacagtgattaacttaatttttaaaaattgccgaaggtcataggttattacaatcatatggatagctcttgcaaattaatgaggacaatggataaaatgacggttctgtaatatttcagaatgtatattttagtatgtcttcaaaacagataaaccatctcagtatggtaaagtatattttgcaaattaccaacatttcctcctttcttttggtataagtaaagaaaagagaatgaactgctgaaaagcaaatccttcacactatgagtatttgacaagtggaaggcatctgcaggttggtctgtgggcatagtcatagcaacacagttcccctgtcaactcaactccaggaaccagagcgcaagtagctttgtggttgactatgtttatttacctatccggcaagcaggggagatagatggtttggtaaaaagggcaaaccagacaaaaaaatttgtatattttagggcttccagctaagatacatactaagtaagtggagagaaaagacttgacttacctgcactgccaagctgtttataaaatctgtactctaaatgaagctgtggagcacgtgattttattggttcctgaaatccaaaaagaaaaactgtgatcagatttaaacaaatgggatttttccattcttaaatttttggagtaaacgagggctaagatcacccaatgttttagagataatatccatatataagagccttttctaaccacaattggtcttggacagtatagctaagagaagatgaaggtgaattacatacaagtccttccatggatagttaaataaaaatagactttgcatgagctatcattcaaggatatctttcttgcaatgaaatattctcctggaatgtattctgccaggaaacttgatgccaaacctttaaataaaaaaataccagaatgtatttcctgcttgttttgttcagaattttgggtggttcatggttttattatttttagaaaaataatgcatgctcagaagaaaattcaaatatacaaaaattaggaagaaagtaaaaatcatctgtgatcctgtcactttaaagagaggcactattaacattttagtgaatgtctttcaaagtatttatttatctatatatgtattaatatatataatatagactaatgaacttaattttatataaatgagattataatatatttgctgttcattaatgtgctattgaattcaacaatgtaataacatattcccatggcggtaaataaacgtgtataatttctttttttttttaagacagggtcttgcacactgcagtcaaaacctcccaggctcaagtcatcctcctatcttagcctcccgagtggctgggaccacaagtgtgtgccaccactcacagctaatttttaattttttgtagagataggatcttactatgctgcctaggctggtcccaaattcctgggctcaagcaatcctcccacttcagccacccaaagtgctgtgggattataggcataagccactgcacctggcttatattattttaatggtttgagtattgccctgtatgtggatatgtatttatgtatgtatgtatacacaccctccccataatttttggacacgtgaactgttttcattttccaatattatgaacaatgcttttaggaacatccttatgtatatttctttttaaactattgagaattaaagattgtaaatgcaattaaaatatgtaacttcaatcaatgtggtgttcaagtttccaaaaatggagttttctaaaaacctcagagataaagcagccaaacaaccatactttgctctataccaattgagcaactggctggctgattattctaaactgacagtgtactgggcaactggctaacaagaaaaccaaacattaccctaaacacattataatctctctttaaaacctcaacagtagctgacatggtggctcatgtctgccaacccagcactttcagaggctgaggcaggaggatcactggagaccaggagtttaagaccagcctgggcaacacagcaaaacctcatctttacaaataaataaataaaataggacgggcatggtggctcatgcctgtaatcccagcactttgggaggctgagacggcagaactgtttgagcccaggggttcgagaccagcctgggcaacatagggagaccttgtctctaccaaaaattaaaaaattagcctggcagggaggcacgctcctgtagtcccagctactcaggaggatgaggtgggaggattgcttgagtcccagagatcaagactgcagggagctgtgattgtgccactgtactccagcctgggcgacagagtgagaccttgtctcaatcaatcaataaataaaataaagctcaacatctgcacacccattaggatggctattatcaaaaacagaaaaataacaagtgttgatgaggatgtggagaaactggaacccttgtgcactgctgatgggaatgcaaaatggtgcgaccgctctggaaaatggcatggcaatttttcaaaaaattaaagacagaatcattatgatttacaattctatttctggatagatgctccaaagaagtgaaagcaggaactcagatttatttgtacatccatgtttatagcattattatgcacaataactaaaaggtggaagcgacctaagtgtgcataattggatgaatggataaacaaaattgggtatatacatagggtgaagtattattcaaccttaaaaaggaaattctgacacatgctacaacacgggcaaaccttgaggacatcatgctcagtgaaataagccagttacaacggacaaataytgaatgagtctacttaatattaagtacccagtagccaggcgcggtggctcacgcctgtaatcctagcactttgggaggctgaggcgggtggattgcctgagctcaggagttcgagaccagcctggacaacacggtgaaaccccgtctctactaaaatacaaaaaatgagccaggagtgtcagcgtgcgcctgtagtcccagctactcaggaggctgaggcaggagaattgcttgaacccggcaggtggatactgcagcaagcctagatcgcaccactgcactccagcctgggcgacagagcaagactccgtctccaaaaaaacaaacaataaaaaaaattaagtatctagtgtagtcaaattcatagagacagacagaatggtggttgccaaggnnnnnnnnnnnnnnnnnnnntggttgccaaggggttggggggaggggagaatgaggagttagtgtttaacagatacaaaatttcagttagggaagatgaaaaagttctggagatggatggtggtgatggttgtacaccaatgtaaatgtacttaatgccattgaactttttttttttttttttgagacggagtttcactcttgttgcccaggctggagtgcaatggcatgatattggctcaccacgacctctgcctcctggttcagcgattttcctgcctcagcctcccaagtagctgggattacaggtatgcaccaccacacctggctaatttttgtatttttagtagagatggggtttctgcatgttggtcaggctggtaccaaacccctgacctcaggtgatccgcctgccttggcctcccaaagtgctgggattacaggtgtgagccactgcacctggccaatgccactgcactttaaaaaactgttataatggtaaattctggatatcatctcttattagataatattattttctcctattcctttccatgggttgccctttttagaattctgttgacagtgtgcaaaagttttaaattttgctgaagtccaacttagctagtttttttcttttgttgtctgtgattttggtgtcatatccaagaaatcactgccaaatccaatgtcatgaagcttttcccatgtgtattctagtaaaatattatagtttcaatcttacatttaggtctttgatccactctgaattaattgttgaatacaatgtaaagtaagaatccaacttcactgttatgtgggtatccagtttttctggcatcatttgttgaaaagactgtcctttcccccaatgagtagttatttgtcctttttttcttttttcttttgagatggaatcttactctgtcacccaggctggagtgcaatggcacaatctcagctcactgcaacctccacctcccgggttcaagcaattcttctgcctcagcctcccaagtagctgagactacagatgcacaccaccacactcggctaatttttgtatttttagtagagacgaggttttaccatattggccaggctggtcgcaaactcctgacctcgtaatccacccacctcagcctcccaaagtcctgagattacaggcatgagccaccacaccccgcctatttgtcttatgtttaagacagactccaaggaaggagattccataacttccctcgacaattcatgctgatgttgaacaagtttcatggtttggaacacttttatattatactcaaatctcactactgaaacttaagcctatttttcttaagtcctcagcaaaaaaataaaaaagctcctcaataaccacgaatactattaagtagctctcttcaaataacaaaactttcttttctcaggctttcctagactttcttttcttaggcaaagtaatttcaaattcctttcacctttcctcattggtcctagtttttaattctttgatcatctttgaaggctctttcctgaatccacttgaagttttctgcatttttcttaagatatagaatccattaatcaaagaattcagaagtttctccgaagttgtctagtctatccctctgcttctaggaagattttctctaaatcaattcaggccagactggaatgtttgtatctgtaggaagcgctatgaagaaagaactcatacccttgtttgagtataaaatcagcaatcattagagttggacttcaagtgtctcaagactttcagtaaaaagaaaagtacataagactaattatactgtagagtccctttcttatttatctcttcagatagagaggtatcatatcactcttatgtctccatctggttgcagatattccactgaatcactatcaaagcagccaggtatagaatttttccattagcaaaataactaagaattcacaaggaaccaaacagaaacagtgatgacaaatcaacatggaactagaagtcgatcaaaacactagaaaagggactattctttccagagaaatcgcttttggattctgacaaaccacagaggcaatgaattttaaaaaccacacatccttcctcaaatattatactctcaatcttcatgctggaaagcataatagaaaatattcaatctgacgttgggtagccaagctagtaaattaaaaatgcaaaactccatagagttcaagggttgaaaggcatacacatcacatatattcagacatgagggtcttattatgaagactgagagaattacacacttcagccaactccttagcacatggccatagcctgctcagccaattgggcttcaaggtgcttttctggaagcactataagtagaaggcattgcaaaactcagtctacagactacagaaggcagcaatattagcagcacaggagatttttttttaaacccaactgttagaaaacctctgttaaaaagaaccctagaaatgtgggtgatggataaaggaggggctcattacactattttgtttactttgtgtacgatttttttaaaggtttttagaaatctaagaaatctaagaaaaaagagtccacaatgaagatccaaacaaagtacaacagaaacagcagcagcagagcttccttgcatttctgtgccagatgctgattacatttccatagagggctgtgcatttgccagaatatttaccatattctggaaaacatatgcctgcctaaaatcctaaacaaacagcagacagctaccttataggagtgtagtgcttaaggcaaattgaccattacaatccaaagagctcaattactgccttcatatcttcctttggagaacagaagcccaaaagcaagaatgaaagcctgtagacaaaactgttatcctctaaaatggctttgagacttatttgaaagagaaatgcggtactgagtcacaccatactagattgtaagagttccatttttagctttaaatagtggccatacaaagcagaataaaagtttttaaaaaggaaatgaaatgtaacgatcaatcatgtcaacaatatgttatgtaagcttatctatacaggttgattggtataacctggcagaagaaatcaagatgaaagaactgtccctaacagaaagcctaacaaatatgtagtaatgtagcaaatttttaaagtgttttaggaagtgctttgttctcttagaagtcccaaataatcaaagattattccaacttatcagaataataaaacagaaaaagtaaaaaaagcaggtgtactagagaacacttttaagaataaccaaattcctataaattaaaaaatatggttaatattatttttttgagacagggtatcactctgtcacccaggctgagtgcagaggtgcaagcaatctcagctcactgcagtctcgacttcctgggctcaggtgacttcttccacatcagcctccaaagtagtggggactataggtgtgtgccagcatacctgactaattttttgtattttttgtagagacagggttttgccttgttgcccaggctggtcttgaacttctgggctcaagcaatctgcctgccttggcttcctaaagtgcttgaattacaggcatgagccactgtgtctgttcggttaatcctctaatattcaatctaagaggatatttgacctgcattgttacatgtattacctctcttcctgctcccatctatccaacaagagttccaagtcaaaatacaaaaatacttggtttcctagaaggtacctgctgctctaagccctgctccctgtccacccacccctttgtagggaaacaaatctggtaactgtcagttcctcacaagacaaccctaactcctccacaagcaagctggatgagaagaacaaccaatcacagaacaagtgtggatgtggtaagtgcaattcattagaaaataacaatgccaggcgtggtggctcacgcctgtaatcccagcactttgggaggccgagctgggcaacatgatgaaatcccatctctacaaaaaatacaaaattagccaggtgtggtggcatgtagtctgtagtcccacctacttaggaggcagactgaagtgggaagattgcttgagcccaggaggcggaggttgcagtgagccaagatcacatcactgcactccagcctgggcaacactgtgagaccctgtctccaaaaaaaaaaaaataaagaaagaaagaaaaagaaaagaaaagaatagcatagatttccttcaatttccttcaaccattaactcctctggcttccaactaataaaacaaagctacctgtaaatcctgggacacttactatgaggacaaacacagagtttcagtgaaactagtcatacgaaacatttcacatgaaaaaatggttttgttatcaaccttaaatataagataaagaattctgtcttttaaaattattagtcctcaaaaataataaaattattacttttttaaataggatatcattttctatgactagtttaattattcacaaggttagtactaatataccaattgacttctttgcttctaatatgaccatatggtatgttttccatgcttgacagatttttaaggccatgattagatgatcagttatgattttcttctaagtacaaaaaataaatcagttaagttagagaaaaaaacagtaaaatttttgaatgattttatctttttaagatacctctgtgaaagattaagttcacagagttactagttcttccagctttttttaatcaactaatttttgagtcatcattgctaacactaaagttagtatcatttaactatatagtgttatatagtatacagtgattcatcactgttaacactataaatgaagaaaaatgtgggatcatacacaaaaaaaaccccaaaccattagcagttttgcgaatgaatgcttaaaactatttcctataaaaagatataagcaatgggagcaccaaaacattaattaccacaaacagattctactcaccagtttgattgctacatattcattggtgtagagatttttacctaagaggaaagcagaatgtatatgttttagtgacatttattctgggaaaagcaaagcaaaatattagcttacagggtcatgagaaaggttatattcccaatgctgttcacataaatgaaacttgatttataagcgaaaagctacagagataatgagatctagcaaggctagaacagcttgaaaatttagaaatttaagctatacctgagaattttcctaaaagagaaaacaaatctctcttacacacacacacacacacacacacacacacacacacacacacatgcatgcatattaatatttcccaactattaagccacaaggcaattcaagaagaaatgccagaatttcaaagagattttagctcttggcacaataaacacaaaccttcattcttcgaactaactggcaaatagaattctatatattttgtcatggtatttcgtgtcaactttggatggcataaaggacagtgtgaataaaaccaattattgcccaaacctacttttggagaattcatctactgcttgtaaggagatgattctcaaagctgttttgactgtttaccagaacaacagacttatatctttaactatttacaggaaacagatcttcagctagacaacacttacacatctcaaagttcttcctgcaataacggtttttcctttaaactttcctatttctacaaatgtaatcaatattcccagacgtttagactaagaacttggaatgatgatgagggccagagcaacaacattcacttactgaacctgtaatatatgctggatactcagctcctctcacctccccatcctcactaatccttggaagccttaactttaattcctcctgagtgcttagtacatatcatgtagttcagccactgcactgaacttcgcatctcttcttacacgtttgccttcttatccagctagagtgtaaatatcttgaggatagggattttaagttttctcaataccctatggtgcttaagaccatgttcagcacatataaaacactcaaaatctcgactgattaaaagttattggtactgtacgtacagcataactatttttaaaatataccagtaaatgttatatttctgtaatacatagcggaatatatgtgcgtgaaaaagaatataaaaggaatat

SEQ ID NO: 98002 - DNA, 69799 bp, Homo sapiens
atggatcccatggcctcaatgcttctgaggtttttctgatgctactgaaattgtttctatgaggaaatttatatggggtttctcctctcaccttctggctgttggaagtgcattttttaggggtacctagggacaagtccttgatgctttcccaaatggcacacttactcccttggagagttcccccatctgccatccccctcctgtctcaccccatcttccagttttgagtttgccatctggggcaggaagtttccgagaaacagcaactgagagcaaaattcacctcttccttttgtcttctttttgtctaaaggtagactgagtttaagtccccttcttcccctttaccccaacccaggaaatactgaacctttcacagaggtcaggggcatacctgtccaggaggtagtgctggaactgcggtcctggtgcctgtccacaggtgtgtggatttggactcagaccaggagcccttaggtcttccttggtgtttgtcacctgtcagtgtcccctcacacacctcaccctctgagatctgcagcctctgtgcctggtggaagaagaggccaagggtctaggaaaagaagtggaatagactgtgacttcccagattacatccattccatgcagtaatgacattaggagtcctgggtccttgttttggctctgctattgacagctctgaccttgcacttaccactcaatcatttgcacttcagtttcctaatctatcaaaagaggcccactcggatatgttaactctactgttttgtgattctcactgggaaaacgggaattgagggaaaacctctgcctgctgccatggctgcctagacagtgtccttctccaccagcagcttcatgctcttgcagtagtgagaggttttctgtaccgtcttccgaagcctcaagtgttagagagggtttttgcctcagcaggaaggaggacttgcctagcgtcttgtaagcagcaatattccaaggccacatccagagaggttaaggttcccgtcgtccctacgttctcacagaagtgatgtcaggcagcgggtgccaaatcttggggcttggcttggttcagcctttgtatcagggatgcgaggcacaatcagcaccccacacatgaatccaagactgaatgagggctgctgctgtgagcgtccctggccggctgtgagcctcgtgtgtctgcgcagtgggaagcatggtgttgagcctgcccgctttataacagggctccctgtgccaggtggactatagcagcgtcatcacataaacatccctacttcactgtgagtaacctttctttcccccctctgtattttaactctgatccctttgtccttaacaaacaagtattctaggcctgatgtgaggctgtacatagacactgtctcattatccagttaatctctgtttgctgtcacagattcagccagcagtggcatttgcctgccttcaatttgaaacctttttttccattgtcacttacgggaattgctgaatgactcattgtgccgtggtcagccctctcgggttatttgccacaataggcctgaccagccagattaaagtgggcagtaactgtaagctgcctgtgtcatcagttcaggatctgtgtccccggtcagagctctaaattgaacattcagttcagccggttttggtttagtgccttaggaggcaggcactttgtcagtctgtggaatggatgggtatgtgcatggtacaagttagggattccaggaataaggcaaagggctgggtgagtcccactttagggtgcatacagatcactggggaagcatttttctgccccaccccctacaggttctgatgtagttgttctaacaggaggccttggactctgcattttaggcatgcattcaggtgattccttttccaggtaaacagcatcctgaaaacagcatcccaggggctttggaggagtgataggttcaggtttcatgtgggacatacaggaaacaactggtttttttttttttggagacagagtctcgctctgttgcccaggctggagtgcagtggcgcgatctcagttcactgcaacctccacctcccgggttcaagtaattctcatgcctcagcctcccgagtagctgggattacagacacacaccaccacacccagctaatttttgtatttttagtggagataggtttcaccatgttggccaggctgtctcaaactcctgacctcaggtgattcgcctgcctcggcttcccaaagtgctgggattacagatgtgagccactgcactgggccgagaaacatcaatgcattccattctgcaacattaatgcagtccaccctaaagtgggactcaccacagccctctgccttattcttggagagaatagaagacaaataggcttcgtctcacaagccagctcagagcagttaatagtggctgcagtggtgaagattctgaggtcatgctcagcttgtgggggatcagcaatagtgatgtcctccataggcgtggatggcacccgtgtagcacacatctgtcatcttggtggcctggacacagggtcgagagaccaggtcctcagctggcacaaggaaggcaggccaacatgcaggctgtgataaatccttacagtccttggctacctttcccttcctttaaggttttaggggtaggtgtagacagcagcagatgctataggaaaggctcagtgcataatggtgatagcagatgatggcatcagattgaatcctgacttgctatttatcagaagtgtgacatagggcaacttatttaactctgttccttgatttattcatctgtaaaatgggaataacagtatttaccccagaaaatggttatggggattaaatgagatgaaatctctagagcccctaaaacagtgcctggcacatagtgaggccagtatgtgccagctgttgcttttattatgagcttattgtgatttgtgggtacaaaagtattttcagctctttggagaagggaacttttggagtctaagatgctcttctggtggcttggctgtgaaattcatccaagaggaagtttcatcagatgcatctgaatgtcacgaaaacacttcttcctcttgtaaaaggaaagcgtaaaatgtatgagttggcttatgccttctgataacttatgcctgccagtggagctatgggaggcaggccactgagatacctggtggataactattgatttttgcttaaagttttgaaaaggaagaattcagttggatttttgcatggagaggatgttacctgggacctagtttcagaaggaggttgctggcattactgatagtacagtgaaaagacccagcagcattgaaacatttatgagctggctggaatgactttcttgtaaattgtaaccggctgcaccgttgtttagcaaagcctgccagggcagctccagcctgggccaagtattctcgaagcccagaaagctcacatgaggtgcgtttttcccacttaccttattagctttcacctaagtgacattgatgaagctcctactgtatgtctagcattatgcctggtgttgtgggggatgcaaacaaaatggcttagtcccctatcccacaagtactttatgctctggttgggtagatatgccaaacacttaacaaattaaaaacaaagaaaaaacaaaaaaaaaactatttccatgcactctctgtaaggagccaaatggatacatacagcaaggaccttgggatgttctctttggtatttaccacacagcacagagtggctgagatgtgtactcagctgtaacaagtacagtctgtgaggaaggccacatggttcctgtgggagttgaaagggacaacacgttgcaaactggggcatgaggacacacagtgtgagacctgggcgggaagggcagtggaattttcagagaaggatttctgggcttactgactcgtaccagcagaggcataaacataccacgtggagaaaatggcaggtagagcgtttttgcaaagcatggaatctggatgagggctgagctcaggatgctattggtcttcgaatgccggagtgggagctgttgaacggttctaagtaggagagtgaaagaccagcatggaggagaagtaagactgggcagtggggtgggaggggccataaagagagaagcagcagtgaggcaggagtggaggcagcatcatggcccttgtgagagcctgacctgggtccactggagagacacttgagagagactgtggcttgagggacaccgtcaagaaactaattagcaatgtcatctgccttgaaagatgtaggcttttttatccaccggtcaacctcttatgttttacagatccggccagttattgaacaaacctttcctttttctaaagttccagaagccttcctgaaggtggaaagaggacacgcacgaggaaagactgtaattaatgttgtttaaataaaaatgcagtttagtgattgttgacgttcttatttggtgagtgcctgtgagcccaaatttttttctagccatccctttcaaacatttttccagattagattatacattccatgatacaagctttaaaaaataaacacaccattttggccagtaattgatataaaaatatcagcacttggatttgtctgtagtcagtagaaattcgaagttttttcaagctgttccttcacactggctttgcaggttgttgtggcaccttctgttttactagcttaaactactttattgtcttttttgttttagagacagggtctcgctgtgtcacccaggctggagtgcagtggcacaatcacagctcactgcagccttgaccttaagcgattctcctgcttcagcctctcaagtaggtaggactacaggtatgcatcaccacacccagctagtttttttgtatttttagtagagacagttttgccatgttgcccaggctggtctcaaactcctgggcttaagtgatccaccatgtcagtctcccaaagttctgggattacaggcgtgaaccaccctgctgggcctgatcgtcttaatgtacaatactaaaactttcagtgtatagatggatgttggcatgaagagataatttaaagctggttccttcttgaattcatcactgagcagctttctaactgccaaggtttccttttttgttcctccaccataatgtggtcaccacagctcttaaagttctaaatctcttagtgtcatatataaaaatctgcctggtgattcatttgtttatgctcttaatattgaaaggtgagagcagagtttctaactttttaaaacccttacatcttgcataaggattaggcctgtttcggcaattgaaacatgcttctctgagggcttttccatggaaattgcagccttccaatggagcccaaagcttgccactttgatgtcaaatgtttacatttagatatctctccaatcaacccattgcagtgtgcacttcgaatattcatttacggtaagtgtttttacttcctaatatactcatcctcagtattgcacctgatatgcttgcttgtaacttttgatgtagacctgttttgagatttctgcttggtttattcctgttagacactcgtttggtagcatgtatgttagatgtaggcttttctctaaaattgttggtctggtcttactaccgagttattgcaaaagaaaaaaaaatctgattttccaggtgtaaataccagctgctcttgacttccatctggagcagcctcagctcttttcctggagggctcccaggtggtagtgggagtaaaatacttgagccaggacctcactcatcctcgtttccactcagaaactatggagtttggaaagagagtggtcagcaaatctttcttgctattataccagcacccctcaaacctgcttcatcctaatcagacatttgtttctaatctgctagctgactctctttgaagggtgagatgagggctactgaatggactctcagatttcatcaacatagttaaccagaagcaagtttatttaaragatcagttcagcacaggctactgtagaatgtcttaccccaccatattgtaatggtatgcacaaaaggcctaaaatcagagctatatatctaggaacaagacagatatgttggatgctgttgtacatgcaccaataatatttkaaaacaagacaaactattycagtgaccataattgcctaccatagactccagagaagatcagcattttagaattagaaacacacttgaatagatggaaaagaaacaagctgttctacctgtgacaagagcaccagtattgagtgatgaggacaaaaagaggaagaatatattcaaggaaatgtttagcacttttgttcaaagctagaacccactgttggaagagcagcrtatgggctggtgtcttgtcagttgttaagcagtttgtttgcattttgaaatgcttactgcagttgaggattccaagattgcttgaagattgatttgactccggtcaaatcaagacttgaccagcaacatccctaaaggtctcttttccttcactttctggggataattaattgctggtcatcctcttgagcctttcacacctcgtttagtggctatagtgcccccaagacctgaggctgtccaccaacagctataccctgaagcatggctgyagaacactgcagggaaggcagccccatgcaggccatgtgtggatgcaggyggataggaggacaagaaattaggctaaaaaatctgagtttagcaaaaaagtatgtaacattgcttcagcacttgtagatgagtaaggatggctcataaattaggtcataatagtgttccagtagcagctataagaaaggcattaaacaaccctcatttgtgacattctagggcagcccatggatgagttaaaataattcaaatcctggctgggcgcagtggctcaggcctgtaatcccagcattttgggaggccgaggcgagtgaattgcttgagcccagaggttcgagatcagcctgggcaacgtgatgaaaccccatctctacaaaaaaaamacaaaatttggctgggcttggtgatgtgtgcctatagtcccagctacttgggaggctgaggtgggaggatcacctgagcctggggaggtagaggctgcagtgagccgtgattgtgccactgcactccagcctgagatcctgtctcaaaaaataataactcaaatcctactaacaaatgttaccagactttgacattaaatttttaaartgtattaatttttaatatgaactaaaggaaaatagtattttgtttagagttccttaaatgtgtgaatacctaaggctttcccattgtgctatgcagcatatttaaaggttccagaaagtgtttaaggccaagaaccaaaattacaggcctaataaagtatttcttctcagatgctaaacagttctctacctttcaaacttaagcctttgtcttaccctttaaagtgtaagggctttgtaggtccacaaagttggtaaatttgttccagttctctcctgtcactatctttggaaataatttaaaatgtacacagtcttgaaatcttgatatracattttacaaaatcacccaaaagctgctaattaggcaacctgtttaagcagctaccaaaaatgaaaggcaagaaatgaaaggaggacaaattattggtttaaagctatgatagtcttttgaaacgatgagtaagttctctgagtcatggcagcatgatttaaggttgaatttagaatcaatgaaggaggagtcgatccactttccagtctggtcttccatcagcattgtcctttttaagaaataaggtggctggaaggacctccagaagattcttcttccttctttgttcaggtatataggaccatggcttcccacacttgtgtaaacttctctttgctgacagtgttgaggataatgtgattttgatcatactgtgtgccccctamaagaaaggaaaataataaaagatgaatgtacccatggtgaagggtctatagcagacacaattcccctaacaccagtacagcaaaagtaagcaagtaaacaaggtgtagaactgcatgcctcaaggaggcaaggcagggagggaagcctgggcccctgtgggatgagagggtcaacctgccatgggtgaatctgtccagatcccaccattggggcaccagcaccttcacacaggacatcccacctcacgggctcctttttctacccagttcttaagagctagtccacagtcactcttacaatgtctgaaattcaagggaactgggaaaacccgagagaagggaaaaggagtaaagagactaacatatatttggtggtgagatggtagattcgagacaccagcgaggaaagagcaggtagtcctggcagtggtggaaaggtgggaggaatggttatcgaggaacagcacttgcatgaacaatgaaaacgggctgtattaggtcaaaggggaggtttggatgacacccggaagtacataaggggacgcggtagcattgtcactactggggactcagttggtggataaaatttcatagcatttaggatgctgagtaccacagtattgtaaaactattatcatgaactctctccctgttaccagaatgtttgtaagattttccaaaggtgcttactggatgtttcagatactttagtgctaaaaacagcctcatggcttctttctttggagaagtatcattaacaaaagggttatctgatttttttttttccagtgtagaataaagatcccttcagatggcttatcctttttttagcataaacctcagcaccaaggatgtatcaacaaagaccccatcaaagtaaaaatctgtgcattttgatgcagggagtgactggtattgaaagcatgcttcctccttggatcaagaagaaataaacattcttttcacctttgaagcatttacaaaatatgaaaaaggtttgggaatttacacaataaatctaggtattatagttgaggaaggaaatcgtctcttctcttgtgagacactgatttatcatcattggtaatctacagcctctacacagctagatgtatggctagatgtactatagaatacaagggtaaggtgttttgggcctttatgtgtaagtttgtagcagtagggaaaaaactaccagcaaaccctacactctgccgagacagagacacacagcatactccactgaaatttcaggaagtattaaagtcacaatgtctcttttcattcttcattatagtatgttaaaatactttttgtattttaagagtatcttttgtattttaaaagtaaagtatcttaaaatactttcatataaattcaactagaatcatgaaaactagaaagttcttgagaaataatttgattcattctcttgcctttggagagtgtttaaattgtgcagacttcatgttttttaaagtgaacatgaatcagcttccactgttgttacaaggtatgtggtctggaataatacatgaatgtctaccaaaagaactcatttcccaaacacaagaagatgagctagaagacagatgcatgatctaataattcttagggcaattttaatagataacaaatggttcagtagttgtagctaatggaaatcatggtctgctagtaagtgcaccaacgagaagagacgtgtttatattttcctttgcatggggtgtgggacgtgcggcgctgctctctcatgtccacaagatggcaccattctcccagtctgagaaaattaaattcagtttaacaaggaattaagactgttgtagctagccgggcgtggtggcaggcacctgtaatcccagctactcaggaggctaaggcaggagaattgcttgaacccaggaggcggaggttgcagtgagccgagatcgtgtcattgcactccagcctggacgacagagtgagactccgtctcaaaaaaaaaaaaaaaaaaaaaaaaagactgttgttgctaccgtgctagatactgagatttcacaaatatacgggacattatgcttactcagcaggcacttgagtaatttatatagtgtcatttaggaaggggctctggagctttaaaaagaagtcttaagaaacctagagtcccacggttcatgtcagagccaagacaaggagtgaggtgtccttccttctggtccgctgctaatgtaacaagtcagggacatcctgtgtgcctagcgcatctagaacgtaaactgtctgaagccaaggaggaggcttttttttttttttttcacgctggtgccctccgtgtctagcaccgagcctggcacatagtgtgtaccccgtgaatacatgttgaaagaataagagaagaaagctctagctaaggatcatagtgttgtccaccctggacataggaagcagatcacatttgtaaaaaacaggaaggtttggtcagatttcctttgagaactacataccctactttctctaacattgtgtcaaaaactccattttttccaattgagtcacatttctttggtgtctctggagattttgaaactcttgtcaacactgaagcactctagtgcaataaagtttatcaaaataagaataaacaaagatctgcataattcttaactagtttgaacctcaggttgatcatctataaaatgagtatttcacctgtctacatattgacaaatctgttgtaccaaatgtaaggtgagggagctgtactatatgttactgtttggtttctgaatattgcatttattttcttatatccaagggtactacttgcattttatatgatctttgtggtctccatccagcctgtagttgcagtgcttagtttgtgttccctaagtgccccctttaatgaaggcaaaggcattgtttgcttctgagcatctttccaacttctcagattctgtctgatcctaagtccattgttttaagtgggttggccaagctacctacctggagatcattcagaagtgacagccacttttgctccccatacagttaccaaagcccctgatgaaaatgtccagattcgttctccaytatccagaaaagttgttttttaaaaatcagattacagcactttcttgtccctacaactttttttttttttgagacgaagtcttgccctgtcgcctaggctggagtgcagtggcacaatctcggctcagtgcaacgtcygcctcccgggttgacgcgattctcctgcctcagcctcccaaatagctgggactacaggcgcccaccaccacacccagctaatttttttgtattttttagtagagacggggtttcaccatgttagccaggatggtctcgatctcctgacctcgtgatccacccaccagggcctcccaaagtgctgggattacaggcgtgagccacggcacctggctctttacccctacatcataaactttaatgacagcattggcctaaatccctgattaaagtaaaattgagtcattttgtagtgatgatttaaaatagagtatgtaatatactcataaaaatttaaaaaaattaatggagtatgtagtatggttacattatcaccagttcgctacaaaacacaattgtgctgactttcctgatagggaataaaaaagtgcccattaatttaaagcagaattaccccagatgacatgaacacaccatctgcacctgtcaatagcaacacactagttcactgagttcccacacagaggttaggtcattcttatgttatttttaaatgactatcagtggttctccgggtgtgggcctcagaccagcagcattggcaacacctgggaacttgttagaaaaggaattatcaggccccaccccagacctacagactcagtctctgaggatgtggccccacagtctattttaacccgccctccaggtgattctgatgcaaataaagtttgaggacaaccacgctaaatttattctcccccaagcaccatcagttcactccctattagcttcattgaacacatgttgcattgaaatcctgtaggctgtgttaattcctttgagatcttagatcttttcaatgaaaggtcacgtgtatacatgagaatcatcaactctaccgaactaagtgcaatcacggcctttcagcttgtgatttttagcctaacactattataataaaataaatgtttgaagtcagcctatggccagattctggttcagcagttacagctgtgagattgtggccaaactggccaacccctttgarcttccggggttttgttgttgttgttgttgttgttttgyytgtaaaactggggagaaaagagggagaggggataatgtaggcctcatagggcggctgtgaagatgacgggacatggtgtactgaaagtggctagcacagcagctggcrcacagtaggggctctcttactgttactactaataatacattcatcattttcaaaagttatgaatagatttttccttaactaaaagacatacacattacaataaagaaaataaaggaagtgacccttacctttaatgtctaaaactaaatttggcttcaacttgctgtaaatcctgccatcggacttcaagctccagaactggctgtcagcattctggtccagggccaggcctagcttggagccagatgttaccaggctgcccacaatcgtcaggcagcagtcttctgctatctgctcagtggaaaagaccagatatcttaaatatgtatccagctgtaagtctcatagcaattatttctctggttacattgggctttaaaattatcttagttcctagcttcatttaccccacatgaggcagttcagctcttagccaactagaatcggacaataaatatttatgccatttatttcagatgacacgaatgatgggaaaatctcaatgtttgtgcatcgtcagagacttctgccctttgcaagactatcttactagtagggaaagcctcataacattagaactgcccatcatatttttccctgtcataagtgaccatgatcccaggcaggttctgtagctatatctccctctgacatctccacctctgcttggcctgaccttccagtatatgactgcacctctaattttgtagcactgggtggctaaagggcattttatcattttaaaactcggaattgcatttattagcatttgtctttccttcatgagaattaaaattttctaaacaggcatgctttccagctatgaaaacagaaaaatgcagactcactagagggtgttttaatgcaaagattttatgagcccttccctgaagtgaatctacccttaatatataaataatgtatggcagtcatgttcacatgccattaacaaaaattactggccaggtacagtggctcacaactgtaatcccaacactttgggaggccaaggtgagaggatcacttgtgagaccctatctctacagaaaagttttaaaaattagccaggtatagtggcatgcacttgtgggccccagctactcaggaggctgaggtgggaggatcccttgagcccaggaggtcgaagctacagtgagctgtgattgcaccactacactccagcctgggcaacagagctagactctgtctcaaacacaaaaacaaaacaatgttgctataaaaatgcctgttaaaagtgtattattgtaggccaggcgcagtggcttatgcctgtaatcccagcactttgggaggccaaggcaggtggatcacgaggtcaggagatcaagaccatcctggccaacatggtgaaaccccgtctctactaaaaatacaaaaaagttagctgggcgtggtggcacacgcctgtagtcccagctactcgagaggctgaggcaggagaatcgcgtgaacccgggaggtacaggttgaagtgagccgagatagtgccactgcactccagcctggtgacagagcaagaccccgtctaaaaaaaattaaagtatattattctatattgagatgaaagcactgtgataatctaggagactttttctcattgacctattgaattcaaagttgttaaataacatcactgaaatgtctgttagaaataactgctgaaagacaccattttcttggattaagacaattcaaaggcagaaagcttcttttcatgattccatattacaactacttctgttcctcctgctagttcttctatgcatgtccaaacagtacttctgtttactgaaagaattccccctccagcacaacagacccaattaacgagttgtactccttttcgcaaggctgtgttccttctgctgactcacggggcaccaggttttttttggttttttgttttgttttgttttgtttttttaaagaaaatcaggagccaacggtcaagctcacaaaatcaaggagtaaaaaagttttatctaccatagaagcatgagcttctttcataaaaatcttactacagtcagcttttaagtgtctgttaatagtaggaatgatgcaggagggacatgggccattttctaatttacaacgtatgacacttaggaaatggactgtgyagcacacagagggatctctttacccttcatcccgttctgtggatttccccaaaacaaaccaagagtgatttttgttgacagggctggagcttatagtttgtttctgtaacagttacattaaggaaaaagggaagaataacacacttcctttttctactactatataaaaatcaagcatagaaataaatattctatcttggatcagtgctatatttacctttcattttaagttcctagactggttctatcagagctaggatatactgtcatgaaaaaaacaaattcatttctgaaagtactccaggaattgtgaaattgcatctacttgaagaaaaratcaaaagcatatgaaaggatgagtcacctcctagcaaagccatcacaggcccccgtggaatcctaaagctcaccctgcatttgatacatccttcttgatagatccaaatctgatcatcggccccgacatcctccatgacctgtatcctcagaagcttcagatcctctaagtttccattggttgacatgaataaccctgttgctttgtttcgaagtctgaaataaattcgcttctagaagacaaaacccccagcagttgttataccagatgtgctgctggaagcactgaacaagcatgaatatcaggaagaatccaaagtgagatatggaytaagggtaattaccatactcaagagtctyagaggttttaaattttctcaatgagaagagtttgacaaaatgtcaaagcgcctgaggcagggtgcctgcctgtggataactgcgtttgatgttcagtttgatggccttctgaagcagccacacctcttagcaccagaaactgagcccagattattggggcagggaaggagtttatagggtgaggccagttataaactttgaataaaaaaattggataaaaagttggattgcatttacaaaaaaatttcagagaagagtctatgcagagcatggagaggaagaaaatacctgaacaaaaggtcgtagagaacctatttggcgacagccactgaattcataccaattaggtacttctgcaggtgacaataggaactgtcgccctctgtaactgccatattcataagtaacccatctgaaaacaaaaataaccacagtaagtggcaattttcatttgacagtggaccccarttacatttatttttagaatgctttccatttctagactgaactatatacttttaacatacattgggggaaaaatgatcttttctagaacacttaaaagaagtaatttcttgacaaatagcaaatttttgttacatgagtacttatgccaaaaagttccattcttgaagagaaataggtaagttttttcctccrtaaagcartgaaatattgtcttttagtggattcctcagttcttcctgggaactattcataaaatagcttcagttgtaataatgggtctttaagttgttaatatttccaaagctcttagtaggtgctaaatagggttaaataaaaagttttgtctgcagtgagagtaatctttgttaaatctaaaaaactgctaagatactcagttcccttccgctcagatgctactgctgcacacctgaggaagtatgggtttaagcgcagactggcgtggaagcagcccagcgccctcctctcttgcatattacatcagggaagaatgcactctacttttaatcctggaacttaaatcctggataaaattttatcattttagtcatcttatcataaaaacaaaatattaaaacctactgcaaaaaaatcacccataattctaccaccctaatattctataatttttttttccaggtaggtctcactctgttgcccaggctgaagggcagtggcacgatcacagctcactgcagcctcaacctcccagactcaagtgatctcccacctcagcctcctgagtagctgggactacaggcgtgcaccaccacacccgactaatttttgtgttttcaatagagacagggtttcaacatgttgcccaggcttgtctggaactgctgggttccagtgatctgcccactttgacctcccaaagtgctagggttacagacgtgagtcactgcgcccagcttctgtgattttttttattttcttttttagatggagtttcactcttgtcacccaggctggagtgcactggtgtgatctcagctcactgcaacctccacctccygggttcaagtgattctcctgcctcagcctcctgagtagctgggattacaggggccccaccaccacacctggctaatttttgtattttttagtagagacagggtttcaccacgttggccaggctggtcctgaactcctgacctcaggtgatccacccgctttgccctcccaaagtgctgggattacaggcaggagccactgcacccagcccggcctgattattttttaaatagatgtagtccaccccaacatctgttgtacacaggtagaccatacctattgtttttgtgaataaaagaaaaatactttcttaaaaacatgtattacattgatggtactcattcatttttatatcttattcaaaagtattcgaagttgaggggaaaaaaatctttccaagttgacctttaatcatttgtataacatctgccagtcattcccagctaaaggaaaatcccaaccctgagctccaaaatcagaggacttgctcttttttaaagggataagtaaagtcagctctttcttacttgctagactatgagaggtgttaaagacaaaatccttaccttaaataaactaaaaatctggataatgaaataaaagatgctttacatatgacttttcccagtggaaaagtgttctacaaaggtgcataattattaacccttacaaaaagagagggtatatgtcaattagtttaagataatataagagagggagaaatctgatcaattttttttttttaaattaagatagggtcttgctttgtcactcagactggagtacagtggcgtgaacacggctcactgcagcctcaacctactgtgctcaagtgatccttcggcctcagcctcctacgtagctggggccacaggcatgtgccacgacacctggctaatttttaaatttttggtagagatggggtctcactttgttgcccaggcttttcttgaatccctggattcawatgatccttctacctcggcctcctaaagtgttgggaatacaggcgtgagccactgtgcccagcccaaacttgatttttaaaatgatctattttattgagtcaacaagtaggtaactcacatgccaccaataacctgaacagagcgtatttgtgtgttgaatcccagggatcggagattgacagtttctgcattaagttcaatcttttttcctttgaagtcttctctttcaaagagaataattgttggttcagaaaattcctgttgaggaacaraaacaatgttstgttattcatctttgttaataattcaaacttatgtgaaaatcatcttgttacaaggacaaagcacaaaaaatctgctagatttggcctttccataaactccttttccaagggagcctggatgtttgtgtactccaagctagagagaaagcacagaggggcagttagtttctccattgcataggaaggcaggtaaatataaatagtttgtaaaacagggraaaaaaaaaagagaaatgggtatacgctgggaatatcaacacttctgatggcatttatttttgacttagccattttcatgggacaaggaggggctggaaagtcatggacataattgccaagggtcagagggctgtggcatctgatgtttagtcacttagtgtacagtggtattgcctaatcagggaaccttcctcttgtatgtattttcaaatgtcttttttttttctgttcatcactaagacaatgattctgtgtactcatgctcccaaactttcctgtaggaatcattgtcaagaggagagaaaaaaaacaacaggatggaagctctatgttcaaactgtcaatcattttaaagaggacaacagcacaaacgttcactgttcaggaaaatgaaaagttggcagcttatgcctgttttttcaaattatagacacttttgattctacattaatctctaatgatagtactgctaagatcataaatgatgcattaaaaagcatgtgggaggccgggcatggtggcttacgcctgtcatcccagcactttgggaggccgaggtggacggatcacttgaggtcaggagtttgagatcagcctggccaacagggtgaaaccccatctctattaaaaatacaaaaacaaacaaacaaacacaaaaaaattagccgggcatggtggtgcatgcttgtaatcccagctactttggaggctgagtgggagactagagaatcacttgaacctgggaggcggaggttgcagtgagtcaagatcatgccactgcactccagcctgggcaactgagtgagactccatttcaaaaaaaaaaaaataaaagcatgtggggattacaattttttccctatcctgcttaaagtttgtggaaagggtgcggtaccttactgcttcatttatgtggatgtgtcctgactggtaaaaagattttgtccrtcagtaaacagagcatgttagtgtgtagaagtagtttgtgtggtctaggaattagtttatataaaacatacatggaggaaagaagacaaaaattatagtagtattactactttgcacttttattgcacttttgagatggcaagcccaaaaatgttctaaacactttagtattaaaaagcaattaaataattttgaagtattaagtcacaaagatatgtagtcttcatatgggtaaaacattcatttcctcacaattaaaacataaaaagatgtcatctatagcctcagagtgttgtgagcatatatgccaagttctggttgagggaaggcattgaaattttcaaatatatacttgtaggtagcttttagaattctaggcagaataacaatcaaagtcttattcattacttgtaagctaatgaatcttactacctcatttcatgtttctttgttactattttcatgtctcagtagcatttttgctatttaaacaggcaggcagggatgagatgaaaaccaactcacatacgttcttcctacmtttaaaactaaaatgagcaattacgtgtgtttaaagctttttatgagaaagcagttaccaaaaactaataaaaatgtcagaaacgacagatacttccagactttaatatctsaacatgatcttgcagttttgttctattgaatattacttccactacatcaaactgaaagayttctgtccaaaagagggcactataatctggattagcacatagtggcaaactgggagaagtcatttgattgcaaatctctaaaacacagaataataatagactaaaaacctataaggaatttcttcaataataacaaccaaaggtagaggaagccaaattgcaaaggatacaatacacaattccttgaatagaaaatgcaaattataaataagagataccagcctcactaatagtgaaatacaaattaacccaatgacgacatactgctttctgctcattctatcaagttgacaaaaattagaatgagagaatattcagtratggcaacaatgtgtactgctggtgggagtctcaagtggtgggatctagcagtactgaatgaaactgcctgttcttacatgtgaaatccagtaattctactcctaatatatagtccaagmgactcccactcaggtccatagggatatgcatatgaggattaagtgagtaaaacagggtggtggaaaacgtgtaccagttagaatcaataaactagatgtacacagagccaaatggacagttccatctccaagcccttaactaactttaagagcaggttctaccggctggttacctcactctgaccatcagctatatgaggcrtacatttctgcaacactattcacaatgacatacttacaacatctataaaacgaagagacttgaaagttgctccaggcgggcatcccattgcagacagacaaggataatggccttcttccaacacgtattgattaccagtgaaattttctccatcatatacaacccagctacaatgggaaaaaccacacacatgcacagaatatgcaacttgagcactcctattcaagaagtctgatttttagaggtggcctgctataaaataaacacaatgcttctggcaaacagagttctttcttcaaaaatatttggatatatttattgcatttctgcttgtggcaaaataatattcataataagtcagttaastttgcatttgggaaacaaacttctttctccacgttctttctgacttccccagcctccagccttccttgctcttctcatgggtgccaccgtttgcccagccagtggagcttyaagccctcaagtcctttttgaataatccttcttcaagctttgtgactagttaatcaccaaggcctattgatttggtctattgatttccttccaaaatttctcgcacactcctctatcctcatttctaatacctctgcactgggccaggagtcaaaatacttactatattgacttagacaagtcacttagcctctctggtatcaacattattcataaaatggtgatttgccatgctcccctagaagtttgtgggccttttttttttttcctttttttcttttcttttggtggcggggggacagaatctcgctctgtcacacaggctggagtgcagtggcatgttctcggctcactgcaacctctgcctcctgggttcaagcaattcttctgcctcatcctcctgagtagctgggactacaggtgcatgccaccacacctggctaatttttgtatttttagtagagacggggtttcaccatattggccagactggtctcgaaatcctgacctggtgatctgcccacctcggcctcccaaagtgctgggattacaggtgtgagtcaccgtgcctggccctgttgttgttgtttttaacccaacaaatgccttttgaggattatgtgtcaggtacttttctattgctggggatacagcagagaaccaaagtccctgctctcctgaagttaatactctagtgagctgagacaggtaattttaaacatgcacaggactggaggtaataaatgaagcaggcaggggataacgaggagtggggatgtggtagcagtatgtccaacaaactaggaagctttactatccaactatgtatttgccttttttgttttttcctgagacagtcttgctctgttgcccaggctagagtgcagtgctatgaactcaacttactgcaacctctgcctcctgggttcacgcaattctcctgcctcagcctcccaagtagctgggattacaggtgtgtcaccatgcccggctaatttttgtatttttagtaaagacagggttttgccatgatggccaggctggtctcgatctcctgacctcaagtgatctgcctgccttggcttccctaagtgttgggattacaggcaggagccactgcacccggcctccatctgtgtatttgaatgcaaagtcagtgcttttttgctgtgcaatactaaaggayaggatagcattatttcaaccataaagaaccacrtgattaaaggcactattactactattattaagagacttaaatcctcaacacctcttgcacagattgctccaaggctttcctgaccgagtttccctgaccttgggctctcccctctccatgaagcttttgtacaaggattgtttcagcatgaaacaattgagcccattgcctttgccctgggtcttgtgtttcctgtggaagccatctaaactcagtgtgctcagctttgcttctcctcccagtacaaagccctcccagcaagccggactggtatgctccctgattcgcgtgtccaccagctccactccagcgtgtactttctaccttcctgttaatgcagagtgccgatcctgtcctttgaacaatccamcttgggaggtaccttggattaactagagcccaactctccctttctagatgatgggaagacatacagagtaaagaacctgctctgaattccattacacaatgagatgatcttcagcttctccaaccaacctgaagcccgtgtcctctggcgtctggtactcagatrtcacgaagcacgccattggactaagatggtggtttcgcatagtgccaagcacctaacaggcatcactatatacttgctgatgtgtgaattctgttttactccagtgattcagctctgccaggccwttgtttcacttacctgcctcctgaaactctgcaagacttggwagaaaatgaatcatcaatttgacttgttgtttcttcaaaactttgactgtgaccttgaaactgtggttctgaaaacaagtgaatctttgaaaaagtaaacagaaacacataaaattattttcctaaacacattaactaatttagcctttgaaatgatgacctaaacatgacctgytgacttttgttacagtaaactggtacgaattttagaaatccttyaattttccatgtctacattcatgatcaattagaaayatgttagctgcrccattcgtgactatttatttaattcagagacatcaaagtaaaatgcaacaacaaaggtaactttctatagaacaccctgttgtgaagctgtgaggtattttaaagctttattgtggtcagaaatcattgttcatcagttctgacattaacgacaaacagtattttggaaagacatagtgtagtttccttccttctcaatggaagacacttgctgacttatcggaatcctgtgaatgccaataaaggaggctatagtggtgtttgttcctctataattatggctctgtgaacacttccattaaaaggccgaaataacaaatgtacaccccagttgatgttaagaatcagcattcagaaagcttgagtgagaccataaaaaatgtctagtgtcgacacagcaaatatgaaaattcattttaccatcacaataactagatgctattgtttgaaatattaatctcaatgtattaatataaactgagtcaatgtaatgatataaaattcagctttatacaataagcattttataagaattatttagacatgggtcagtactgtcaattaaccattaaagtaaacttaaatcttattttttaaatacaattatgctttcaggcataaaaatgagtaaaactaacaaaatgtcccaaatgtctgatttttttttttttttttttttttttttttgagacagagtctctgtcactcaggctggagtgcagtggtgcratctcggctcactccaacatctgcctcttgggrttcaagcaattctcctgcctcagcttcctgagtagctgagcttatagacacaagccaccacacccagctaatttttgtctttttagtaragacggggtttccccatgttggtcaggctggtcttgaactcctgagctcaagtgatccacctgccttgacctcccaaagtgctgggattacaggcgtgagccaccacacccggccccaaatgtctgacatttgaaacataagttcagcttttcaatggaaggcccyttatatattaatataaaagaatatttttaaagttacctgatttcgtctccttgggccagtgaaagaatcctaaaaatttttaaaggaaggagaaaaggaaatgaatagaacaaacacattgaaaaagtttttttcttctagattattagcaattactgctaaaaataaactcagaatattttccatagcaattactattacatgaaccaggaacacacattaaggaaatccagaattcagttaaatattctcatacaaaaatataactccttaccaaacatataggttgaacagaagagatcttayaatttttgcctccccagtcctcaaaactggtataaaatcctttatccagtatatactgttctcctgtgaagtcaggattttcataggctacccatctaagaaacaaaagcaatcacttgttggagttcatattttacatataaaacgatcacatatttggatawctatgtatcatacagaaactttcatttgttttgccaattgaaattttaatttttctgattctccattaacctttagaagcagatgggtttgtctataggacaaatcaraatggtaagccagcagagaagagggaacatttatacactgctggtgggaatgtaaattagtttagctgctgtggaaagcagtttgaagatttctcaaagaactaaagatagaactagtattcaacccagcaatccyattactgggatatacccaggggaaaasgaattattctaccaaaaagatacttgcacgtgtcttgtttactgccacactattcacaatatcaagatgtggaatcaacctaggtgttcattgatcaatggtggattggatagagaaaatgtggtacatataaaccatggaatactatacagccataaaaaagaatgaaatcaagtcctttgcagcaacttggatgcaactggaggtcactatcctaagcgaattaacacaaacagaaaatcaaataccaaatayttatgagcaagaacatatacttatgagcatgttcttgcccataagtgggagctaaacattggtcatgcatggacataaagaagaaaaaaaaataggccctggggactacaaaaggggccaggagggaggggggtttgaaaaactacctgttgcatgctrtgctcaggttgacgggttcaaccgtaccccaaacttcagsaaatcatgcaatatacccatgtaacaaacctgcacatgtaccccctgaatctaaaataagagttgaaaaaaaacttaatgcaaaagaaatggtaagcgtaagggtatcttgacatgaactttttggcgttctcgcttatcaaatactatttcttgagaaagctacaaaggcaatacttctctgtgcttttttttttctaattgtattctaaggaaacaaaacaaacaggactttcaagaagaacctagttcttttaataagcaatcaataagtcctttcattctcaaccttaaaatatttttgcagaaagatcttaggaagctgtgtctattacacaacaaaccacactgaaaaagaagttaacagaagaaatgcttttaaaaatgcagaacagaactaaaatattgtttccaacagtgtttccaacatcacataaatatgtaaaaattaaataaacaaaattgagcaaactcatagaaatactaaaaataaatctcttttggaatgtttttttctcttttaagtgatctacacccagaggaaaatcaacaaaaccaatttaatgatgctatttcctakgcaaagataaagtctttgaaaggaaaaggtttttcagttctgttatattaaagagatacttaataccattatattgaagacattaagtatcttttcaattaattcatcattctcatgatcctctcaaagcttaaaggaataatatctatgtatgtattatgtagggtgatcagaactttgcaaaatgtttccacatctgttatcacatttaatctcctagggaggtattggtgttcccattttacagatgggaaaaacctaagacacagtaagttaattcatttaccaggtgccaggaactagactggcactagatatacaaagatgaaaaagacaaaatctctgtcctccaaagcccacagatgggtaagcagcatcacatggaagtatttgttggtatttgttttgaatgggaaatgacttgtccagggtgacacaatcgactattggccagaaygtgactgaacctacctgtcctgaggcccaccaggctctccttgctttgtgacycaacctgccatgtgccctggaaagttccctttcatttactgttctagtaaaccatgcctaaaacagtccacacactttataattagagcagattatgattttactatccaaagggctgatttaaacaaaaactcaagtacagtaattactagaatatgaacagccatcaaggaaaaaaagaacactgccaaaatctccagtgagaagtagctaataacagccaacatctgtgcactcactcccrgccatccaaatggagaagctgctatatgcaccactcagtctttcaggaaatacagccccctaccaccccccatcccccgatttcagaacctcactagcaatttttaaaacctgttcttttttatttttatttattttttattttttttagtagagtcaggattttaccatgttggccaggctggtctcaaactcctgacttcaagtgatccacccacctcagcctcctaaagtgctaggattacaggcgtgagcactgttcccggcctaaaaacctatcctttatcactgagaggtgaggagataggagacctggctccacctgtggccatgacattaactttcagataactttgaagaactcacttaacctttgtgaaagtttgtattttcaagtgtaagtaggagagtgggccaaggtccccgggctgaccaggtgatgctgtacagcacacgggtacccgcatgtgctgcctctgcccacagggcctcaggctttacccccagcatgaaaggaagcaacagtaaagccagagcagggagcactgctatgtgggaggagtgtctgcacatcaagaaaatctacatgactggattaagaaaatgtggcacatatacaccatggaatactatgcagccataaaaaatgatgagttcatgtcctttgtagggacatggatgaaactggaaaccatcattctcagcaaacgatcgcaaggacaaaaaaccaaacaccgcatgttctcactcataggtgggaattgaacaatgagaacacatggacacaggaaggggaacatcacacaccggggactgttgtggggtggggggaggggggagggatagcattaggagatatacctaatgctagatgacgagttaatgggtgcagcacaccaacatggcacatgtatacatatgtaacwaacctgcacgttgtgcacatgtaccctaaaacttaaagtataataataataaaatttaaaaaaaaagaaaatctacgttacaaacactaggactttaaaaaaacaacgaacaattaaagaagtagagccacatcaaaaaaagggttctcaccagggctccgagtctgtaacaagtagagagataagagggttaaaggcctttctgtttgacttcaaggtttgragggaaaaaagacagtgaggtgggaggctgaatgccaaggagagaggacagccctggaagcagctttagccagtactctgttctttttactaacaagtatgggtactgtattttcctatgaaactaaactacttgtaagtaaatacccaacacccagctaagcctatctctaattcactgaagctgaagctggaaaacaatttattaagatgttacttgaactgacagtagtgttgttttccctccaagatacctgatgaatcacccatgaatggggggagtgggggaggggagaagccgcaaaacccagatctgagattctctgctctatgatccgagagtctacttacaacttacacttggggctcttaagaaaatccctccctgtccttgtccagatgtattctgtacacatgaatcaacactcctctgtttaaagactggtggggagacgggggaaaggcatgtacacaagtactagcaggtcccagcctggtggaataattgctcagaagataagggcagcagggtaaacctgcccttccgtggaaggccaaaggaaaaagaatttaaaacaacaacacttttygttttcatctgaataccagaaatatttcattttgctcctagttttaaaaaactagcccagtttccactatttgagcaagaatatagcatagaactagaaactgataagcagggagtttctttcgacatttccagtaagaatcaaatgcagttcctaaaaacctcagttgctggtttcatgggcatccttcctgaaggctgttctctgtttcaggactaatgatgagtttactgcccaggggatgtattacccatgtgatggtgagcctcctgggagatactttcatggaacaagaacttcagaagagtttttttctgacaatrcatgccataataagaaataaagaaycaagctaaaatacttaattgccaataaaaataaagccattaaaatacaataattttcctttgaaactatttaaagtgaataggtagtcctcctccatcatcttggckcatctcagccttcctatcctatcccacaggcctaactccaatgccacctcctccacaaagtcttccttccctgtgtccagactggaaattaatctctctctgctgtggattcccagagcatttaatctgtacctcttttgtagcaataattatgttttacataaataccgtaacttctttgaggacataatacaatgctttgcacataayagacckcaataaatacttgtcaaatgacaaatcgaacaaaatatgaggaagcacctggccctggtaaatacaaaagcccttccatatgcaaagaatttcaaaggaagtggkgtgtgtgtgtgtgtgtgtgtgtgtgtgtccaygtatgtgtacgtagctcccttcaacttcccccttctaccaaaacttaactgctacagccagaaaaaagaagcttaagccaggaaatgcaattagaaatgactaaaaatagaaacatataatagcagcactttataaagggaactgatttcaagtaagcaaggcctgggttaaaaaggaaaggagattggctcaaggcacaataattctacctgtgttaatagcatcatctacaaaatacctaagggaattcattctacccagcatccttttgcttcctctgccagggtggatgactaggctctgactaatagaaccaacacaactggtgagtatcaaaatgtacaactgtttcaccagactaagttggtcactatgttttcctcctaaataattagctttaaagacaatctaaaatactgcagagccccagcaacatttcagataacttgtaccttatatttcagatgacttctggcttttgcaaacaggctactgattctaaaatgttagggctccagaataggacccaagagtaggcatttcctgctgagaatggaatacccggaaatcactgatactctgccaaaatggcaccacatgcaacggcctagacaagaacttgttgaacaaggttttttttactctatttactaagagtaaaagttaagcatgttcatcaacttttagtacattgtacacacttttcaaatatccagggctattgtgggaggycccatgagatacaatggggttgaggctaggatgattcaaatagtctatgtcactatgacaacaaaaacctaacaccaaacactttcagcataaccaatgtcacattatttcatgtaactatttgagaatactctcacttataacaaattagaatagacattagcctggattacaagaataattatgtaactccctataacagccatctgctgtttttgcccatctggcatctatctccccactctttctgatgtccctggggaaccaccaaccccattcatatctaagtggctcctatgggatagaccctacatctcagctctggagatggacaygtagcccagacayggccgtctctgtggctacagtgattggttcaggcatgtgcacatgacccaagcctaggaaagcaaagtcaaacatggaacttgtgagaaagagaagctctttccactgcaagaaatgagctggggccaggcatggtggctcatgcctstaatcccagcactttgggaggccaaggcgggtggatcacctgagctcaggagtttgagaccagcctgggcaacatggcaaaaacctgtctctaaaaaaaaatacaaaaattagccaggcctggtggcacacatctgtggtcccaactacttgggaggctgaagcaggaggatcgcttaagcccaggaggcagaggttgcagtgagctgagattttgccactgcactccagcctggrtggcagagtgaaactctgcctcaaaaaaaaaagagttaggagaacaaaagctgaatgtggccacaggccaccaaatgcaaaaggcctacctaaagtcaagttaacacagaaaaaagcccagtcaagacacagagacyaagttctgrtagtgtttgatcygctgcatcyaggcatgcctgaagcaaaatcttctccaggactttttagttacttaagccagtaagttccattttaatcccttgagccaatttagcttggcttgcagtcacttcatcccaaagaatcttgactaaacatctttcaataaaaacttgcttcaccactaataaaacagtcaactgctaactccacgtacatagaacaattatttttatgtcaaactaatagtgaagaaatatactggaacaggtgtaggaccacaggaaaatctactgggactttgacccagcctcaggtttatgttagattactattattattatttgatctccatcatttaaaaaattcactatctttctgtgcagaatgacaagggaaacagatctgtagatttctatcatgatacccaaagcctaccccraacgtaaaaagaagagatggtatgagaacgatttttaaagagagttaacgaaaatatcatgacagcaactattaaatgactgatttaatgttaagctgttgagatatttgtrtattgaatgcctactctgtgatagactcttaccagtttaaaacaaaccaaggtaaaacscatgtttaaaattccaactggattatttcacttacactccactcagtacattaatagactgtgtcttcactccatatccagtctcctttaaattagcaacaattcccaatacatcaatactggaacctttggatccaaagtttttttcactgtacattatcatgtgagcatttgaaaaatcctattgagaaaaaaaattcaaaattcaaaggcwagccatttattatccaaagaagaccaagtattagccawtagcttgtcctttacttacacctaatataggtcgtaaagactgaagctctccattgtaacctccccaggctttccagtccctgtattctccttcttctagcaaatactgatgaccggtaratccaggyttctcatatgcaacccaactgcaacataaagaacacgaggagtagtcatttccagacatgttaacattttttcaaggtacatatcaatttcattgaaaaatacaaatagttataaagctagacatgaccttctgctttattatcattggaattctttaaaatttrggagaataacagaatggccccaagaaaataacctaagagacatatatcagagttgtataaaaaagggaaggggagcgtgtgtgtgagtggtgtgtatgtgtgtgtgtttaatcagggctgactcaaaagaacctcagcaagcaaaactggataaactcacttcagatagtaacaaaaatattatgaatagttagcratttacaagagcaactttagtgtgcacttctatgggaaatgtgcaagatctataagatgcaaaaatataaaaatcagaaagcgaactatcaaactgttcaatagcttggagcataattctaataagcaaggttgtagatttgatcaacttgaacaggccaatgtatcagccttccttgacagagtttcgctcttgttgcccaggctggagtgcaatggtgcgatcttggctcaccgcagcctytgcctcctgagttcaagcgattctcctgcctcagcctcccaagtagctgggatcacaggcatgtgacaccacgctcagctaattttgtattttttagtagacatggggtttcyccatgttggtcaggctggtcttgaactcctgacctcaggtgatccgcccgccttggcctcccaaagtgttgggattacaggtgtgagccaccacacccagcctcaaactgctttcttaaatccagtcactataggctgaggagaatgtggatataactgtcaaaattcaccatactatagaatcaggaatgttgtttttaggggggaaagggcacatttattacttaatatttcggaaaaaaaagaaatcctaacaagtcacccatgtacttacatgcctcttagaactttcatagaccccactgacgtaaacggcaaatgatcgtctccagtcgcctcttctgtttcacctccctccatgacaaaactacacattcctgtttctrgttccacacattttccttcaaagaaaggcttttcataaacaactacctacaatagaaatgagatataccagtaatctgtaagaagtatcccaacagcttaacattaaatcagtcatttaatatcactaagtcctgacacacaaattaaaattttctgactgggcgcggtggctcacgcctgttatcccagcactttgcgaggctgaggtaggtggatcacttgaggtcaggagttcgagaccagcctggccaatatggtgaaaccccgtctctgctaaaaatacaaaaattagctgggcatagtgatgcacacctgtaatctcagctacacaggaggctgaggcagaaccgcttgaactcaggaggcagagggttaagtgagccgagatcacgtcactgcactccagcctgggtgacagagtgaaactcttgtctcaataaaataaataaaataaaataaaattaartttaattaaaataaataaaataaaataaaataaaatgttctaatcatattttaaaaaattaactaggccaggcacagtggctcacacctgtaattccagcactttgggaggccaaggcaggaggatcacttgagctcaggagtttgagaccaacctgggcaatatggtgaaaccccatctctgctaaaaatacaaaaattagctgggcatagtgatgcacacctgtaatctcagctacgcaggaggctgaggcagaaccgcttgaactcaggaggcagagggttaagtgagctgagatcacgtcactgcactccaacctgggtgacagagtgaaactcttgtctcaaaataaaataaaataaaataaaataaaataaaataaaataaaataaaatgttctaatcatattttaaaaaattaactaggccaggcacagtggctcacacctgtaattccagcactttgggaggccaaggcaggaggatcacttgagctcaggagtttgagaccaacctgggcaatatggtgaaacctyatctctgctaaaaagaaaaaaagttgggtgtagtggtacatgcctatagtcccagctattcaggaggctgaggcaagaggatggcttgagctggagaaatcgaggcttcagtgagccgtgatggtgccactgtataccagcctgggtgacagagcaaggcctggtctccacaaaaaaaaaaaaaaccctaaataatggcatctgatwagatagtaaaaagaaaaaaaaaatctggcttttttttttccctaatgtggtatagcccaaagccatggttccaaacagttttaaaataatttatatacatatatatataaaataaatatatacacacacacatatatatgtatatataaaactgatatttagaaccacatagaaggaaccagaggattctaaagtagtgttaaaattgaaaattgaaaagttatagtgtgtggcatcgatgtgggaattgggaatagcagaaagggtattttggagtagggaaagtttgtcttaaaaaagttttttcctggctaattggcaagcagcaagaagccctgcaattagtaaatacaactgcaaattgttaactcaatataacaatgacccttctgagccatggctaaatgtactcttagtgataaccagtgccattagcatcatcttccaccctgaaggatggcaagtgtaagttggcaacttcctttggctgcatttatgtgtgacagaggtttaatatgagaagtcacataagcaatatcttcatagagatggagtgggaataacattaagtacatatatatgtgtatatgtttaaataattacatatacatacatacaaaaatacatatatatttttacctttggatctgtagggaattcaactttacggccaccctgaaaaaaacaacatagtaagaaaaatagtttttcactgatacattaccattttatattagccatagcagtttacagtaaaacattgaatttcagtgtgactatgttctggtttgttttaacttacgtgagatagttctaaaattaccaacaatacagatgaagacacgaggaaggcaggctagaacggagcctcgcacaagcagtctataagctgatctgcgttgtaggagtgttttttgacctagyaagtttttttaacttggaaaatttatcataaaaatccatacttctcttgaaaaagcagttccaagagctgacatctctggacccagattctcccaggccactgtcttcggcttctgcatttaacgatcctgccctcagttcatccttcagctgggcacaggcccggggttgccgtctctaccattcccttcggtttaactctcagccatttgtatttgctgcctggcccctgaaggtatttgattttgcaaccagggcttacgaaactattatgtgttgaagttcacataataagatctgggggactcatggaataattagataaactgttaaataaaatttaaaacatcccaaaggatgagtctatgaggggttgttataaaatagaaagctttttaaaaacaaaaaaactcactaaaatcagagaaatggtattacattaaaaagatattgcacaaaaatattaaatagttcaagagtttaaatcagcaatgggaaagttggatttttttaaaattaatatatctttaatagctttttaaaaaaaagtaccaccaaggatgctcaaaggcaccaaatgaactataattataaaagaatgtgttggtttccttaacttttatgaaaaaacaagcaaaaaaaaaaaggaaaaaggaatgtggctgatattatcagcaaaccagagattatacaactaagcacatgaccttttcaaaagtaatcctgtttgaacaccatagactttggagacttttcatcatcattacaaactgctcctaaaacctggatgaattctttcatacattcacaaaactaacaaaactttgttctttgaaagtgagtttaattttagaaacaaaagcccaaatcatttgcattaagaccagcaaacatacagataattaaaccaaatactttggaaggaygggtaaaattaacattaaaaaaattgtcttcctaactttctaatttgtctcaaactgtctcagaagacaactgcgaagtgcagcttcaaaaacatgtttgtaatgggagcctcatctcactgtgggtatttagggaacaacttccatgctgcagcacacactgcgctcaacactggggacaagacagatgcggcctgcttcctcccaaagctgacagtctagcggaagaaacaaagaacaaagcaagacactgggacaagggagaggmagcacaaagcttccacagcagatactcrggaggacaacactcatctggtccagccccagagacccccaagacaccacccactcgtgtcacggcagccgagccggtcctcagcgtgccctgctctctctcaggctgcaccctagctcacacagtgcattcaccgacagctccatttaaaaaatcatcctgctaattttttaagactgaatttaatttagcatgaagctttcctaattatcccytttctgtcacatcacccacaacttggaattgtatgtatctttgtcctgtttttccaccaatgtttaattcttcactttcctcacttgttaaacctacactgcgctgaagctttgcgcacccatctgcagctctgcagggctgagaatgccttaaagacaaaggacatagtcttacctgcctttttttttttttttaatctatagcatctagcaagttattctttccatgatttctattgagcaataggtccaatctactacaaatttgtttcttaaaagtcagctttattgcttcaaagtcacaccctgtgaattaccacgtcaagctgacaaagaatcaccacaaggacatttggatttcatttttaccattttcagaggccgcatggatccaatgtacgctkcttctgtatcccagaaggacaagtcagggtattcaccaggttccaggatgaaaggaacaccctgaaatccaggttcttcataaatcagccacctaaatagccaccatggaargaaagaaagggagccractcatcatttgtttcagtttttccttctgtctggtacccaggatgagaggaaaagaacaggagaggatacggacctacayaatgaatggttggactcaggtgttagaatcacactagactcaaggaaaaataaagccattatatgcccctattcttgatcttttacttttctccttggctggctttgtccccttattttaatttgtattattaattgctccraagttccatctaatcatttgtcatggtgccaaacattagtaacagctaacatctccctagagcttacaaggaatgccactgagaayttcatctaatcctcacaaccatgctatgaggaagagaagctattgtccccattttatagataaagttaagtaagttgcccaaggccacacagctataagtatgaaaggctggaatgattcaagcygattccagaaccaggttcctaatcaatttttttttttttttgacggagtcttgttctgtcacccaggctggagtacagtggcttgctctcagctcactgcaacctctgcctcctggttcaagtgattctactgcctcagccttccaagtagctgggagtacaggcacacaccaccacatccgactaagttttgcattttttttttagtagagggggtctcaccatattggccaggctggtctcaaactcctggcctcaggtgatccgcccgccttggcctcccaaaggtgctgggattacaggtgtgagccaccatgcccagccctaatcatttttgtgatggcaatttttctcattgcaggaagtgcattgaacacagtttactcttttcacagttactcaggatcatcactgtgagcattatttaatgcacagtggtgtcctcaggggctctgaagttctgtggggctgcttgttcycaggccrcaaagctttttgagttcttggttctgattgttatggcttttcaataccacacccttctatcagcttgtcagctgtcacttctgcttcagttggggaaccagcagccccaccctcctctaatgtgccagaaatcaggaaaccagaaaaccatgcctactagccctgtctctaaastttacaaggtcttcttgtaaacatcttcgttcctgggaagggttctgagaaggtgaggatgctgaagaagtgacttttctataagagaggggttaatgtacctgcttcataaacraacatagacttcttagtgatcacttacactcatcaattcggttagttttgctaaaatgttttagccgtggtactccaccatgttgtgttccccagaacaccatgccaagaagagagtggctgtaaatgaaatcttttaccaacaaaaygggtctgacccctccctctttgcktttttsttcttcccaattttggcccaaggcacatttttggcggtggtttttgtgaagattccgctggataaactggtaacttctctagactctctaattatacagagatttacaaccaggctcctactgatgatttgacaacacacacatgaaagaatgttgggaggccaggtgtgggatatgggtaggaggtcagaactacagtgttagaagtcaggatgatggttcctggggaagagggcgtgaggacgcatgaaagaaacgggtttctgcgatgctgggaatgttctttttcttgatctgaatggtgactgcgcttgtgtattcactttgtgaaaattcactcagcttatatatttagggtttatgtacctttttgtacaaatgttatgcttcaaaaaaagttaccttaaggaaaaaaagaggcttatcttttaaatackactgtaatgcytctaaaccacaagaaaacagacgctaagaatagggtwctttacacttccttatgtttaaagcatgacagccaaggatacgttacatgtattttggagctcaaagctatcacaggcacagtacccatggattttgttctctaacaaaataatggcagttctgtaacacattatggtattaggctaaccaagcaggtcccaagtctgacttctttacaagtgaacaggtttaatttttcaaaaactgaatgtacggctcacgagcaagcgatctgagattttgaaatgattcttaccgaagtacccttttcattaagtctttccttctatagcttgagttcagaggggatttattcatctaatactaaacatttcacttctgttgaagcatgtggtttagttgcataacattcatggaaggaaagtcattctgggtagaggggaatttgtgaaaaaaccgaaaacatgaatgaatgcatttgaaaagactgctgttctgaaagttctcccttagtaaatgagtgctgaaggcctgctgggtaattcaaacagacatttattaatgctgggtggactttgaatttgaaaactcatatgcagagtatgattcactttttctaaattctgttccaataagatacattatttatgaggccatcaggagagggggaaactatctccaggcagggttatttcagtttctaaaggtaatcttttattttcccatgtacttgggtcataagctttcgccaatatagattaaaaagtacaactttattgtcgtacttaacaaacagtatgattataaagcccaagcttattttttaaacaaacaaatgtatacctacaaatgaatattgttaaagtaataacaatggccatctatatgtttatttaaaatatttgtccaattactcttttagaaataccctttgagtcacacaagaaaaatcagtcttatcttgttcacttgctcttaaacaaaaacagcacttccagatggatcttaagttgtgttccctagacatggctgtacatgaatattggccattcacagaaaccaactggatacttgaaaaattaaatatgaaggtactgactttgaggttattcacaagagagggggctatgaatgtcaaaggggaaaatgaacctttacaatggaaagatggaggaggcaccactttaaccaagcaatcaaacttggtattgctaaagggcaagctagttagcacatgccacctgctgtgatacaacataaatatatggcactatctatatgaagtatcsgtgccaaaactgtttggcctgaacctaaccataccttaagacctaagccctagtagataggaaattcgggcaacagaagaacatgctaaatagtagcatgagggaacactcagacaaatctagaatgtggcacactctctaagacagctggcctaaatctttttaaaagttagtggcttgggaaacaaagatggggtattttagagatctttaaaaagagacttaaaagagacagaacaatcaaacgcatttatgtgaaccttgattggatcctgatttgaaaatgcaaatctataagagacattcctgaagcaattgggaaaatttggtgatggactattgaacagatattatcatggacactttgtgaattttctcaagtgtaataatgatacttatgcaggggaataccattagaaagagagtcaggctgaatcctatgtggaatgaagggtcatgatatctccaatgtacattgaagtgctcagaaaaataacacaaatatggtaaaatgataacaattattgggtcaaagtgaatggtacattggtgttcactgaactattcttcctacttttctgtatgtttgaaaacttttataataaaaaattgggctctgayatggtatattccacaatgaaatatacagtgactattacacagcaatgaaaaaaatacatagagatgtacccatcaatatgagtaatcttaggagtgtggttacatgtgtaaccacggtgggcagcaatgttggtaatggtctaggttgtaagttggatggtgggtccacgggggattgttttattattgggcttcatagttcacatatatacatatattattctgtatatgtcaaatattacacagtacaaatgatcaaataatgtttgtcaattaaaaaagaagtcccttgactttagaacacctgcattctagtacacattctgctaacagctaaccctagtctggagaaagtgaccaaagcttgtcttcctcagtcaaatgatggtgttgggccagatcatctttatactccctttgaagttctaaacttctttgcttttgttcrtcataaatataccaccccccacttccacccctacacacaccccgcccccaaaaaacccartatgctttcacctctgggaggatgggtgctaggattagccagctgcttaaaagaaagatttaaaaacaaattactctcaacagaatctgaaaggcaagtttagttagaaatyactcatttcctcaaacaagaatttgacmagacaagtaacacccttattttgtgtatgagtagaagagcttartctagagtgaatgggccctggaataaatcacctaatggattcttaaggagttccctctacagcaaagacttcttatcccagttcaggggaaccagtgcatcaacagaagcaaaatgagcttcagtacttactatcagtgacatcttctcaaccccttgagactttcctttgagatctataaaagcactaatgacctggtgtctaagctcaccaaccaagttcaatgagcccaaactttgaattaacatctgaggcagtgttccactgtcctaatgacaacagaaatgaacagccagaaaagaagatgcccaccatgacataaacctgtcataaattgtaagctgtgacaggctggtaactaccacccaggaggcaaagctaaacttactgcaaaggtaagaaatatcatttaaggtagattaatgtgcttcaacatagccaagcctgagtcatggcaccttccagacactgagattaaaatatgataacagatgcctttttcattcttttctaaggaaagtggtgtttctcaacctgacaccaattctttaaaaaaaagtgtatagacttctttcatgtaaaaaaattaaaggcagcaagagatgaaggcattttcttttgcttagattcccacttttcttcccagtctctaaatacaaaagtgccttctcttcccttaactacacccactcccctttgggactgtgtcctgtgcctggtttaaatacattctctttgccagtgactcctaaatttatgcctccagcctctcctctgaactccagcctcacatagtcaccttcttgcccacttacttgaatttgcagttggcatctcagccttaacctgtccaaaactgagctcytgaatctcactctctctcctatcctgctcctccaagtctttttcgtctcaataaatgttggggttccaaaccctgggcatgtcttggcccctcataccccacacacaatctgtcagaaatgctgttagttctaccttcaaaatgcatccaagatctgaccatttcccaccaccaccatcgcacgtctaagccaccatcccttcttggctgtatgattgcaagtgcatcctacgtggtttcttggcttccacctttgcctctttacagactattttctatacgaacagacaggctgatccttctattaataacacaagttagataaaaattcgccaatgattctccatgccacrtagagtaaatctaaatcctcctccccraggcstgaaaggccagatgtgacctgagccctgtcytatccctatcctcctacttcactcagcttcagcygccttggcctcttagctattgcccaagcatgcccagaagggcttttgcaaatggtgtgcttcctctctgggacaggctccctgcccctcttccctcagctagctccagggcagactccctcacttcctgccggtccctccttaaaatgtcaccagagtcctttactagctaccctatctaaaatagcaacatgcctgcccctctgtaatttatgtttcttgtagcctttgccatctgacacattatatatgtatttgtgttgtttattcctgctagactgacagctccaggagaatggggacatcattttatgtcttcactgctgtattcccagtgactagaaaagcacctgrcacatggtagatgcttgattaacagatttactgaatatatttaatacatctcatagacactcttttgggtttatatttgttaaagtcccaatttcttgtcatatttagacagggtatgcagaggaaataaaagcctttcctaatttctacttctaaactaaccacctttaaaaatttcagagcctttcaaggactacggggtaccaaatgatataactcaaaatgtacacaaaaaacagtacatttatttaaagaagatatacaaatggccaagaggtatatgaaaaaatgttcaacatcactcaagatcagggaaatgcaaatcaaaaccacaatgagataccacctcactccagttagaaaggctattatcaaaaagacacaatataacaagtattggtgaggatgtggagcaaagggarctcttccacactattggtgggaatataaattagcacagccattayggaaaacagtatagaggctcctcaaaaaattaaaaatagaactmctgtgtgatcttgcaatctcactactgagtatatatccaaaggaaatgaaatcaagtatgtcaaaggatacccgcacttgcatgtttcttgcagtgctatttgtaatagccaagatacagaatcagcctgagtgtccatcaacagatgaatgaataaagaaaatgtggtaaaaatatataatagaataagttctggtgttctattscacagtagggtaactatgattaacaataatatattttatatttcaaaatagctagaagagaggattctgaatgatcttaccacaaagaaataatacgtgtttgaggtgatggatttgctaacttccctgatttgatcattatgcaatgtatacaggtatcaaaacctcacattgtaccccataaatatgtgcaattattatgtgtcaattaaaaataatttaaaaagcagtaaaatgtatactatccttggaaaataactttatacatcaagaggagatatttaaattaatattgttctctacaccccaaattctgccctagtaactacacctttgtatattgacgaaccatcactatagtcctcccttgttattttctcactcttctgggagaggaaggttgttttctgagacgggctgccatagggaaagaataccatcgggcttctggggtgctggtaatgttccagttcttggctcaagtggtgtctacttgggtgctcactttatttgtttaagtgtacatttaccttctgtgaacttttttctaggtgtcttatatttcaaaatgttaaaagtaaataaataaatgaacaaactgtcgtaaaggaggtacctaactcatactttcctttccctacaaagctctggataaattcttgtccatcctctacctgagtactccctgcgatgagaaactctttacctaacaaggcagcccacttccattttaactgtattaaccatcagaaagttcttccctgggtcaagtcaaaatccatctctctaatttctactggtttttcctgggacctcctatggaataacagagagcaagtctaatatctcttctatatgaccaccttccaactattcaaggatagctgctaccaattctcaatagccacacttcctgttaagttgcctagaagtttttagtttctcatttctgaggatcaaaaatcagattctatgatctgtaatttatcctattcctaccttttacacaagcaaattatttttctaagatatgaacaatggcaaaccaaggcttttagtaataaatagaatgcaaaaagcatgattaaggagtgccttattgttcactgcagagatactccataccactttagggacaggctgtaaacttttttgactgtataaaccattagtaaaaacatttgagcattctctgaatatatgaatatttataaattatatacattaccactgaactaatacattatgcatattagaaaacatatacaaaaataaaatcttaagaggtggagactttaatcaaatagaaagaagctttagtgttttttcctgcatctcagtgaatgtctttcacatgccttggggctttgtgcttcactttggagaccacattcttcagtattgcagtctatactttctatcctcatttctcccctatctgaggtattcccatttccttcaaaatattcttgctgtttcctgtgatttgtgaaaccaacctcctaggggctttgaaccagcattgtgtgaaaatattcaaggaagtaccatgtgtgttggcttccatccccccccagaaatatcaggggcatgtgctttgaattacctcctctgaatcaccatgaaaatataatctgctactcagctttgaataaatcagatttctctgtgacaaggaaagccttacattaaaaaattcaatccccccccatttcctataataaatcgatactgtttttaagacagatgaatcataacataggtgcaaaagaatcagaattttacgtgccttataaaaatatayyttacagttaataattacttaacaggatgacaaattagagtcagagtatcttaagtcctctttttccagtactacactcacaaaaaaacttcattaaaatttgtttgaaaaaaaaatactyacgtgccccaatgtactttcatggaacaagtcttctgcattacaccaaatccctgcatttcttcagtatcatcaaagtaggaacttaggattcctaacccttctggttcagtaaataagtcaatgtgactaactctgtaatcctgaaaaaatatagatgcatagatagtaagaattgcaccatgtatttcactctctagtaagctcattcttcttcttcttacaactaatcaaaatgagctttaaatttacaaacacatttcacagagcacctgccattttagccctttcctgttttcatccatgaattaataatacacctatttcggggcagacacacttgctttagttatataactcagtgttgcattcaagcaaagatcatcagaaatgtattttatttgagttttggaatatatttctttttctcatcctcacttggtcctctttggtctggggttttggttcctttgctctgatataattatccaagcacagagactctagtctgtagaatggctgctcttggagtcttcctcagccactgttttgtgtccataagccctctgttgctttgtggtaactctccttgactgagtaaacctctatgatattggtttgatctaagtcgtaaaagcaaaagcacacattcatagtgatttacaaatctctgtactttggtcattgttccatgccccgcatatctgtggtccaaacagtcttcaaaaggcctcttctggtccagtgcctaagcgttaatggaatatttattgaaactcatctatgcagctgagttgggtgaactgagtgacagaagaaatattaacacttgaataagctcagatgaggcttttcaaatattatcaaaaggaacaactctaatgagctaaaaaggtaaccttgaaaatatacgctgtgacttatgttttatgtttcaagaaaccatgcacacgatctgtgaagaaaatataatccatgacacactgggagccatgacataycatagccctttaacatgacaccattcagaaaaatgtaccccaaggaaacaaattagaaaattataaattactggccgggcacagtggctcatgcctgtaatctcagccctttgggaggcctaggcgggcagatcacctgaggtcaggcgttcgagagcagcctggccaatatggcaaaaccccgtctctactaaaaacacaaaaattagccaggtgttgtggcatgtgcctgtaatcccagctactctggaggctgaggcaggaggatcacttgaacccctgggaggcagaagttgcagtgagctgagattgcaccactgcactccagcctgggcgacagagcaagactgtctcaaaaaaaaaaaaaagaaaattataaattattaaatgcacaaaaacattctcgtggcattacttataatagtaaaaaactagaaacaaccttaagattcactgaaagaagaaataataaataaataatggtacctcatttatgtactaaacaataaataatgtatcatttcaatggaatatgatattcagctaaaccctaaacctgtggtaacatgaaaagcatttgctacagtaagtctgctattatcagacaaaacaagagatctcgtttcccttccccatcttcctgaatgcacccaaatcctcaccccaccagattctgataccttccccagttgccaatcacaaagatgttaccaaggggagtgtgattttcaggaaagtggtataaagagaaaaaaaggattgagaaccacagtgttaggtgagaagggtggaacagcattgtacctgtattatgattattactgcagaaaaagcagactagaatatggccaacaaagggtagaaaattcaaaaaataaaaggggaggggacacttcatgatggygggaatcagatgatctttttaaacattgctttatttccaatattatttgagcagtaaataaaaactctaggcaaaatattccactaatgaggacattttgaaatagggtttctcaagtcttacttagtcttctcgtattatatacttaaaacaaataaaagataaatcatttagcataccaattaccacctaagttactcagaaatgttgactcaggaagtaagcgatgctttcctctgccaaaactgttactcatccttactcattctcatgtaagaatgttccttttctctgtattgcatcttgacactcgtctccattaaaacttgggattttaattttctacttagaagacatcattaattgcatttttaaggtaaagaatcatcaaatcctaagagcmacaaagaaagactctgacaacactttcctcatcaaataacaagaaaccaagaaattttacctcacccataaagtggcctcaaatagagtaaataatattttgttaaacccacatgaaatcccagagttaatcaacmaaattatttttggattatttatttttccaaaatasaattcctataaaccactcaaagtaatcagaactcatacagcaaacaaaamcactaaataaatgaaaaacctgttcatagaggcagaactcatttaaaccaagttaccaggtaaaatatatttggaagatgggaatagaaggacaggcataaaagatctacctaaagggtttattgtgamaaattatctaaccaattatgtttctttttaaattatttaaagtgtacaaatacttaaaatacagaaaatatatccataaggcaccaaatatgtttcccaatcacatatttcgtaaaatgawcatttcccttaaagtaagaatccataaatattagctgaataaataaaatccatatttaccacaacctacctgaaccacatgtctgatggaaccaatcaccactggcttatcagactctgcttcttcgtgcctttccamaatgtcttctataccccagagaccagagagttccaattctccttcttctaaggggatggagtgcccttcaaaatttggttgctcatacaaaatccaactaacaataaaacacagcaaaaccattagtcagtcttcgtgagagaggttttgattactcaaataacctggctaattgccattttatatatatatatwgaatattagcagccaattatctagcaattaaaatagcttaaactctccctaacactaatattttactgggtataattaagcctctgataactcatgaactatatcaggatcttagagaactttggagttacctatatgaatgctatagmgctactaatgttctaagtaattgccaagtggtagagacttatgataatatgtcagataaatggatgtttactgtactaggtttttttttttttgtctcttttttttttttttttttggatacagagtcttgctctgttgcccaggctagagtgcagtggtgcgatctcggctcactgcaacctccgcctccctggttcaagcaattctcctgcctcagctgccctagtagctgggattacaggaatgtgccaccaagcctggctratttttgtatttttagtagagactgagtttccccatgttggcctgctgatctcgaactcctggcctcaagtgatctgcccacctcggcctcccaacgtgctggaattacaggcatgagccaccatgtctggccttttgtctccttatatgtgtagaaaacatttctcttagagagactttaacttacatattacagtcatatcaatgaatatgttggcacaaaagactatagatatggtaatggaaagcattttaataatattcttcccaacaacagccaaacactaaagaaaaacctcatgtcaatatatggcagtgtaaatgcttatgctttcaagaaaaagaagccgacaaaagttgcaaaagaaaggaaaaagtactgttccataaaaacaaaatttgtgtaaaaaattgccactattatatattgtatattagtggccaattctctagcaattaaaatagcatttgtcttcaaatttaagaataaaagcaaatcttgtttttctcatgactatgttggatatataggaaaaaatattaaaacacctaaaaatctaataggaaagctgctgcatatttaatcaaatggagaccaaaagaaaagcttatgaatttgtaaatccataaacattcagaggtctaccctctttacttcaaacaagtttacaagtaggcaccaaaagataactattatgccagatcagcgatttctttttttaagctgcctttctctacccaacttcctgtgtatctccaagaggcaatgaagctgataaaatgatttcagaaactgtcaaaatatttatttttttcaccagtttctttacttagccaaaacaatcttttgtggaaatattggaaagtaaattaaattttaagttagtgctgcattgaactgtcattaaaaagttagaaaaatgcctttctttatagattatttttgttttaccttatagattttttttccttattgtttctttactttgccttttcctacrtgttctcaagtttccttataggtttttgaaaagtcgtatctggcctatcaacataactagtgcaattcttatcaacctcatttaaaggtcatcaaccaagagtatgttatgggccctgatatatgactagtccaaaacaatattatggggaagcatgggaaaaagaagcttgttctactgtattgttctgatttttctcccataaacatatatcactgctataatcagaaacatgatttaaaatgacattgttaagatatgaatcccttatcttaccacgagtagtatttcctgtgcttttcattgctaaagccataattttaaactagtagtgaggactaaaaagttaattargtatgtaaaactcaaacacttgacatcaggaacttaaagtgccattcttaccatcctctaacaacttttatgagtatcactggagagaggctccaagaactgcaatcctgaatgtcactgaaaacttcaatgcacttctcagagacgtcgggttcactatatatcactacctgcaagaaaacgaaagtggtagcacactttgttgtactctgtcagaccaaaatagaatcaagactagaaacagaaaataatcttacctttccaggtcggggattgagtttattttggacacttcctctaagtgtctgcaatcagatgaacaaaaacacaacaaataattacaacttcacataacgatcctctttttccacccaygatcctgtaggtagatcacacttttcccacattgtatcgattttgaaacctccactctaatggatgctaaagttgtattaaaactctttgagtttatgcttttaaattgaggttttttcacctctaactgaatttgccatttcaatttctcctaatttaaatgtctaggctatttccaccaatgctagaaaattcagggcacatatgtttcatgtcagttcacagaataggaactcagctaagagattctaattcaaataatatcagtatcatctcaaataaagataaattagaatatattaatcacttacctagaaagagctgaatcaattttgtgttcatatacataccctatctgaatccatataaatattgttttctcatagtaaatctacaatcatataacaaccactagtctaaatagaagtgtttatggtatatatggtatatttcataatgtacattgcacatagtatatttaatcccccttttttttcttttgagatggagtctggctctgtcaccaggctggagtgcagtggcatcatcttggctcactgcaacctccgcctgggttcaagtgattctcctgcctcagcctcccgagtagctgggactacaggcatgtgccaccaggcccagctaatttttgtatttttcttttagtagagatggggtttcaccatgttggctaggatggtctcgatctcttgacctcgtgatccgcctgcctcagcctcccaaagtgctgggattacaggtgagagccaccgtgcccggcctaatcccgcttttttgatagacaaaatacatttcaatatggctccaaaactaatcattttcaagaccatctgacaagaccagtaaaaccagaaatgcataagataataaaatagtaattatacatgtaaaaatattacaaaacgtgaactactttcagtgctgaccaggatgcctattttaggaactgcctttgctctgactgctcttgcatcacaccagagtgtgatatgcccagaagaccacaaaaggctggggcgyagtgcctcacacctgtaatcccagcactttgggaggctgaggtgggcagatcacctgaggtcaggagttcgagaccagcctggccaacatggcaaaaccccgtctctactaaaaatacataaattagctgggcgtggtggcactcacttataatcccagctacttgggaggctgagacatgaaaatcgcttgaacctggaaggcagagaggtkgcagtgagctgagatcatgccactgcactccagcttgggtgacagagcgagattctgactctaaaaaaaaaaaaaaaggccataagggcccccctagagccttatcagaagccagatggtatatacctatttatgtatatatacacattagaagtagataaactgaagaaaaagcctaaaatttaaaacaaaattcaggtaaaaccttcatgattgaatatacaatcaataaaagcccaggacctaaagaaagaccatattttttaatcataaaaaggcctagaaaaagtataaagattttatttttcctttttatgtcatttgacttgattttcatagggaaactgtatattctgttatcaactttgtcagactgtagttaaataaggaaagcgatctaagaacaattaaaaagaacaaagtagtaatgaatgggaagtggaccagtggaaattttgtgcttgagagaaatagttaatatttctattatrtaactattaatagaaatagttagaattttatgatttctgagtaccataggctgattcagtcttatttgtttatagcagtggttctcaaaatgtggttcagaggccactgcgggggtctccaagatactttcaggtagtccatggggtcaaaactattttcataataagaagaggtcacctgcctttttcatctctgtctcaaatgtccagcggagtacaaggctccatgatgtgtgatgacatcgttgctctgagcactggtgcagtgtgcacttctactttctggtgttttacaattttctcagcaattatttataatataataaattctgataggcagaacccatacaaacaaaagctcgttggggttctcaatcatttttaaacataaagggtcctaayaccaaacatctgaaacccaaactttatgaaagtttatgaaatcacatgaaaaagggatctgcacctctgctggaaacccaaccatatattttgaaagagcttgcaacatcacattctctgacaggattgtagtaaaagccaatacaatacattgaaccatgctgcagtaccctgtacagacgaggaaaggtgcaaggtattttctgcctagataaactgtgttggattgaggtccacacttgccagacagycgggttcacaggatggaccaccagaatacaaaccctactcaggtttctagcctggcagagctgatcactaaacatatattccaccttcctctctcatagtcctttctcaccttaaataagcttggtaacaaaaaggcgcaattcacatcaaaaaccgagtaaagtaaacatcttctgaagtgagataaaagaagatgcagaaatcaaaattattccccaaaatcatgttttgctgtcttctctctaatatttaagaaaagatccaatgaaaaccaaaattctttattccccacagctttgcagggtaaaaaaaatatttccctaatgaaaactaattcccaataaagacaaaatactgtctcaattgcataggataaacacctattgctacttatgggaacaaagagtgaatctcacagagagaaggattaagaaaaagtttccctggctggggacttcccaaatagaggaagctccttcacaaatcttcaaaattctaagtatagcactgagcatttttacatagaataggtaagaaaaagcatctcatctgtctctgaactctaaaagcttacctatacctttcataatacaacatataaattcacatgtgccttaaaagatttattgccagccagtcaggatggctcacacctgtaatcgcaacactctgggaggccgaggcagatggatcacgaggtcaggagttcgagaccagcccagccaatatggtaaaacccccgtatttgtattttcagtctttactaaaaatacaaaaattagccaggcgtggtggcacgcgcctgcattccctgctactagggaagccgaggcagaagaatcgcttgaacccaggaggtggaggttgcagtgagctgagattgcaccactgcactccagcctgggcgacagagcgagactctgtctcaaaaaaaaaaaaaaaaaaaaaaaaaaagatcatgtgccttagagcatttgtagctttatctccctgcaagactacagatgccttcagtgaagactcttagtacatttttttcttgcactctaacggtcccttgtacattgcaggttttcaaatatgtgatgaatgaataaaaactatagcacataagcttaaccatttctaaaagaataacatgagttgctcatcatccttctcttcccttgctttaaaaataccccaaataaataataacacattgctacttaccattgtgtctgataatgacattccagaaaaagaaatgcttgggtcataccggcttgatttgaaaagacccatgaagtcggtgtcactgtttgcacagtttggcaagtttgatttaataacactttcaatatgattagccttttccatatcatcattcttcagttttgacaattcagaaaatttagtttctggcaagtgtaggttgcttcgtgaatccagatcttctttggttttctctttttgcgggtatttttccatgtggcttggacttttcaaactggagtgtgatgtacttgacgagttgaaattgaagacctttaaggagttgtcgggcagaagatttgactgttctttgttcaaaccacagggcggggcaccctcagtcgtgggctgtgacactgaagactgagatagggaaccgttctgagaagtactgaaagccgtggtcatagtgttgactgatgtcacagaaggagaaaagattttgtcttgtggtaaagaagataacaagcttgagaaaagtgcacttttttctagtctcgatctcttaatgccaccatttgtgacgtccctgttctctttgtcattgatttccggcatcaccagaggctcactgttcccattagtgttggtgtgcagggacttgaagaggacrctytgttcagcagatgcacgtktgggtctcagtttggattttgtgtcaaggttctgcatcaaatgtaaagccggtgacatttctggctgactttccttcttcttccccaaaccaaaggtaaacactttgggatcaaacaccttttctaaatggtcttcgtgaataggaggcatggcaaagtgaggagcaggagagtttggcatcctggccttctttcttttcatgggcatacaaactgcgctatccatctgttttataatttcagtgaatttttccatatcagaagaagaatcaaatacactatcatcactaccagcagaaatgttcaaaaggctggcagggctatcctggccatttgtaacagtctgatctggcctttgaggagtggctaagtgatttccgctgctgggagagttggtgggamtggattcagccatcaggggtgttctgctgccctgactttgagcctgaataggcagagttttctctgatgctggcggtatgacttgtgggccagattttgccgcgagctctgctgtgcaatgagagtgttcattgcccagtacttcctcttgtgggggarcacaacttgcaacggaaaccacttcaggttcattactgtgacaagttggcaactgcacttctctaacttcagagctctctgggatgacctgggagctcacatcctgggtgctctccacggggagcacgaaggacctgacctggacgaggactctggatggacactcacttcccacagcttctggactacgctctgtggacaaaggaggggttgtttctcctccaagttctaaaagtggcattttctcattgttctgaygagacacaggcaaaacacatcctttatggttttctgacacttttagatcagtgcrtgggaaactgcttatgggtgattgaacacatgtgtctttgggaacatccccaggagcgggtgcagacagtgaaagagaaggcccaggagatgactcagcaggggactgtgagtcagaaaatgtatgctgtggctttggcatggccgttggaggtaaatctttggtatccacagtggtggggatgtcttgtgctgtatcggttacattttcaagtacaaggcttttgctgtctgcagcctctgagtcctccttctctaagagcttatgatccttgacaggaatcagagcagaagccactggttctgaaaggcagccagcatctgtttgtacatctgctttatcatcttggttaggctgaggaccaagagcttgattctcagaagagtctccattcattcctctggttgctggcagaatctcttcttccgagacggtaactttggtttctatagcagtttccttaaccagcacaccattctggggactgtttggcattactttcttttcaggttgctccatttctttggcttttttggctaaattcagctttgccctcccaacaaacgttttactagaggcaggagtattccttkggcctcgaatgtcagtgtgtcttgggctactgtttgtccgtttgttttcaaataaggagattttggtggcagtgttgyctttgtgaactggctggctaaatggattgtgctcatttcccaaactgtcaagattcttaggggttttaagatttagttccacatgtttgggcttggcagggctgtgaggaaaaagcaggaagataaagttattgacctagttttaaaaagtgaacacacaaaccaattaattataaaactatgaaaagccaacatctccctgatatataacatttggagtgtggtgtgtgtgtgtgtgtrtgtgtgtgtgtgtgtgtgtgtgcgcacacatgtgtttttaagacaaggtcttgctctgtcgccaagactggrgtacagcagtgtgatcatagattgctgcagcctcgaactcctgggctcaggcaatcctcctgcttcagcctcccaggtagctgggactacaggcacataycacacacccaactaatttttttatttttatttttttgtagaatggggtctatgtcacccaggctggtctcaaactcctggcttcaagcaatcctcycatcttggcctccccaagtgctgggattacaggcatgagccaccattctctgccacatttgttttttaatgaaactatttttaaatagtcctaagtacactaccaactatttttaatgggtgttttgcttgcatatgagggatcggaagattatatagccaagaaactctagggatgagggatgaactaatttattgagtacgtagcatgtatgcacagtgcttggcactagagttggaagacatcttaaggcctgaacaacattagaagaaatttaaatatttaatgcattctcatgctccaacatcaattatgtatttttattttagcataactttttaaatattatctcaaaaggatagattttaaaaattcatctactattgaccgctttggatattttattcatctcatccttcccccataagattttctctgattataagtgtgttcactatagcaactttggataatatttaaaaatcactgataatcctaccagtcagacaatatccctgttaacatttttatatgtttctaatctttttatatgcataattaaatattttgaatagaattgagattattctgttcatataatttgatatcttgctttttcaagaaataaaatgacttaaccttatagttaacatttttcagattaccaaaaaatttgtttgaaaagttgtcttaatgctgcatggaagtccatcatatggatgtaccgtcatttacttatcaattatgcaactgttggttttgtcaccacttcttgggcaagagagtctcccctctctccgtcacatttcttgggtataattacccccagtggaaataataagtctttgaatgtacacagtgctttctttcagagaaacaaaatgtgctctgtttggcattctctggctctggtcctggcttttatgctaattatctgtgtgaacctggtcaagttactttacctctctggactctaacttcttcatctttaaaaaaaatgagatggtttagaacagagttgtttttatttcccccaacttatggttgaaggaatccctggggttctcttcaagggctgcagttggggaaagtagggatgaggatggggctgtccactctcctttcaagcagaatcactcctagtatctgttttatttattgctcctatttaaactttcttagaagaaaggattccaaagcttatatatatgtgtgtgtgtatatatatatatgtgtgtgtgtgtgtatatatatatgtgtgtgtgtatatatatatgtgtgtatatatatgtgtgtgtgtatatatatgtgtatatatgtgtgtgtatatatatattrtgtgtatatgtgtgtgtgtatatatgtgtatatatatatgtgtgtgtrtatatatatgtgtatatatatatrtgtgtgtgtgtrtatatatatatgtatatatatattccagtactttgggaggtcaaggagggaggattgcttgagccaaggggttcaagaccagcctgggcaacatactgagacccagtctctacaaaacaaacaaaaaaattagccaggtgaagtggtgcgtgcctgtagtcccagctattccaaaggcagaggtgggagatcacttgagtccagaagatcaaggctgcagtgagctatggtcatgccactgcactccagcttgggtgacaaagtgagactctgtctcaaaaaaaaaaaaaaaaaaaaagtctaaaccattagtccagtggtttataaaacgggagagataaagcataaccactaacaatcagtgattgtcaagcccttgacaaatgcttcatcgggcttacttaattaatatacractttatacattctatttttggctgaggaagttgaagtgtcgagaagtaactccctgaggttatgcagctgataagtgacagggccacagtttgaagtgaggtgctctggcttcagatgccatgctcccaaccactatactattctggttccccagataggcttggactatacccgcctgaatgagctcctctggttctttccatctttatcatttaaagtcagtgaattatcatgagatccataacataacatagactttagaggccactttgataatgagaacacacaagtggagacactgaaatcccatactgcctctccttcatggacttggccttcatgaagcttgagcctggctgggtgtggtggctcatgcttgtaatccctacactttgggaggccaaagcgggtggatcacttcaggtcaggagttycagaccagcctggccaacatggtgaaaccctgtctctactaaaaatacaaaaattagccaggtgtggtggcacaggcctataatcccagctacttgggaggctgrggcaggagaattgcttaaacctgggaggtggaggttgcagtgagccaagattgtgccactacactccagcctgggcgacagagtgagactctgtctaaaaaaaaaaaaagaagcttgggcctaaggagcttctagaagggacaggcagtatgactgctggtgagtcaacttatccttctggataaaatattctctccaaaagcagcactgagaattcagattttaatttttacaaattttacttgatactaaatttgaggctgggatcagtggctgatgcctgtaatcctagcactttgggaggccgaggcaggtggatcacttgaacccaggagtttgagaccagcccggggaacatggcaaaatcctgtctctaaaaaaatacaaaaattagccagacatggtggtgcgcctgtagtccctgctactagggaggctgaggtgggaggatcacctgagccgggggaggtcgagactgcagtgagccatgatcatgccactgcactccagcctgggtaacagagtgagatcctgtctcaaaaataaataaataaataaataaataaataaataaataaataaataaataaatttgatctctgctcataaatttctcccaggcattgctttccccaatatctccataagatacttaggctcccttattgcaggcccataccttaaatttaaaaggaaaattaatttataagcatttcctcaaagatcaaattatgaaactagtgagatgattagaaatagagagcttcaatttgctatcagttaatgagggatggtcacataccagagaatatactttttaaaaattctcactaatcatttcaaggaagggtactcaattcaaacatcgaagtatatcttatgatgtaaatagaaaacactacaggttagccaacaggctaccttaaggacaggaaacacgtatctgcacattaaagatttacacgaagatcagaataaattttacaaccaaactttctgtgctattaagttgtgctaccaagagttactacaattaacctacttcagactgattaaaaggaaggctcctataattcatgttgtaatgccttcattatgagacaggggaaaataatttggagtccaaaaagccatagttatattataagaggaaaattctccttattctacatataccattttaagaatttcaacattcagcacttggtagagaacttgaagtaataatttttctaacagcataaaggaacatgctacttcagtgtcatttttcaggaaatacgaaatagtttttcttactcttcagtctcaaattgttttaaagaataatctgattaacatcttgcgatacggtcataggaagaattaaasggtctgaaaaaaccatcagtcacaaagaaatgggtcaaaggactagaaatacttattaatttttaagtcaataatttgccaaatgaccatgtgcaaggcactgcgcaaaacaaatacattgaatgtctggtaaagaaaatttttaggtataaattaatcagaactgggaaagasatatttggtttagttctattacagagaacagcaaacgaagaatttcattataagatcatctttcctgtttgtttagcctactatttcacagtgtaacatttctggtttttctactggtgtcttctaattggaagacaggtgaaccatccttcataaggtacacagcaatgtttctctaaggctcacatttaggaggctttagcattcaatcacactggtcttctataaataataggcatcattcacccagctcatttctctgatgctacctaccatcacagaataaatcactgactatatcaaaggtctccaggttggcagttggtgaggtagtcaagttattcattacgcatacttccctctcagagttctcagagttctcccaatcagaactctcctcctcttaagcttacttatccaagaaatcaaatagaatgaaagaaaccattaggttcaagaattataatgataatgttgttaaaatacccactcyttgaacaaatatgtgaatggaggaaaaacttaagcacttaatcattattcacctgtgctaagtgggagtggtgagggagcagaagtgtgagaagggagggtcttatcagtttcatagagtaccttccctatcctgtccacctatacaaattgcatttatcatcaasgcacaaggcccagctcccccaaagcaccagcagtgatttcttgctcgctagcacttccccaggatttacagatggtaacattcgtttggcagtttcatcagatatcatcttgtattgttatttgatttgtgtgctttttgtgtgccagatggggctataaaaatttcagggcaatatcctgagtcacagttgtagggtttttttcccccacagtgactagcacaatatcttgcacagaaagtattaaataaattacttgtgaaatgaataaacttaacagcaagtagtcacagttgttttgtgctttcatgcagcacaaggaggaagaagcaaccaagatacataaattagggactttttgaaaraggcttaggccaataatgcactaagttccataaaatgttttggaattatcttaaactcacacctgtcacagctgctttcatgtagcaaataatcttccagtaagaacactgatctttatttcagtaactgaaaactacttttcagcctgggtccaaaagtatcaccagactccctaacattataaaggggaagaagcaaccaagatacttgtattaggaacttttcttgtgtgtttttaagctttttgccaataaatgcactgagtgccataaaaggttctgcaaattctcttaaaactcacacatgtcaaagctactggatcgtatttaacatgttactgtttgctccatattttgaaattcacagcacatgcattttaagaacatcccaccttggaacwcccttgtacattttgaataaagaatagaatcagctcatgtcaggccatgaggtcttatctctcatctacataaacgttgagcttcaacggatatcctatttttacattcgttaaacttaaatcttgtgttaaaaagggaattaactgaggaggctgccacaggtgtcatcttaaatcttgactgtgtaaactggcccttcactatcttaagttcagcatggaggggaaagttcagtgaccagacgtttcttccacaatgcagataccccgagcctctcagagcggacccccagcacrtgtgcggacagcaactcggccgggacttgcgcggctacttacagggtcactttagtggtcactgtcgacctgcccacgccgaaatggttcctgggcttcaagccgtcggcgtcagaagctccaggcgctccggccgctctgcccagctctctgcttcgacctccctctgcccggccgttgaagtggttggggagcgggcccctcttgtgctcgggcttgatctccggcagcagcgagctgctcttgaccgggagctcgcgggggatggcccgcgccgcctcctccccgctctcggccgcagtgcccttggtgactgggctgggatcgggcaccctcttgggtggggactccttggcgggagcccgggggccgctggcgggcggggcgggcacggcctcgagggcacggctcctgcccttcctcttcgtgggggacgaagccgggggtggctgtttgctccggtccgactcccctcggagctgccctttggtaccggggctgggcttggaytctgggctcgcagcggaggcaacgcccccgtcgagggctgcccgcggagatttcactttcttttccgccgaggcgttatcgctggccgcgtttggcgccacctcgtcgtcgaacaccgcgtcgtccctggcagcgctctcagggagctcggcgtccgcgccgggggagtcggtggatttctgcgaccccctccgcctccccgacctacggccgctggacctcttctccatgtcgtcccagtcaccgcaatcttccgctctgggagtaatcacgaccggctcgtccacttgtgccccctcagtcttactcaagtagatgtccaaagttagcaccttagcagggtgggcgtgacccttggggcgggctgtgcagtctgcctgcgcggagctggccgtgtgcgctgcgccctcggccggaggctcacctggcaaatcagacgcgcccttgcggggctggctgcgggcgttgcggggccccagggagccctcttcggcacacacactgggggctccgttaggggcctcgcctagtcctcccgcgggccgctcctgggtgggcgaccctggcgcacccctcacacccaggaaagcctcctgttcgtggccagcacctggtgaagcgtcctcccccggactgcgggcgggcgtctctgcgttctcttgcctggaggaatttcccggcgaggaatgcagctgcttggcagtggtggtggcatctgggaaaggctctccctctgcctccagaggttctaattggggtgaatcattttcatggcactgctgcacagccacagccgctgcactgctgctccagcgaggtgacagctcggcgtcagggggggctgcggggccaccgctctcggggagctcgccctctgcctctcggggattctcccgcggggagccctcctcgcttgtgtccgtttgcttcagttggctgctctgagatctgctcctctcactctctctctctgggagcttaggagaggctaccacatctttgggagagagtggtttggcatttgatctggtgggactctctaacccgtttctactgtttcttctccttcctgcagtgaatagagtgccaagtttccccaaaactggcttccttctgttgtcttctggaggttgtgctctggactgaaaaataaaagggatgaggagggaacatatgagaatctggtgtttttccccttagacgtacattacagaaccaccagccaaaatgataacagaccagagtttctaattgaaaatgataaagttatgtttatgttacattcattccaacaaaataaactctggttttacttttgaattttgcttaaacaccttaagtttctggcagtagtcagaatagcattttctttgaattataattcttgttttttaaaggaaaatttgaacggtccaaataatcacatatacaaaataaatagttccttgccctctctaggttttttaccttcttcctcaataaagatgcaatttataaacagccgtgcatgtgaccatggggcagcagtaaacacactaaagtatcctaaggcggactttttcccgaaacaccgcccattctttttgtaggagggaaggaggacgaagaaaaaaaaccagtcctagcagccttctcctccagaacagtaagaagccacctgggttcaacatctagtacttgcaacatgaaaaccttaagcaagctcggaggaagcaagcacctgggccccgccttagccggagctccaatgggaggagcgcgcgagcgttcaaacacccgagtgatcccgcggctgcagagcgcatcggaaaggcttttgcctgtgggagttcctaccatgtgaacacggaggagtgcgtgggggtagcgggcgaggttgcaggggtgaccgcctttgctcaccgccccctagagccgaggaggtgtggttgaaggatgcgcttgggactctgcctactccgccccgggacccgttcctcgccacacgtgtggttccggggtcgcacggctggagccccaggggccggcccacctatgcgagggtgccgggccgcctgcgaatgatccgcagcgctcccaggaagggggaaaacctgggcttcttatatctcctggagcaaaacggctagcatccagtgcccgcgccagaaggcgggagggagcgcagaacaaaccaataaaagcaaacccgccaatgggcgcggtggcgctccggggtttgccagagtggggactgggtaggtgcggggcatagaggtgggcaggaagaggaggaggcgagcctgggaaagcgggggagcaggggcggcgagcccagcctggctcctaggagagggaagtgtatttgcgtaaggactcctctgaaaccaggccaaacgtgcggctactgtatttcttaagaatcaacttttaaacattcaaaacctaggtgctagcttgagtcctggcgacgcaggaaagagccccacctttcctggaaaaggaacattcaggacagtaccgactacggggaggttccccaatcaccctttgaagctccattgcgtttgagttacatgcagcaaatggactttggcgatgggaaataggaaagataacgcatgaaattaacaggtcaacaagcatttgttgagacagtcctggtactgtaacatagtgtcaccccgctacagcccagtaaggtcatgctgttaccacacagatgaggaaaggaagctcagccagcctataaagagacacaaaattggggtgggggggagaggcggtcagagcagtaaagtcagaattcaaatccaagtcgcctcctgcccaccccatgctccttccattcagccacaggggcccctttcagaggccgcggaggttctgccgccacccgagaaccacagtcggcccagaggaacagactacgggtcacccaccccccagagtcagctcccgaggaagtgcgcatgaatcagatttgctctcaaggttctaagactctcctggtcttagaagcgcctggtgggcgctttgggactagacagctgctgctgctgcgatgaaccaatggtgcagccgctcggagctcttgtacccgacgtcatacgattttaaaatctaaccagattttgattaatccgattcttcaatggttatataaataatataggaagaattcgaagtatgatttaagggaaaaaattaaaatattgtaacttcctaaggaaacatttggattattttacaagtcaaaggtatgacatgatttttaaatcataatacatgtttactgagctatccttatgggtcaggcccttgtgattcacacactttcattttatattcccaacagctaggtaggtagtctttttttagtgcccgtttgtccaaggtcccaccacaggtaaagtctgactctgacatagagctctgtgtctctgctgtctggacaggccttcaaacgtatcttgaagtagtagccagggaaaataggtttgagtcttggcttaattccattccctgtcaaaataaaccaactaagtatatgtattactctgtcctgccaatgatgttgcaatctgcttttcccatgcagcaaagacgcttgatcagcaagcagtcctctctatgcttagtataggcattaaaacaaatttttttttttttttggctattagatgctttttacaaaactggttgcttgctcttcaacttggctcaactacttgactcctcctcccctcagaggggcagcctgtttatcaccagccagactgctgaatttcctaaaaatacatgaatgttcatagtggcttcattcattcataatagctaaaaactggaaacagctcaaagtcaccggacatggcttgtgaacagataaacaaattgtggtacatctacacagcagagtattattcagcaataaaaaaggaacagacttctgaaacatgtaaggatatggatgctaaatgcttttgcagactccaaatgttacatactgtatggttacatttatatgacattctagacagtgcaaatctaatctataatgatagaaagtaggtcggtggttgcctgagggtggggtcagtgggtggtaagtggtggtggtgcaacagggaagaggcacaaaggaacgttgagggttaaagttctatatcttgattgtggtgatggttacacatgagtacttatctttcaaaactcatcaaactgtacatttaagatgggtatatataaatgaagttaagatacaatctctttaaaacagagtttttccccctgggaaataaagaatagaaatgcactgtgtggcacaatccatctgtcttgggtgcacatttcacagggtctcactgtattgaccagcctggtgtgcagtggcacgatcacagctcactgcagcctcaacctcctaggctcaagtgatccttccacctcagcttcccaagtagctgagactataggcatgtgccaccatgcccagctaatttttaacttttttgtagagagtttcaccatgttgcccaggctggtatcaaagtcttgggcttaagtgatccttctgcctcagccttccaaagcgctgggatgatagatgtgagccaccgtacccagccacgttatgcagttcttaatgagggatctcgtgtcatttcaaatgatagactcgttgacaggggaatgcagtcttctcccacgggaccaggtccctgtggatatccaagatcatatctccaaacaggatcatctgagcagggctcagaatgccccatacctcctgagtaaagtcctcagtcacatctttgaggaacaccccttcctaaatgcgatacgtatttcttttcaaccaggaattgtttctttccattgttcagggggaaactaaggcaaatggagacaaaaaactagctggcctgggagttgtcagagagggaccttcttaggtttgagcctttgggtctggggtcttaaacctaggatgggaagccacagacccaccacctttccaggcttgatgataatttgctaggaaggggagtgttttgcaaagaggccatgagtgaccatcaagtttcttcatgcttcctcagattcctctgcccctgactttcccacaggcctgggcagggtcctgagggttcccaggctgggtgttctcagagcacatgcaatcctgggtcctcctttgtatttacctttttactgtgtattttctgcccaccttacttaaggcagcctgcacaccttacagtgcagaacctgcacttggcacccttccatcatccatgtccaactgggacggagcagtccacaacaggactattgtagaggtggcacatgggttgtgtgctacgacctgctttagagtgttcttgttggctaatatgaaatgtggctcattaggggcacatgtaaccatccacgagatcatattccagcagcgtgtagaggcccaggcagcactagctgcagtgctgttaggtgattctcaaccttcgtggtgtggcagcgcctactatatatactactatatattcctactattaccacttagtaaatgttaccttgtaacatttgctacccattagttaaggagataatgtaaatggtagagtttttttgaaactgttctggttctgaagctggccgaatcatgaatttttctttttttccttgcttaaataaattctgctaaatttgactatctaagggtttttcctttttatagtaactatgggaacaaaactaagtttttaaattttaatacaattatgggtcattgacatttgttttatgtttataatctgtttatatctttaagaaatctagactgggtgcagtggctcacacctgtaatcccagcattttgggaggccgaggtgggtggatcacctgaggtcaggagttcgagaccagcctggccaatgtggtgaaaccccgtctctactaaaaatacaaaaattagctgggcatggtggtggttgcttgtaatcccagctactcaggaggctgaagcagaagaattgcttcaatccaggaggcggaggttgcagtgaactgagatcacatcattgtactccagcctggctgacgagcgaaactccatctcaaaaaaaaaaaaaaaaaaaaaaaaagtgacaagaaatctaataacattttgagtaaagtgatgtttcttataaaaaataaataaataagttttcctatgtttcccaccttttcattccccagtgaatgtaa

SEQ ID NO: 98003 - DNA, 59405 bp, Homo sapiens
tacaggcattgggtaaatacaggtgttccaaatgggagaaaatgccaaaaaaaaaaaaaaaaaggcattacagggcccatggaagtctgaaatccagcagggcagacacattttaaagctccaaaataatctcctttgactctaggtctcacatccaggtcacactgatgcaagaggtgggttacaatggtctggggcagctccgcccctgtggctttgcagggtacagcctccttcccggctgctttcaagagctggagttgtgtgttgtcgtgtctgcagcttgtccaggtacacggcgcaagctgtcggtggatctaccattctgggtctggaggacggcggtagctcttctcttctcacagttccactaggcggtacccccagtagggactcggtgggggctccaactccacatttcccttccacactgccctagcagaggttctccatgagggccccgccccggcagcaaacttttgcttgcgcatccaggcgtttccatatatcctctgaaatctaggtggaggttcccaaacctcaactcgtgacttctgtgcacccacaggctcaacaccacgtggaagctgccaagtggggcttccattctctgaaaccatagcccaagctgtccattggcccctttcagccatggctggagcagttgggtagggcaccatgtctctagattgcacactgcacgagcaccctgggcccggcccatgaaaccactttttcctcctgggcttccggtcctgtgatgggagaggctgccgtgaagttctctgacatggcctggagacattttccccaaggtcttggggattaacattaggctccttgctacttatgcaaatttccatggcttgaatttctcctaaaaaatggttttttggccggaagtggtggctgacgcctgtaatcccagcactttgggaggccgaggaaggtggatcacgaggtcaggagatcgagaccatcctggttaacatggtgaaaccccgtctctactaaaaatacaaaaaattgtgaggcaggagaatcgcttgaacccaagaggtggaggttgcagtgagcctagattgcgccactgcgctccagcctgggcaacagagcaagactccatttcaaaaaaaaaaaatttttttttctactgcatcatcagggtgcaaattttccaaacttttctgctctgtttcccttttaaaatgggatgcttttaacagtacccaagtcacctcttgaaagcttttctgcttagaaatttcttccaccagataccctaaatcatctcactcaagttcaaagttccacaaatctctagggcaggggcaaaatgccgccagtttctctgctaaaacataacaagagtcacctttgctccagttcccaacaagttcctcatctccatctgagaccacctcagcctggaccttattgttcatatcgctatcagcattttgggcaaagccattcaacaaatctctaggaagttccaaactttcccacattttcctgtcttcttctgaggcctccaaactgttccagcctctgcctgttacccagttccaaagtcacttccgcattttcgggtatcttttcagcaacgcccccctctattggtaccattttactgtattagtccattttcacgctgctgataaagacatacctgagacggggaagaaaagctttaattggacttacagtcccacatggctggggaggcctcagaatcatggcgggaggcgaaaggtacttcttacatagtggtggcaagagaaaatgaggaagacgcaaaagtggaaatccctgataaaaccatcagatcttgtgagagttattatctaccatgagaacagcatgggaaagactggcccccatgattcaattacctccccctgggttcctcccacaacacatgggaattctgggagatgcaattcaagttaagatttggaaggggacacagccaaaccatatcatccccttagagggaagcaggagaagggaattaacattcactgacactcccctgtgggctaggcactgagctgaccacttggttcacacaatctcctctactccgcaaagcagccccgggaggaaagaaccagcatcttcatctgacagaagagtggtcaccaactcacggtcacacggcttccaccagctcaccccttccttcaacagacactgcctccacacagtggccagccagacatcacactagatgtggtcatggggtggggaggggatacagtatcgagccctgccctcatacaagaacaccactttctccactagctcctttacctcttgcttatcaatttctttgcctataaaataaagaagctgctgatccctaaggattgtgagaataaagcaaagtgacatagcagacactgttgatgtgcttatccatatcccccgcccaactggaggtaactgcgggaacttttctatgtgcactgatggcttcctgtgtgtctctgcctgggggcttctctggctgccaaacacttggcccacccagaggaagctgaagtgccaggagttcatgttctcggccaataaggagtctggttgtcggtgcataaatgccccagcttctccatccctcggtgggatcactgaggcatgttccacacagtctcttggcaaggccccagcagaaagagctccgggtgccaccaggagtagcctgtccatccacatgcccttcattgtctttccccatgacttcctcaccatgcttccctgaagcacctccacataaacttcttgcacccacatccttgttcagcgtcagctttggggcaaacccagcctaaaacagtaacattttacagcctggtacccagtagacacttagcaaatgctgtctaccttgacactcattttcatttttatagaaacagacagctttgagaacacggttgcagctctagctgagtcaccggtggctcatcagcatcttccaggagcaagtatgggcctgtggcctggggatgcagcaagagggaggggactgagggccacgggcctcagcctgtagcctcatgggtctgtagcctcagccacttggaagctaggttaatctctgtcatatacacacactctacagtttataaagttgttttcttgtgttccagggcctacatcccattttccctcccattgttccaaatcatatgttccaactcagggttctgtgttcaacacattaggcttcaagcctaatgtgccaaatgctctgcttgttgcaaatacacccctcctcctccaccaccaccacctccctctccttccaggttcccttggggtccaccaggctggaggtgaagttcccctgcatctgggcagaggagctgatatggctcacctgccttctaagctggctggtgaggcccaccagccggcccattgtgcccacctggccatgattttgagtgctgggaccaggtcaagggtgtcaccttgccccgctacaagttagtctgctctattagcattgggagccaggggcaggacgatgtggtggtctccagccagagcctgtgggacctgcatgcagacagctttcccacctcccactatgtgaacccacgctcttctgcgtggcactggtgcatgacatctgtttggagtgagccctgcaggatgaggcccacgtggggccccacattagaccctggcacccaaacctcagcctccagcccatcagtcagtgatcccctgtgaaagcagcacctacctgggcaaccccagcagcttccatgactcatggtccattaaaaaaaagaaacagagtaagatgcacctacgtttcccctccttgggccacctgggccacacacactgctgagctcctttgcctctggctggaattatgtcaaccactgcagctcccagctggatgtacagatcagaagctctgaggggcagctatctgtgtctttgattaataaaaaatgggagataaattaataatgacttaaaacatgcaatttgggatcaaaatctcccaaagcatgggaaaaataataaaaaggagagttcttgatagtgaaagtctggaaataaatgctgtcctcagaggtcaaccatgagtcagggcactgttggggagggagaaagaagggggaacggggtcttacacccactccgtgccaggtgctgtgtttggggtttacacatttccctcatcctcacacaaccccaggagacagtgttaccattcccattttatagatgagcaaactgaggttcacagagcccaagttacttgccctaggtcacaggatcagtaagagactcaaacctaggtctgcttccttgacaaaggaaaacaaaacgacaaaaaaagaaagaaaaaaataggccaacagtgtggtgcttggcaagtcattctggtttgagtttatgaggaagagggacaagtagagggaacagcccatcagctatgaataccaggaatgatttatatgatttactgctgtgtctcctgcacctagaatggggcctggaacacagttcatgctcagaaataatcttcagtgaatggctaaaatgtgtggggggataaagaggcatagtccattctgaggtaggagagagaaagtgaatgtttctaagcccctagtttctagagagcattgaacaagcacattggatttttttttaaatgtttaattatggaactatttgaaaaacagaaaaaggtagaaaataatatagtagacattggggaactcattgcccagatttaccaggggttcatattttgtcatgtttatgtcaagtatttttatagtaaaatacaaatacagatatggctaaaaaccccatcaccccatcccattcccttccacctatcaccacaggccaccactatccttgaagctggtgtgtctctgtctcttcctgagcatttagcattattttgggtttttacagtttccaagtacaggtatctcactgtagctatcctttcacaatgtacatttcacttagttattatgtttttaggacttcgtctatattggtacatgcggatggagttcactttaattgctgtatctacaggcagtttttaattccttgctatttcagagaatgcagcaataaaaatctttttttggggggcactgagtctcgctctgtcacccaggctggagtgcagtggtgccatctgggctcactgcaacctccgcctcctgggtttaagcaattctcctgcctcagcctcccaagtagctgggattacaggtgcgcaccaccatgcccagctaatttttctatctgtagtagagacagggtttcaccatgttggccagcatggtctcaaactcctgacctcaggtgatctgcccacctcagcctcccaaagtgttgggattacaggcatgagccaccgcacctggtcatcaataacaatccttttattattttttttaagatggagtctcgctctgtcgcccaggctggagcgcagtggcacaatcttggctccctgcaagctccgcctcccgggttcacaccattctcctgcctcagcctcccgagtagctgggactataggcgcatgccacgcctggctaattttttgtatttttagtacagacggggtttcaccgtgttagccaggatggtctcaatctcctgacctcgtgatccacctgcctcggcctcccaaagtgctgggattacaggtgtgagccaccgcgcccggcccagtaacaatctttatacacatctctggttgcactcatgtgtcacacacaacctttaccacaatcacatgctggaacttgtgtatccctacatgaccttggaaaatcgcttgaagtctcagaagcttagtttcctcatcagtaaattggggtaataaaatagcatgtatattggtgaagattcttgcttcaaagtagaggaaacaccttttgccacctggaaagcacttcctgaacattagttgtttatcgctcaggtattcgacatccaggaagtgctgagcatcctcccctgttaggggtacaatgggccggccctcatgctcacatgcagatgacacttatgggtacagcgacagaaaagcacacaagcctctctgctcactgaccaagctggagtggaagagacaggcgaggctcccgggaggaagtgacactgagctgagacctcaaaagatgaggaggcaaaaaaggtgagtgggagatcggaaggtgggaggctggccaggcagaggaagcagcgagtgtaagggatgagctgacgcaagagaacatgtttggagcctgagaggtgggtgtgagtgggcggtggcatacaaaaagtctggagaggtggcagagcagagaggccctaccccaaggccacagggagacagggaaggattycaagcaggggagtgacaggcttggatttgtgtgtggggaaaactggtctggtctcagcgtggaggtggcatggagactgggagctgggagacccatgaggggaacacagaagtgacgtyggtaaacatggtgagggctgaactaaagccaatgycgcttctgcgaccaagaatctgtcctcaggccctctagtagctgttgccttcctgaagcttgggatgcatatgcacaaagagagctctgtgtggctcacagattgtggacacctggttgacctcttgatgcctgcgtatcatgtctagctcctaagtctcccttctcctactacaacatcacacggtggccacgcctcccacaacacgcagtggrcatcatcagaggaacagcagctgatgggaaccatgcccccacagctccaagaggtctgaactcacacaccacaccccacactcttcttcttgggcttgctcagcaccttgtggggcacagcacccgrccctgcactctcaagtttccaggcgacaggagccctttaggcttcttggcaccaagggcacggctgggtccccaccaatgtcccatgataagagatgccaccagcagccaggctgcacagaacctacacggagtgaggggaagaggaggccarcacattctaggttggttaccactgggtggccttgtataatatctaaatatctaaacatctaaaatgagacaaggacagagatacgagaactgccccggactctctactccttaagtggagacccccttaacactctttttgattttattattattattttgagacagggtcttgctctgtcacacagattggagtgcagtggctcaatcacagctcattgtagcctcgacctccttggctcaagcaatactcccacctcagcctccaaagtagctgggactacaggcgcataccaccacataaggttaatctttttttttttttttttttttttgtagagacagggttttgtcatgttggccaggctggcctcgaacttctgggctcaggcaatctgcctgccgcagcctcccaaagtgctgggattacaggcatgagccaccgtgtccggcaacactcttaatatgagtgacttcaaagcttttgaagcctctatccccgctggcagtggtgtgcccctgggctctcccyagactaggctaaagcccctgccaaccactctcccagcaccctgcacttaccttttcatgacacccatcacttttagacttacaggttgaattgctgccttccttgctaggctgtaagttccccgatggacataactgcatctgcctggygtgctgttgtttccctggtgtctgaacagagtcaggctcctgacaggcccccgctatttggagctgagtcaataggatgtgcaaactgagggagaggaaagggtggaggaaaactcgcagacctcagaggcctggggagaggaaaagtgtcttgctcaagtcacatactaggcaggaagagatcatggttcctgctcagaatctttgactctcagtcagggcctttcccactcactatactgtgctagaaagaggctacgaaacccacagaaaagtgttctatagttaaataagcttgaaaaactctggattaaacaaaatgaaaggagtttctttgccactggtcttttcagggcctttaacatgctcctgtgcccgtgcttctggaagaaggtcacacacagtactccatgctctctgaccctggaactctgcctgtgaggcggtctgaaacctccagcaccaccccccagctatgtgtcacaattatttattaaatgtgacacagcagagagatttgttgccattttttttagtggctaggaaaatccttttgtacaaataaaaataattcaaaaccccaatatatgaatgggataaaaatgcagctgctctggttgaagggggtaytggggatccatctggagctgtcctttcactgctgctatgcaaagaacccttgcttcctgtagagcgcagttcgaaaatcactgatgcagaattggcacatgaggttgaagctaggaggcttctagtgctggctctgccatggactgttttaccctgggcaagtcatttagtctcactgggcttcagtttcccgtgtatacgataagtctgtcacactgtatgtttcttagagtcctgaactttcagctttgatatggtgaagagtacatttctatgactataaaagtctaactctaagattccatggcttaatattccaattctgggactgcctgtagctagcccaagctggtgcagcacgctagagcccaggctgttgaaggcagaattcattaactgcagtgcgctgcccaggggcactgggttcctgggataggggtgccaggttcctggggtgggtggaccgtgatcggcagccgctcagtgggacaagctgggagagggacccaggtctcctgactcctgctctatctttagatctccatagcaaccatcaccagggcaccaagctgaaggcacaggctgagtggctgcctgcaggaggagggaggggcgtttccttcccgtgcctcttcttttgctaggctcgatttttgagccaggaaaggggactgagaatgaagctgttcacagcaagaaaggcttggggccaatacaagacagtcgagggccccaccttgctctcaggatgtggtcaagtcatagaacccaagaccttcatgtgtcaggctcatggcactggaggaaaggcagaatcctcctccaaagagctctaagcctctcccgtgtccttccctacacactcaggagcccctaatccgagatggtgctgaggccacagttggagcccccattagatcctctaatcggaggggccagggaagctcctcccgactcttcccctgcccaactcctactcctcctggggctcagcctggacttggcttcctctgaagagtcctccctgactcccaggctggttgctcacctcctcagggcccctacagcccatcctccttctacatagtaggaggccaggaggagtgattaacctcatggggcagatgagaagtagaggttctgagcagtaaagacacttgcccaaggtcacctggcaaatgagcagcaggaccaggcctggactccgtgtcttctgattccagtctgtgctccttcctgggtcccagtagcaggctcatggcctaggctttggaagagaggccagggctagaagaggaaataggagtcctcagygaggcctgcrcacagtaagcacctggctatgtctttggtgaactcagccgagccacagaccagtgcgaatggctttctccgacagcagctgaccagctctttaattaggtcctggcccaggtggccaaagtgggttttctcttggtaactccagggaagctgctctgaggagctctcctgggaagacaagaaaggcatgggtgactacaagggagcggggggtccttagtgttcacacagccagctctcctctgcaaaatgaggaaaccaaggcagagggtgtaggaagccaacctatatccaggcccaccatgggccaggcatttcctccttatctccaaaacaagcctgtgagaactatcaccctcccacgacagcagaggcacagggaagagggacttccctgtggcacacaatgaggcgggggcagcagcaggaccagaactcaagtcccaccatttctcactgccttccagcagccacacctgtcactgtgggacggatgttttctcccctgactgtgggtttcccagaatctttccaaggttagctatcatcatcaccctcggagcataacttttgctcatttcttttaaggtttcaatgaacatattcatttagcagatatttaccaagtgcttattctgtgccaggcaccgagctagccactggggatatggcagctgctcagaagagacaagggtcctggctgcatacagcacagatcccaggtcacaatgccttcactgagaaaggctaagctcgcattccaaggctggacggtgaccccacggacccaggatccttctctctgcccttctagccttagctgcagctttcctcctcagggtcacaaaatgaaggctccactcccaggtgacttgaaggaatttcttctatttttttaaatgaacattttattggagtacaacatatgtgtagaaaagtatacaaatcattaagtatacagttagccctctgtatccatgggttccacatttgtggattcaaccaactgtggattgaaaatattttttaaaaaacattaaaaaataacaatatagcaatagaaacacacaaaaaatacagtataagagctatttactcaacatttacattgtattaggtattataatttagagataatttaagtcacatgggaggatgtgcatagattacatgcaaataccacaccattttatatcaaggactcgagcatcctcagattttgctatctgcagggggtcctggagtcaatccyccatgaataccaagggacaactatatatagtctgaagaatttaaatgaaaaaaccatcttacaagcccacaaaaaaacaaaatccagaacagagccatcactctgcagatcctatgaaggcaagttgctagttcctggggctaggcacaaagacaggattggtggggagtggagctccactgccactttcctgctgagtgactgtgacctctcaggatcatgattgtgaggagagtatccactatggaaagccactgtccagagagccgtggtgctggtgtaagccctgggagaggccctgtgaggagaggcctctattctgaggcacactcaaagggccctggaggcaggtgcagtggctcaagcctgtaatcccagcactttgggaggctgaggtggcaggatcgcttgagcccaggagttcaagaccagcctgggcaatgtgacaaaagctggtctacaaaaaatacaaaaattagctaggggtgatgctatgtgcctatagtcccagttgcttgggagactgaggtaggaggatcatctaagcccagggaggttgaggcttcagtgagttatgattgcaccactgcactccagcatgggcaacagagtgacaccctgtctcaaaacaaaacaaacagggtcccctggagccccacctcacagagtctgtgctgatgagggggatcctctctgatgatctggcatttcccaagctcccactatggtctgacccaccagatggggccttggggcccactggcctcacctccccttttccactgctcatttccctcagaccacttaggttcagctcagcctatcccaccatgcaccctgagatgccctgggcctggctgctggtgagacggataggggaccccacaaacagtgacggtgcagcaggtgggtgctgtgaaggagagccagggtggtggcagcagaaccatcaaggccagcctgggggctctaggaaagcttccaggatggacttctacctcaacagggatgtgaggggtacagaggtgggaggtgaggaaaggagagcactcctggcaggcagaatggcgtgagcaaaggcccagaagccagaaaagcacagcacacttgcaaccataggcagacccatgacatcaggccacagctcacggggagggcgggctaggagatgaggccacagagggaggcagttcccaggcatggacctcatcctgtgagcagtagggagccaggcaagggctagaaacagggtggtggtagggtcagatctgcctttaggactgcaggaggcaggacaaatcagcagggagtggctggtacggggagactcttgaggatgctgcagctgtggcccaggcaggggagagagcacactgagtcaagagagtgtgyacaggcaggagccaccagtcacccccttcacctgccactgatggccagcccactcgcttgcccaaccccaggccactggcaccaccctggcccagctggggactaaaaatcttctattgctggtgaactttaacggaaatgccacctgcttggtaaagccatccctgaccctgcctggcctctacccaccactggcatcccgaacatcctcacagcaccttgtgctgtgctgccttattctgaggagcactaagaccacagcctttgaacaggacctcctgggttcatactccactctccactaacttgctgtgttaccctgggcaaggttcttaaccattctgtgcctcagtttccacatctgtacaaggagcatgatgggagtataagcctcataagattgtggtggagattaaattaaataaagtgcttagaatggtgctggctacagagaatgtgctgaatgaaggggagtccttttcagccgtctctgtggctgtcacccatagataggtgagcagccggagggctgggagtgggtcaccttcactgttgtgtgtctgacacctgccacattctcaggcgacagaggagggaaagcaaggctggccagcagcttggggaccctctgccaggtgctgccttcctgccctcctcccagcatccttgtccaggctctcaggcaggctgcccatgctgctgggcaacagtggcccatccctcgcgcccaccccttgggctgcacgctagcctttggctccattctcattccttgggcactttccgctgctataaatgttcaccacgctctcatgtcatgccactgagcattctgccccatggacaggcctgcagaacccagcccctggggagcccagggacccttatattgggacgggaaatccaatttcctcaccctccacacccagctacaatgttgaggatcaagtaagtgtttagggactacataaagctgcctcatagcgggaccagatgagaatggtaccccacagcaccgggcaagaaggctgaccctgagcaccagggaacacagggggcccagcaggaatcccaacccagmrgggacaggagggaaaagtgaagctaccaaccagggaaaggcaggccaccaaaggtagctgagggcctggcttgagatgaggggcagacaatcccccatgctctaacctatgggggtggccccagaagggttacctgagtgagcrgaggggatgtggagtcagagggaggaggggtcagcagggagagtcgctgccagctacggcggggtcctcctatggagggacaggctgaggtgggaggatactagcaagcacagggaactcagatcagtttactccagcagtcactaatggagtccctgttctgtgcctggcatcatgctaagcactgaagagagagtgctgaggcagacatgtggtctccacctcaaggaacatcactcagttggagggaggtctgcagcctgccctgccctctacagccaggcccctgcccatgtaactgatgatgccagagggcgatgggaggcagtaacgcatggggtgagagccagagctcagcaaccagacagccctgggctcaaatcctggcctcagccctgtccagcagcgtgagccggtgggcagcttcacccactgaatgtgcatctcctcatctgtataatgaacatgagaacacctgccttccatacaggtgggtgctccaccagtggcagggattatgaccacagcatccattgccaaaagaggctagagctggtcctcaggacaggtgcaaagggacagcagagtctcaatcaaaaaagaaagtcaccaccctgggctcacctggctgagtacaaagaaggtacggacattccagaaaygggcctgctcttggaggaaggttttcaggtagatgctctsaaaggtcttgaagcaaccgaccagagtgacaaaagtctcgtcattctcattgtctgtgatgctctgcaggataggcaccatgggggccaggcccgtgcccgcagccagcaagaggagctcaccatactggggaacagaaggggtatgtrtgacaggtgggttgggagagtctcaccttatcccctctactatgggacttttcctygagcttccttcaactggacggcagtgcccttccttggtgtccaaccacctatgtcccctctctacctcctccagaaagccgtccttgtttgtgaaaggcatgtgaggtttgggtaatggagatgatgggatatggggactgaaagggaacataacagcatagcccatcctgtaagtggcctggttgcctactaaagcatccccacaagaactctgcttacatacttctactgacagggggctcattacttcccaaggcagtttgctctactgtaggccaaatcctttgccagggaggtctttacaacttacattgagctgaaacctgctcccatcaaagccttgcccactcccaatgccattccagccctgctctctgggctgcttcctctgccccagggtacctctgcagagatctcaagggcccaccttggacctctgagcttgctcatctctaggctaaatgaaataatatgcataagcatgtagcacagcactggcacaaaagagtcacttgaaaaaggtgagttcccggccaggagtggtggctcacacctataaacctagtactttgggaggccaaggtgggcggatcacttaaggtcaggagttcgagaccaacgtggcaaaactccgtctctactaaaaatacaaaaattagccaagcgtggtggtgcacgcctgtagtcccagctacttgggaggctgaggcagaagaattgcttgagcctgggaggcagaggttgcagtgagtcgagatcatgccactgcactccagcctgggcaacagagcaagattccatctaaaaaaaaaaaaaaaaaaggtgagttcccaccccaggaggtcccagttccatcaactcctcctcactgaatctatttccaggctctaggcctcttaaagaggggtgaacctctgtaatcccagcaccttgggargccaaggcaggcggttcacgaggtcaggagatcgagccatcctggctaacacggtgaaaccccatctctactaaaaatacaaaaaattagccaggcatggtggggtgcgcctgtagtcccagatattcaggaggctgaggcaggagaatggcgtgatcctgggaggcggagcttgcagtgagctgagatcgcgccactgcactccagcctgggtgacagtgcgagactccgtctcaaagaaaaaaaaaaaaaagaggggtgaccctctttaaggtcagtgccttaaagtttagtacctgagtgatgcaggggtatttaccaccctcattctagagattaggcctctgggtataaatccccaaccatgtgatctgggcaagctctttcaccaatataatcctcagtgtcctcactggtaaaaaaaagaaacgcacttccccataacagcacctatctcagaactgttaccaggattaaatgagatgaagaaaagtgcttggttggctgggtatggtggctcatgcgtgtaatctcagctactcaagactgagacaggaggatcgcttgagcccaggaggttggggctgtagtgaaccatgatcatgccactgcactccagctgggcaagagtgagaccctgtctcaaacaaaacaaaacaaaacaaacaaaaaagaaaactgcctggtgcagatccaattagattcctccccctccctaagctgctgagactcacgcctggcagctgttgctgtgtctgtgctctctccagcctccaggccttcagcttgccatgctcctctgcctcctcccatcctagctcgggctatcctttggagggcctttcccaagccagggcaggggaggctcctttctttgtgtttccacagctccctgtgagtccctctgaaccacactggccacactgtgctgctgtcacctgtctgtgtgtctgactcccccagcagactgtgagcttctggagaacaggggactcatctgacccatctctaggtccccagagtcccctggccctgggtgaacacttgtgtctgtttgttgaatgaatgcacagacagatgctaatatgtcagtcttcagggctgatgtaatatccatctgtaacgaagacgactgcagagcagcaaaacagggcccggaagagggcaggagcttcccagacatcctcgtgtggtgaaaccaaggcttactgaaatttcagtgaccgcatattaaggtgtgagacaccatttctttttccctaccatcaggccctacagcctccctagctaagaaatccaggagctggacacggtggcttatgcctataatcccagcactttgggaggctgacgtgggaggatcacttgagccaaggagtttgagaccagcctgggcaacatggtgaaatcctgtgtctacaaaaaaatacaaaacttagctgggcgtggtgatacacgcctgtagtcccagctacttgggaggctgaggcagcaagattgctttagcccagtaggtggagctgtagtgagctatgacagcactccagcttgggcaacagggagggaaggaggacgggaagacaggaaggcaggaaggtaggaaataaatgcagggcctttcaagtattccgtgcatgtgaaggagcagccacaaggcattgggaggctccaccagaaaaggcggtcaagacaacgttcatctgttatccactctagacaaggaggaaacacaaacgatttccattccctgctctcaagcatctgggggatgcagggtctaaaatgcaaggctaagcatggttagtactagaagaatactatggaatagtattaacatatgcatagcacatatctgtagaatggggttgtagcacctaagagctgctgtgaagactatgtgagttaccatatagcaagtgctaaggtctgagcctggcacacatgaggtgctacacgtgcttgatattattatacatatatactacacatgtgcatgcagtgtgcatttgtacatatactcatgtggaagaggatttggaaggatatacaccaagccataagatgggtgtgtctgggtagaatgcctgtgagtgttttttcttttcttttttttttgtctctttccatctgctgatttttgggtaatgaacatgtactgcatttataaaaggaaaaaaaacaataaaagcttttttttttgaaacagagtctctctctgccacccaggccagagtgcagcggcatgatctcagctcattgcaacctctgccttctgggttcaaatgattctcatgcctcggcctcccaagtggttgggattacaggtgtgtgccaccatgcctggctagtattttttgtatttttagtagagacaggattttgccatgttggccaggctggtctcaaactcctgacctcaggtgatccacccgcctcggcctcccaaagtgctgggattacaggcgtgagccactgcgcccagccaacaaaagctatttaaaaattaaacaaaaagaatggagaggaaggcatgattcattcttttccatttgttttcattttgctttgttttcctaatcataaagtaataggtgttcgctgcaaatgatttagaaagtataatgaagaaaataaaaatcacccataatttcaccacccagagctgctaacatttcattgcattttcttttcatattttctctgtgcattttaacttaatttcccaacctcctgtatattcagttttgtacctagtgtttgtcacttcatcttacagcataagtatataacatcatttataaacagaactttaaaatccaggatattattctatcaagtacctgtagcccggtttacctaactgttcccctgctgttggatattcggttgtttccaattttctgctattataaataaagatgcaatgaacatacgcagaagagccagcattttgattcattctataggacggacttccataagtggaattactggggccaaggatttgaagactcttggtacatactgtcaaaatgctttccagatatgcaccaactgatgagaaattacgaattcttactgggaaagtcggggaagggtttaaaaatgccaggatgatgaggagaagagccatctgagctaggaagcaggaagccatggggcatatttagtcatgtgactgtactgtgaaattggaaaggcgcctgagggtcagagggcataagggctcctaaacgtcaagtacaagggtctgatgttctaagcaatggccgccctgggtagctttggagctgggcaggcagtttcatttataagtgtctactctggctgggcgcggtggctcacgcctgtaaccccagcactttgggaggctgaggcgggcagatcacctgaggttgggagttcatgaccagcctgaccaacatggagaaaccctgtatctactaaaaatacaaaattagccgggtgtggtggcrcatgcctgtaatctcagctacttgggaggctgaggcaggagaatcgcttgaacctgggaggtggaggttgcggtgagccgagatcgcgtcactgcactccagcctgggcaacaagagcgaaactccgtctctaaataaataaataaataaataaataaataagtgtctattccatcttctcccatgtccaaccccaaggatacacctgggattgtgtttgagctcaaggagaatggcacagtgagatgctatgggccgaaacatgaaaaccacagtcaacagggatctcctgaagatttaaggtgctggcactgacctggtttggtttatagaagaaatctccgaaaggtcctcgccagaaagctgtgtctcctactctccaggactcaacataccgggacatcagccccatctggtagcactggaagcaaacacagggagacgtcagcgggacaggtacatgctgccaacacaaaccagattaaccattaatgtggagcccgttctgtatgctaagtgcttcacatgtgttatctcatttaatcgtcctccttatcctacaaagttggtacagccattcccaattttcagatgaggcccagaagcttacacagaaggcagacaggaggctgggatgagaatccataggacctaaagccttcagcatagaggtcccaaacccaaatgcccacagggaccatgcaggtaccataaatgagtgaagaactgggtgatgattaatggcaattaacacacagtctcagcatcagggagacaatagggagtgatggggactatgataaattggtgagcgagtgctccttctaaggagggaagccagtttgcaggtttcagtccatagtttgtggggcctaattggccaaatctattgattttccaaaagaggcacgaaatccatatttttatttaaaatctcccatttttgaaatgtctgcaattaattcaaaattttaaaactctatgctggccaataccaaatacatctatgggctagattcaggccacccatctgcagtctctgcattatcctacaccatctcctggctggatgaaaaatgaaggttacagaagtgattcctccatggagaagggagtctatattgcctgggtgcctgtccactctgtgccaggcaccatgttgaggatgcaggcaagacagctagatcttaagctccatgaaggcagccagtgcctgaaccatggaagtaacttaataaatacctgaatgaatgaatcaatcaatcaatccagattcaggctctccccttaaggagcttacaatctagaagggacctaagtctcagacatatacaaggtagagaccatctaatacccatgagaagaataaactaggaataaacctgagaaggctgcagccacttccatggatgggatcgaggatggcttcctgggggaggaagcatttgagttggaccttgaaagatgggcaagatggaattcactggggatgggagcaggggtgcagagaggactctggacatcaggtgtagtatggtcaggggtaggacaatctgggtcatgttttgggaatagcaagtgaacatggtagggtgagggtgagggcgaagcactgggagacaggactggaagggtgtttggagtaagattatagccaggcttaacacagagaaagggctttggtccccagacctgtttttaagcacccatggccatctctgatatcatccctgacttccttgggcaccacctgcacaaggcaacggaagtccctggctcaactggaaggggtctagwaggaaaggtgaggtttttctcctgccttgctggaggctgtctcyatgcacgctttgttttctggcccctrtctagggggaggcatgaccccagctgtggccttgacagcacccaagaagaagggaaggattcttccatgttgtctttagtaccctgatatggtttggctgtgtccccacccaaatctcatcttgaattcccatgtgttgtgggagggacccagtgggaggtaaatgaatcatgggggcaggtctttcccatgctgttcttgtgatagtgaataagtctcatgagatctgatggttttacaaagaagagtttccccgcacaagctctcttcttgtctgccgccatgtgagatatgcctttcaccttctgccatgattgtgaggcctccccagccatgtggaactgtgagtccattaaacccctttctttcataaattgcccattctcaggtatgtccttatcagcagcgtgaaaacggactaatacatacccacacagagcctggcacagagtaaatgtttaatacatacttgttaaacagaactgacactgaacttttgtccttccatttggatcatattacccaagaggccttgagacaaatgatgtcatctttttgagcttcagtttcttcatctgtaaaatgggaataatatgacctactctataggttggttatgaggttgaaatgagataattagaataaagagacagaggcagtacctggtgcccagaaggtgtctgagaaatgggagcttctccttcccttctacttgggagggtcaaacgataagccctgcctgccttcccaatttgcaaagacatttctggcttttcctagccagtggcttagagataattaagcatctctctaaagagaggctttctagcaaacgaaggagaaaatcagccttgcagctgggagagatccagctgccctgaagaactgtctccaggcttatcctttccacagaaacacaccccgacaagcagcctggggaagcaggccatttggagaggatttgtggaatctcccagacaaacagttgcatgaagaagggatcccatccaagcttatgtgtggaggaataaacactcgggctcagacggcaggtaggaaggcgggagctggaggcagtgctgaggtctcggtgtcagggggcaggactcacctactagcagcacttcttactagctgtggggccttgggacctctgggggactccgtttacttatcaatgcaatatagataataagtcatgtcttataacatagattaaggatgtgaacactattcttaaatattcgtaatgattccatttgggaaatgatgatctagagctgtgtattaggttgacccacatgaagctgatgtttctttaagtcaaaaaagttagaatatcagcaatttcatgtagctcaacctaattattctttccacataattgggcctccacaacttcttatatatttgtttcctattccttkggtctccagggtgttttgcatccaacctactttgttcatctcatatctgccaattcctccatccaccctgccttctccaccagcaccctctcctcctggctctcaggctgggtatagttcctagaagacttgttctatttcacccctcccaacctttggttaaccatcccctcagcctagaatgccatttacggccactgccaatttgtactccttcttcaaggtccaactcaaatgccccggttctgcccacctcccctaagaggtgatgttaggttagtcctgtctataagctcctccmtgtcctacctcttgcctaatcctctcagattgcatcctgctcccttggcactccttccttctgttccaggacaaaggacttacttccccaattgcctttgtccatgttgttcccagcactgagtttccttcccacattttccctttagctctccattcttagacccatagcttctccayggcatcttggagcatcctcaagggtcaactcaccttaattaacacttcaaagtatccttctgcgttggcagggctgatgggcgtataggctctctgaatttctaagtcatctactatccctctgagaaacagaagtgtgcagtcagtcagccagtcattcagcaaacccttttaaggctgggcacggtggctcatgtctgtaatccccacactttgggaggccgaggtgggctgatcacttgaggtcaggagtttgagaccagcctggacaacatagtgaaacccgtcactactaaaagtacaaaaatttagctgggtgtggtggctcacgcctgtagtctcagctacctgggaggctgagtcacatgaatcacttgaacccgggaggtggaggtttcagtgagctgagatcatgctactgcactccagcctgggcaaatagagcaagactctgtctcaaacaaacaaacaactgcaaatccttatgaggtaactcctctgccaggctggtgaaaataaaggtcctcactgagaggcaggcaagatgcaacagaaaaaaaagagtactgggctcatccactgccacgtgctggctgtgagatcccagtagatcatctcatgccccgtggccccttttgtaaaatggggacagctatctgcattccagttgtgtggctcctctgggactacagatgggagagtgtttcaaaaagtgcactgaggatgtgagttgttttggagacatgactgtcatttttcctgacctcttcccgaccacagagtgataaagactaaaacaactgctaacatttattaaacacttactagcacctgacakaagcattaggactggaaggatcctcaaagggccctggtctaaagccctgtctcatgcatgaatcctctccatgttaccaaaaacagggtcaggataaccaccatgagtcacagtaatagccatggtgtattaaatgcatacatgtatcaagcatttcatatgcattatctcatttaactcaaacaacaatccaaatgaggaatccagtgcttagagaagggaagtcacttgcacagctcaaattcaatcacagctctaacttcagagctgggttcctcaccactgttcttcagagcttcccagaagcttccctaagcagtcttctctcaagtcctactacgtacaaaactttcttctctgaggtatgcaaagattaaataaggccctgtctcaatgcaccaaaagcatgagagggctggacagaaatatttaataaatgcatatgaggctgggcgtggtggctcacgtctataatcccagcactctgggaggccaaagtgggcggatcacgaggtcaagagatcgagaccatcctggtcaacatggtgaaaccccatctctactaaatatacaaaaattagctgggcatggtggtgcatgcctgtagtcccagttacttgggagactgaggcaggagaatcacttgaacctgggaggcggaggttgcagtgagctgagatcatgccactgcactccaacctgggtgacagagtgagactctgtctcaaaaaatataaataaataaataaataaataaatgcatatgaaacaaatggggacctaaggaacagagcacagagcatggcttggctgcagagcactatgacgtctgctgcaacagaggtaaaactggtatgttttagagggagtgcgcagtctcctctgggagcctaggaaacctcctggaggtgggtgctgcaggataggccagccactgacaagggcaaatcgggacaggaagggtggtgggaatggggcgtggagcaggaggctgagaccagggcaggggtgggttggcaaagggagaagaacatggtgggaaagcaagctggggccttgggttaggacatcattacggaggcgatgtggtacctcagataccttctggggtgctacattgcctccatgctgcaccccacagtgacatggtcagatatgtgtgttagggatgtcaccgcagggacagagagggtgaaggaggggagccagcctggaggcagggagttctgagcattctggttcatggatggaaggatgcctggggccatgacctgccctgtggcccctcctgcccactgggatagtgaacttctaggactgctggccaggtcacaggccagaaggagctgggcacaaacaccaggggccagtgtgaagcaagtggccagagtctgagcagcagtgagtgctcttctggtttccaccttctcctctggctgcaccttgcttcctttgctggctcctcctcctcttgccaataccgtagatgctggtgtttccagggtttggtcctgtgcgcctttctctttccatgcacacattttcccaaatgccactcagctatgtgccaatgactcccaaacccatgcctgcagctcagatctctctactgagcctcagattcacagagccaacagcctggcagacaactctacctggacatcccaaagggtcttgtctctgggcaggcaggggtggggactggggtgggagtagagtgcctaagtaggctgggaggaagtaggaacctcagaggagtggtaaagagcataactcaggagccaggctgtctgggtttaaatcctggctccgtgacttattagctatgtagtgctgggcaagccctttattctcaattctatcaattggtactaatcatattaggttcataccacaagctctaaagccacattgcttgccttcaaatcctggctccaacatttcctaactgtgtgaccttggcaagtttctggacctctcttacttcaatttcctctggggtataactgcacctaccacacaggattttgtgagggttaaatgatttcatgcctataagcacccagaactgtgccttggatagtaaatgctattaaagtgattgtgttattatttattatgaaaatgcattatctagttcaatcccaagaactctctgagtcatgtgtcactatgtctatcttgaagatgacaaatggaggcttaagggagagtacgctagttggtcaaggccagcagctagcaaatagcaaagcagggctgtgaagctttggtcctcccgctacctgagtgtaccgtaggatgaggtgctggccgggccgcaggccaagctggctgttcccggrtagagcaaaccggacacggtaggtgtccttagtgagcctgtccatggcaatgatgcagaaggccacgaaggtctctgggttcagcttggaggggcagctctgcaacaggaagagatccaacagctagaggccggggctccacagacacacaggcatccatagcatccttcccactgtcccsaaggagaggctgtcttggctcgggaagtttcctgtaaactggacactagcctcaccttacttccctttcaaaattggatctaagaatgccagagcgctttcctttgagcctatcctgctcttaagccttccatggctcccctcagctccagggtaaaatgcgggctccttccttagctgcccactcaaaggccctgtggacgaccctcatgcctcattttatctcccaggcatctaatgccagacttttctttgtcctcccaagaacaccctgctgcctcctacttctgagtctttatttgctcaagcagtgccctcttatccagaacattcatctccaatgtgtaaaagacatacccattcttcaaagctgctaaaatccagatttgcataatttataagttgatgggacctcagaatgtctaacccaatatctgtgtattacatatgtggaaactgaggcctgagttgagtcatgctggcttacttgtccacaatcacactgtagacaaaaattcaaattcatgtctmagtctcagcccactgcctttaacattccaccccaacctgcatctcctccaggaagccttctctgaatgctgtgactcacagatctttctttcctgtaaaatactccatttactcctgggacccctcaatcccagcttagggcctgcaccatcctgcagcaccaactctggaaccccagttacccatggtagtgctgacagtatcactgagctgacagaaattcttgggcttggcattcaaggccttgtctccactgtgccccttcccacacccaccatccaggatgacctcttcatcatcagccagagtacctgggtactctctggcacaactgcctggtgctttggaaagaacactggactgggagtcgggagaactgggtttagccccagctcagctgctgcctccctgtggggccttcagcatatcaattgatcctctgggtctcagtttcctagtctataaaaagggccactcatccctgataactttatagggttaccatgagggtcagatgagatacaatgtaaaaagcattttataaaatataagttaccatggaaatgtaaaatcttttcctattattattgcttcattaaaagttaaaaaaattggaatatgctattttataggactgacaaaatgtgtttgtttgcatccatctgtttgcaaattttttttttttttttttttgagatagagtctcgctctgttgcccaggctggagtgcagtggtgtgatctcggctcactacaatctctgcctcccggattcaagtgattctcgtgcctcagcctcccaggtaactgggatcacagacatgtgccaccacacccagctaatttttgtacttttagtagtgatgtggtttcaccatgttggccaggctggtcttgaactcctgacctcaggtgatccgcccactttggcctctcaaagtgctgggattacaggtgtgaggcaccacgctggacctctgtttgcaactttaaatgtggtatcatttaaatttccagtgttataataggtgatgacagctactatttactgagcatctaccatgtgccaggtgctttacatattcatcccatgaaattctcataacaacctataaagtattaacatcccagtttttcagatgagaaaactgaggtttagcacactaaaatgacatgcccaacatcatacaattaactggcagaaccgggcctcagttccttagtgagtctttctatcactaccctgtgtttctttttttttttttgagacagagtgttgctstgtcgcccaggctgaagtgcagtggtacaatttgggctcaatgcaacctccacctcctggttcaaacaattctcatgcctcagcctcccaagtagctgggactacaggtgcgtgccaccacgtctggctaatttttatatttgtagtagagacagggtttcaccatgttggccaggctggtcttgaactcctgagcttaggtgatccacctgccttggcctcccaaagtgctgggattacaggcataagccaccgtgcctggccaagtaaccctgtgattctttatcccccttctgtaagctgagttttttcagcactggtaccctggcatctttattaccaacctccttgtgcctagcacacaggatatggtacttagtagatcttggagaaacacattcattcatctgcaaatatttaatgagtgccaactgtaatgccaggaactactcaaggtgctgaggatagaacagtgagaaagacagaggccccttctcttccagaactgatattttggcaagaagatggacgatatacacataagagtacatctagatggtgtctggtagtcctgagttaggaagagaaatgaaatttgggcagagatcagaaagaagtgaaggggtgagccatgtggagatggagggcagtgagaagaaagaaacagaggttgtcacgaacattccccagtcactggcagaagccagagcactctagtccccatcaccaacttccagtggcagaaatacaaggagacactaaatataaagtcatgcatgcctgtaatcccagcaagcactttgggaggccaagaggggaggtttgcttaagcccaggagtttgagcccagcctgggcaatattgcaagaccccatctctatctttataaaaagcaaaaatatggccaggtacagtggctcacacctataatcccactactttgagaggctgaggcaggtggatcagttgaggtcaggagttcgagaccaacgtggtaaaaccctgtctctgctaaaaatgcaaaaaaaaattagccgggcgtggtggtaggtgcctgtaatcccaggtactcaggaggctgaggcaggagaattgcttgaacttgggaggcagaggtttcagtgagctgagatcatgccactgtactccagcctgggtgatggagtgagactctgcctcaataataataataataataagtgagactctgcctcaataataataataataataataatratrataataataataataataawgtcatgttgttttggggttcagagaaacaactgcaaggccaggtgtggtggctcacgcctctaatcccagtactttgggaggctgaggcaggtggatcacctaagttcaggagttcaagaccagcctggccaacatggtgaaaccccatctgtactaaaaacataaaattagtcaggtgtggtggcacatgcctgtaatcccagctacttggaaggctgaggcaggagaatcgcttgaacctgggaggcggaggttgcagtgaaccaagatagcgccactgcaccccagcctgggcaacaagagcaaaactccatctcaaaaaaaaaaagaaaggaaaagaaaagataagaaaaacaactgcatttgttcaggatgtatgatctatagcttaagaacaacacgtgtaaaaatgactaagctttggtctagtttgagccacaagaatggggaatggttggtcaaaaagtgatgatggccaggcaaggtggcttacgcctgtaatcccatctctttgggaggctgaggcgggaggatcacttgagaccaagagttcgagaccagccctggcaacatagcaagattccatctctacaaaaaagaaaaaaaaaagtgattacgatgccagatggcattgagagaggtagaaatgggagacacctctactccacattagtcaggagggacacagaaaatgggaagactgttcagatgcgggagaccaagacagggacagattcaaaacaaaacctatgcacagtgtcagaaggaataggtcctcagtttccctayctgtgttatacagggggtgaagtccagtgttctgacatctataactgtgaacccttccaaacattacaataaagggctaaactgcttagtccagactatgaagtcccggaggagttaaggaggaagaagtcagtaagggccagagaagaagaaatatcagccctaacatcctttatttacctagaataaactatagctagtttagtccataaggacaaggactgtgtctgtcatgctcactctcaaatcctcactatttcacagggcctggtatataataggtactcaataaatatagttaagtgaaatggatgtcaagctctgtgctacacatcacaaacattgagcctcattttacagatggggaaactaaggcttaaactctgcctcaaatcacacagctgctaataagtttgcttcagggctgggctttgagcctagatctgtttgcttctgttatgcatactcttttcttctgctgtacagtcagggaaggcttcctagaggtgtgctttgcagggccaaggcaagtagattgttgccctggtgctcatatygakaagcagcctctctcacctgtgactctggcccacgcagcaggctcctgtccttgctggcttgggctgcctcccacyttgccagatctcggtgatagaggtcaaacacacagggtgagcagccactgccgcagcactgggaaggcaagggttctgtgggccgtagctgcatccaggcttcctcagtgtygtcgtcctcttccctctcagccatcatcagtggggcttgggcagcctagaaggaacaactgsgtgctcttccagaacaggccaggctctatgagaccacgggcgcaggccctgctccttggccagcctgggagagggaaaacatgggggttattctctggtctcctctattcctcacattmtccaaagcctgcaggtgccaggctctgtgcaagcactggggatggagatggatcagccaaggagtgtgctgtctggtggggagcattaaccacttactatcattggttttagaaggacaatccctcgtgtgaagtgaatctttctttactagaggaaagggtttggcttcaggaaacctggttctactactcataagctctatgacttcaggaaggtttagcagggtgggacccccttgagcacaggagggtgtcttattccttttgtattctatcaccaagcatagcttggcrtayggaagaaaggacataacaatcagagctggtaaccaaggtttcctgatctgttcctgtgctctgagtgccagctgacactttatacagaaaagtctcattgaattttaaaagatattttttgttttgttttgttttgctgagatgaggtctcactctgttgcccaggctggagagcagtggcatgatcacagctcactgcagcctcaacctcctgggctcaagcaatcctcctgcctcagtctcccgagtagctgagactacaggtgtgcaccaccatacctggctaatttttttwacttacattttgtagagacagggtctcactatgttgccagtctggtctcgaactcctggcctcaagtgatcttctcatctcagtctcccaaagtgctgagattacaggcatgagccaccatgtctggccctaaaatgttttaaatgataaagtaaaatatatacctacaactcaattacaaaaaattaattaaaaatacaaaagaacacctgtgtaactactactcagtcaagtaaaaagaatcttgccagcattccagaagccacctgtgtcccttcctgataactgcacttccccaggtgataattatktcctttttcccctagttttgccacctttgtttgcaatcctaaccactacagttcagctttgcccagagtttcatacagcttctaaaatggtggcaaccagggttttaactctggcatgtctggtttcaaaacatatcgttcttcaatcacaggaaacagaagaaggttgtgatggtccaggtgagatgatatgaggactgagacctgcagcttcaggcagaatgagaagacaggggtcaatgagagaaatactgaagaggaaattaacagaacactgagactgactagatgtgagggagtgtggggggacagaggggtagaagggacatccaacccctcrgatctggcttgggttttgggtagacagaaggctcaagaagaagttgagttttaagggaaagaagaagagagtttggtttcaggtatgctgagtgcctgtggagcatccaagtacaaaatccagttgtgagttggattaaacaagtctagatatgagtctggagatggagggacagtgaagagagaaaaacaggtgcaggtgaaggcctgcctggcttcactccctcctgtgagcactccatgcacttggtccatccctgctcataaaagctgctcataaacacttttctttttcttttcttttyttttttttttttttttgagacagagtctcactctgttgcccaggttgccaggttggagtacagtagcatgatcttgactcactgcaacctctgcctcctgggctcaagtgattctcctgcttcagccacccaagtagctgggaaaacaggcgcccaacacaatgcccggctaggttttatattttgagtagagacaggtcctcctgtggggacctctgtgaagggcatctatgcatgttcacaatggctggcttgctgatgagtcagatgtgagtttgttttcctcttgctacctacgtctacatgtagcatatatgctaatccgacttcagtgaggctgtttgactggctagggttttctcactctcagttgttagggacaatctggcccctttcctaaatttaagaatctcctctgccttggctgggtgcggtggctcattcctgtaatcccagcactttgggaggccaaggtgggtggatcacgaggtcaggagatcaagaccatcctggctaacacggtgaaaccccgtctctgctaaaaatacaaaaacaaaaaaattagccgggcatggtggtgggcacccgtagtcccagctactcgggaggctgaggcaggagaatggcgtgaacccaggaggcggaggctgcagtgagctgagattgcgccactgcactccagcctgggtgacagagtgagactctgtaaaaaaaaaaaaaaaagggtggtatcttattctttctgtattctaccaccaagcacagccgggcatatggaaggttccctatgactgctcattcagtttacagatacaatctgggagctaggtgttgggaggcaacagaggtaaacaggtcattgttcctaccttcacagagcctcatagactacaaggtgttagatcaacccaattcatttttattgcatgctatggaccaggtatgcattatgagtgaatgaggtctggttccctctttatgctgatttcttttctttctttcttttttttttttttgagacaagagtctcgctctgttgcccaggctggagtgcagtggcgcaatctcagctcactgccagctctgcctcccgggttcacatcattctcttgcctcagcctcccgagtagctgggactacaggcgcccgccaccacgcccagctaattttttgtatttttagtagagacggggtttcactgtgttagccaggatggtctgatctcctgacctcgtgatccacctgcctcggcctcccaaagtgctgggattataggcgtgagccaccatgcccggccttttttttttttttttttttgagacagggtcttgctgtgttgcccaggttggagtgcagtggtaggatcacagctcactgcagactcgatctccgaggcccaagtgatcctcccatctcagcctcctgagtacctagatctataggtgcgtgccatcacgcctcgctaattttttttttattatttttagagaggaggtctcaccatgttgcccaggctgatctcaaactcctggcctcaagtggcccctcccacctaggtctcccaaagtgttgggattacaggtgtgaacgatgactgtaggacttctccacgttttaacagtcccactttctctgctattttggaaattagcagaaaagttggccacgtcagtcatgaattttaaagagttggttcatgcgtcctctgagctctatcttttcagttcaagaggcaccacctttaatccaggccttgacacatgttgcctcaggctggatgacttttyccaccccgcaggccttggttttaaaggtcacctcccttctgaggtcctccctgaaccttcccctactcattctctataaggcactctatttgtttctgttatacacgcattcactaaacatatttactrtgtgccaggcactgttctcagtgctggggatatagcagtgaagaaacagaaacccttgcactcactgagctcatatcttagggtgagaaacagttattaagcaagatcaggatggaaaacagatggtacggtagtgtgaaatgctaaagagaaaaataactacggaaaagggataggaagtgtgtgtatcgcagttgacttayttgttcgcgttgtttacctgcgttctgtctgcatctcccactaaactgtaagctctacatctcccatctgtcttatttaccaatgccaaccggggctcagcgcagcgcctgacacacagcaggcagctgacagacaggtgttgagcaaggagcaaaggcgcatcttcattgctctgtccttgcttctaggaggcgaattgggaaatccagagggaaaggaaaagcgaggaaagtggctcgcttttggcgctggggaagaggtgtacagtgagcagtcacgctcagagctggcttgggggacactctcacgctcaggagagggacagagcgacagaggcgctcgcagcagcgcgctgtacaggtgcaacagcttaggcatttctatccctatttttacagcgagggacactgggcctcagaaagggaagtgccttcccaagctccaactgctcataagcagtcaaccttgtctaagtccaggtctgaagtcctggagcgattctccacccaccacgaccactcacctactcgcctgcgcttcacctcacgtgaggattttccaggttcctcccagtctctgggtaggcggggagcgcttagcaggtatcacctataagaaaatgagaatgggttgggggccggtgcaagacaagaatatcctgactgtgattggttgaattggctgccattcccaaaacgagctttggcgcccggtctcattcgttcccagcaggccctgcgcgcggcaacatggcggggtccaggtggaggtcttgaggctatcagatcggtatggcattggcgtccgggcccgcaaggcgggcgctagctggctccgggcagctcggccttgggggcttcggggccccgagacgcggggcgtatgagtggggcgtgcgctccacgcggaagtcggagcctcctcccctggatagggtgtacgagatcyctggactggagcccatcacctttgcggggaagatgcacttcgtgccctggctggcgcggccgatctttccgccctgggaccgcggctacaaggacccaaggttctaccgctcgccccctcttcacgagcatccgctgtacaaagaccaggcctgctatatctttcaccaccgttgccgccttctcgagggtgaggccccaggacgggcggcaagggaccgtgttcctctaaccagcaccgaccccgaccctctgtggctttgggcaagacattgraactctgtgggtcttggtttcttcgtctgcgaaatggggccgtagtgattcccgtcttctgagggttgttagaattgagttgtaaggagctgggcctctgtgcaggagtaatagagagtttgcgtgtcagcatgaaaagagctgctttctaggcctagccctggctctctctctttgactttgggcaaatggctggccatcctgggcctctatttcctgggaagtgaatggttttgactggacagtccacattgacctttccaggtctgacattctggagattaactgtatattttaaaagtagttggagagagtttatagtggagacagcaggatgtttaatctccaggcctgtcacctcttaagcccatgactactcctctgtcactctcactagggacagatcaaaatgactttgccaaaaccagcctgtctatctagaacagtaccagaaattattttccagagtccatggagaagcttgtttatccctttctccattcttccatcttcctcaaatcaggatagggatggggcaggtcttgaaaacagaatggttgaggtaagtggaaacagtattttccaaggagtgattaggggggaaaaaaaaggcaaatctggcaagattgggggactaagccagagaataaatcctaggtttgagaaaacttaagtcaattggccagcctcttaagcttctcaattccattcctgaaagctgattttcaagcctttaaacacttccagtgtccttacaaggtagtgggaaggatctcacaagacttggcatccttgagtgaccctggtaacaataccaagtggatgaatgcattagcagtattttagacgttaagattacattcgtttgcctaggctgaaaatgtattgtgtatcctatgtttttgctgctcacagagaggttctgtaggctgtaataaaactctgcaggatacagggctagagaagccatttggggtaatggagagaggtgatgttctttagggtagacatactcagattctcctcctagccttgtcacttacaaagtatgtgagttggagcaaattccttagtctctgagtttcatttttcattttatgaaatcccatctaacttgcaggtaaagctcctggcacagggtagatggtgactttcagtaaatggcagctctaattatcacctatttttcatatgcaaatagaacataaagtcttaatattttatctattgtcaagtttaaggaacagtggcggtgtcagagctaaaacttagtttatctgactcccagtccagggctctttctgctgcaccacaaaatccagaagttacttttttttttttttttgagacagcatcttgctgtgttgcccaggccagagtacagtggcatgatcgtgcctcactgcagccttgaccaccaaagttcaagtgatctcccacctcagcttcctgagtagctgggaccacaggcgcatgccaccactcccggctagttttttaattatttgtgaagaggaggtctcaccatgttgcgcaggctggtctcaaaatctgggactcaagtgatcctcctgcctcggcctcccaaagtgctgggattataggtgtgagccactgcccctgcccaaaagttacatttctaaacatttatattcatattcctggtgtgatgtcttatggatcttaaagtgaaaagtcttattgtacttagtgcctttcatttgttaccacaagagaaattgcctgagggtgtctcccccaaagtatcttaagctcccttccatccgagacatggtctctttccttccttcctttctctctgtctctctctctctctttttttttctttcgacagaatcttgctctgacactcaggctggagtgcagtggcacaatctcactgcaacctctacctcccaggcctaatctrtccttccacctaagcctcctaagtagctgggattacaggcacatgctgtcatgcctggctaattttttgtatttcttttgtagagatggggttacaccacattggccaggctggtctcaaagcaatctacctacttcagcctcccagaktgctgaggttataggtatgagccactgtgtctggcccagacacaattttcaaatgaagatatgaccttgagtcagagaagtgttcttccagctgagatgggtggtctgccaaccaaggcagccagcagccttctgttaatttttgggcatgatcattgagaagaatatagtattgacttttcatttgaaaatagaggactggtgtgtttacttgatccagaacttagatacctaggtctatgcatgttcctcccttagagaagccaaatttggggaaagtgaagctagggaggtctttgcctggcaccacagcccatcccactgagagtagctaagtttctttaatgtttaragactatcaggctaaactgaatctattttagtttgcatatacaccatcttttatttatttatttattttagagacagggtctctgtcacccaggctgcagtgcaatggtgtgatcacagctcactgcagccttgacctcctgggctcaagtcatcctcccacctcctgagttactgggattataggcatgagccactgggcctggctacgtatacgccatcttttcttgcaaagtattttgggcagcttatttataacacaaccagattarattaaaaaacaggcgaggggatcagtacaaaggaaaaataaaacagataatacaacaaaaattcatgatgtgaggttctacttcatttacttttttttttttttttttttttttgaggtggagtcttgctctgttgccctaactggagtgcagtggcgtgatcttggcttactgtagcctctgcctcccaggttcaagtgattctcctgcctcagcctcccaggtagctgggacttcgggcaagcaccaccacacccagctaatttttttgtatttttagtagagacggggttttaccatgttggccaggctggtctcaaactcctgacctcaagtgatctgcccacctcagcctcccaaagtgctgggattacaggcatgagccaccatgcccggcctaaggttctgcattctaaagggaagccccaaacctggccctgagcttgctagcaatcaacaaatggtacatagctagggtcagctaactaggtcagctgcttgtttttataaatgaagttttattggaacaaaaccatgcacacttgttaattattgcctattgctgcttttgtgctctagcagagttgagtagttgtgagagagactgtgacccagaagctgaaaatatttactatttggccctttgagaaaatgtttgttgacctctggtatacagaaaaatattttcagttacacaatttaccatgtctataagacaaaacaagccaggcacagtggctaatgcctataatcccagcactttgggaggcctaggcaggcagattacttcaggtcaggagttcgagaccagcgtggacaacatggtgaaaccctgtctctactaaaaatacaaaaattagttgggtgctgtggtttatgcttgtaatccagctacttgagaagctgaggcaggagaatcgcttgaacctgggagagcggaggttgtggtgagccgagatcatgctgctcagtcatcatgtcgcccagtcagcctgggtgacagagcgagactttgtctcaaaaaaaaaaaaagacaaaacagttctgtatccaggaaaagcccaacctttctatactaaggccagagaggttcagctccttaaaatattcatgaaaatccgaaagttattcccagttatttccaaaggttcctttcccttgagaaggcagcatgggcttatgcctagacccacacctaataataatgaggtatatttggtagacatagactatatttggtagttagggctggggtgtgggttattagaaaggatcttaaatgaaaggttggcatccatcaatttagtaccatagcctagggtctatcccctgcttgcagcattcagccatattatctcagaggtcttagccactgtgtgaattcctctagtggcaggcgctcaccacctcagtcacctattaaccatcctgaagtaggtggtcattcctgaaggtgagttgaaatctgactttcttagcttctggtcttcacttttggttctatcccctcaggtgtcacagaacaaatccagtttctcacttgaggcagcctttttactaagatgctacctggcaggtgtaagcatctcttcctgaatctttttctttccttctttatttttgtggctaattacctcaaaggtgtaaagcaggccctctggctcaccaagaccaagttaatagaaggccttcccgagaaagtgcttagccttgttgatgatccaaggaaccacatagagaaccaagacgagtgcgttctgaatgtgatctctcacgcccgtctctggcagaccactgaggaaatccccaagagagagacctactggtaagttcccccaagtaaagaagatttcctactaatggatcttcgagtcgacctgttgctttaagtccccaaatgtctctttttgtcttcaagcccggtcatcgtggacaacctaatacagctgtgtaaatctcagattctcaagcatccttctctggccaggaggatctgtgtccaaaactccacgttttctgctacctggaaccgaggttggtcatcttgtacaccagaaagccttggtctgttttttttgcctttctactcttaaccccaccaccagctcccatccccctgcccccaaataccgatccttactcccatcattcgtggtctcgttttgtaggctcagacacaccctcagtatcattagccatagcccaaccatttttgtttttaatcactttctaagacgttaattcaaccattaacagtcagccatatctattgagtgcttaggatgtgcttgggaagtgcctaaatgttgaaggtaaggaaatttataataaagcacatgtagcctccgccctcacaatgctcatattctattgcaatagtcttcttacctcacttacacctctctcgtcttccaaatccattttcatcatggcctgctagagtgatctttctaaagtgcaagtctttatgtccctgccctgtttcagatccttcactgtctcctagtagtgtaaaccatttattgtgggttaccagccctcatgatttggtcgccacttagtctttctagtcttatctcctgctttactgccccccaccccatccctaaattagccactttcagctttttagcatcaagctttcayaccatgtgcctttgcacatgctgtgcattctgtctggaatactcttttttgtttgatttttatttttgtttatttatttatttatttattttatttatttatttttttgagacggagtctcgctctgtcacccaggctggagtgcagtggggcaatctcagctcactgcaagctccacctcccgggttcacgccattcttctgcctcagcctcccgagtagctgggactacaggcgcccgccaccacgcccagctaattttttgtatttttagtagagacaaggtttcaccatgttagccaggatggtctcgatctcctgacctcctgatccgcctgcctcggcctcccaaagtgctgggattacaggtgtgagccaccacgcccggcctgtttgtttattttttgagacagagtcttgctgtgtcgcccaggctggagtacagtggtgcaatctcagctcactgcaacctctgcctcccgggttcaagcaattcttgtgcctcagcctcctgagtaactggggttatgggcatatgccaccacacccagctaatttttgtatttttattggagatggggtttcaccatgttggccaggctggtctcgaactcctggcctcaagtgatctgcccatcttgacctcctaaagtgctgggattacagacatgagccactgttcccggcctagaatactcttttctgctttcttttcttttcttttttttttttttccagatggagttttgctcttgttgcctgggctggagtgcagtggcgtcagctcactgcaacctccgcatcctgggttcaagtgattctcctgtctcagcctctcaagtagctgggattacaggtacccgccaccatgcccagctaatttttgtgtgtgtgtgtgtgtgtatttttagtagagacggggtttcactattttggccgggctggtcttgaactcctgacctcaggcaatccacccgccttggccttccaaactgcgggaatacaggcgtgagccaccgtgcttggcccgctgctttcttcatttaaccaaattctccttatctgcaagacttcactcaagccccccttctctgtgaatccaggctggggtatcttttcctcctctgtgttctttatgcccattctgccatcatagcacagattacactgtattgtcagtatctactgtcggttctgtctaccccactcaactgaactcctaatggctgggaccatatcttactcacattgtccacagtgtctaacagttcatggtacacagtaggtgctgactgaagggatgtgtaaatgcatatacctactgttggtgtttcaggcagggatgttcagagaacacaggtgttctaactggtggaatcctggagcaggaaaaccagctacggaatgatctgggatttcaggacatctgcttggtcaggatttgtgtatagacttcctggcaatgagtcagctttgcagaggtaatgacaccactaaggaaattagtgaacctcattaatagaggagtacttggcccatcatcaagtattacctctaattaaactaccccatttggagctgtcactggaggagggatatggagggaattgaatcagaaaccacacaagagtggtctgtggggagaatggaaaacccaaggttaagagaggtccatgcacatttatttttcttgcagattatatgtgaggaaacaggaaatactttagaaaactattcttgaggtgtgacagatcagagtttatccacccccagatgtagtatccctttcttacctatccagtaagggaggccacatgctaattaatgacagtgctgttgaccaaaccaattcttagacatacaagaaaaccggccttgatccattaccatcacactgtggctatttctgaaaacccaagcaccttctgagaaagatttgcctccgtggatactcctcaggaggccattctcaaggtgtttttccaggcacattttgtctggtggtagcatgtgacctcctgtggggacctctgtgaagggcatctatgcatgttcacaatggctggcttgctgatgagtcagatgtgagtttgttttcctcttgtcacctacgtctgcatgtagcatatatgctaatccgacttcagtgaggctgtttgactggctagggttttctcactctcagttgttaaggacaatctggcccctttcctaagtttaagaatctcctctgccttggctgggtgtggtggctcattcctgtaatcctagcactttgggaggccaaggtgggtggatcatgaggtcaggagatcaagaccatcctggctatcacggtgaaacccggtctctactaaaaatacaaaaacaaaaaaattagccgggcatggtgatgggcacccatagtcccagctactcgggaggctgaggcgggagaatggcgtgaacccggaaggcggagcttgcagtgagctgagattgcgccactgcactccagcctgggcgacagagcaagactccgtctcaaaaaaaaaaaaaaaaaaaaagaatctcctctctaactctagtctcagtgctcctctctctctccatcacttcttccctgctgtatcctactctagtcacctggatttctctccttaaattctgccacggagttgcctgcacctgacttttgcacattattcctccttaactagagtgcttttccccctttctttgcctggcaagctcttacccagtggttttcaactagggacagtttttccctctggaggacatttggcagtgtgtggagacatctttgacatgatgtggatggggtgtggggagatgggatggggagggagttaaaatggcatctagtaagtagaagccaggatgctgctaaacatcccacagtacacaggacattccctccccccactccgccaaagagttatctgatccaaatgtgaatagtgctgcagttgagaatctctgctcttatccatccttccagatgtcattttaaggcattgcttctttcagggaacttcccattcccagagaagttcagttttccccacctgtacaatttttgaatatgtttcatccttttcactgtagcactcactacctggtgggctccttgagaggagagagtaactctcacacatctctggttccccaggttacagcaggtgctcaggaagatctggatggggcaggcttcgctccccagagaccatcagccctcagggtttactaggaagggaacacaggaagaagagtgcattggttcatcgcctcttagggatcccaggattaacatcctaactcaaagttttgtgttctgtgattaggctgatcaagaaatgctataaatgacttgaggcacatgggaggatgaaggctttagactttgcaggattgagaaagtctttaattttttttttttttttttttaagttttttgagacagtttcactctgtcacccaggctggagtgcagtgccgtcatctcagctcactgcaagctccgcctcccaggttcatgccattctcccgcctcagcctcccgagtagctgggactacaggtgccagccaccatgcccggctaattttttgtgtttttagtagagactgggtttcaccgcgttagccaggatggtcttgatatcctgacctcgtgatccacccgcctcagcctcccaaagtgctgggattacaggcgtgagcctaccatgcctggccaattttttgtattttttagtagagatggggctttgtcatgttgcccaggctgacctagaactcctggcttccaatgatccacctgccttggcctcccaaagtgctgggattataggcatgagctactgcgcctagctgcgaaagcctttagtaccaggttagagtaaccatttttctcccttttagagtctcttctccttcaagtccgtggttctggtggagcccgactgagcactaaggatcctctgcccaccatcgcctccagagaggagattgaagctactaagaatcatgttctagagaccttctaccccatatcacccatcatcgatcttcatgaatgcaatatttatgatgtgaaaaatgacacaggtaaggatcaatgtcttggacttttaggcagtgtggaggagaaggacatgctttttctggagggaaaggatatactaagaacttgctaggtgctaggcacctcgtgtgtattacctatctcctaggatccatgtggcagccccatgagacaagtactattatctccatttcataggcaaagaaactgcagctcagggaagttaagtgatttgctcaaagastaactttactttttaccttggagaagtaactctattacatcagagtggcttgagggacttttttttttcttcagcaaactgtatcattgggcgtttgaggggcttttcaccaaggctttttctttattcataggtcccatgaaaggcacccattttctgtttaccttgtaaactctggccaaccccctttaggaactgaggaagccccatagacattgaatggggccattaatccaaactccatcaagcaagggaccaccatgtactccgtcaggcaagacatcacaagggagtgagactaggctggcccccacttcctgccatccactgtgtcctcatgagctgtagcatcttcctcataaaccccttcattgtcatagccacaacctaggtcagtctttactgtccttacctagcctattgccacagcctcccagctggtctgtctgaccccacactattttctctctggtccatctagttcataattccagagtagcctttccccaacaccactttcatcccatctgtcttcatgcccacctccccgtggcctgttggtaaagttggaactcctttgcttatcgtgaaagggccttcacatctggtctctgccccatccccagcctcatctttgcctcctcccctgcctgccctgtttcttgtgactgtgctaaattcatcatgccctctctcacctccatgccttgtcacttcctctccttctgctgaagctcttggccattcttcccttttggtcttcagcttgctaacttgtcatctttcacagttcatcttaggaatgactttctctcagaaatgctttgggatcttccagtctcatcagggtccttccggctgtcctcccacagcccctgacttacctcacatcttgacatgtccctccatacagatatggtcagttttcctgtctgtctcccctctaaactgtgagctcctcaaaggcagtggcaggctctgcttggcctccattcctggtacctgtcttacagcttggcacagagtgagttctagatatttacctgtgccgaatacctgagcaggctgaaggaccaaacatgcaggagagccatgcctcctctaggcttttcagagcctacattattttcctagcctcttttttttttctttccctragacagggtctctcagtctgtcactcaggctggagtgaagtagcacaattgttgctcactgcagccttgacctcccaggctcaagcaatcctcctacctcagcctcctgagtagccgggaccacaggcatgtgctaccacacctggctaatttttgtattctttttagagatagggtcttattatgttttctaggctggtctaaaactcctgggcccargcgatctgcttgcctcagcctcccaaagtgctgggattaccggcatgagccaccatgcccagccttcccgacgtctttctttcttcttttcacctatattcagtgatccagatcacttattctagaagttcccagcctaccaagagttactcgtagccatgcgggagaagagaatcatgacttgacaaggtcatggctgaaaagaacaagtactaaactttgattctcagcaccagtgttgtgtgggtcagttgtgaatgatgaggcaagtcatttgtcactaatattaaagtaktaaattttgcaaatgacttgctttcttttgaataattaccacagatttcaagttctccttctcctaacatcactgtcatctgtgtgccagaatgagagagaaaggtgtggagttagaactagcttgcaggcagcacctataacaggttggcaggcattttctgtgragagtcaaaacagtaaatattttaggtgttacaggccacatatggtctctgtcacagctacccaatagtcatacgtaaatgagtgaatgtggttgtgctccagagaaaatgttatttacaaaaataggtagcaggccagatttggccagcaagctgaagtttgccagcccccgagctatagtgatagtatccacctttgttgagtctctctgtagcacctgtccctgggctaaggcgaggtgactttcctgaggctttgtggcaggctgatgaatcctttccacccctccacataattgtgtctcttgcaggattccaggaaggctatccttacccctatccccataccctgtacttactggacaaagccaatttacgaccacaccgccttcaaccagatcagctgcgggccaagatgatcctgtttgcttttggcagtgccstggctcaggcccggctcctctatggggtatgtaggtggagaagaccactgagttgctttacgtgrtgttggtctcctcccttaaggttactgctcagaggaagaaaagggatataggggaactgatttcttgactgaggagttttagggaggagtacttcagcccaccctgtggagatgagccaacatcactagggggtgactgcctgtgcttcacctaagtagctcacttgrtcacagtagcccacatgtttttactgaagtccccactttctaagctatgccatagaattacagggaggccatgcagcttatcagcattacacagcactaagtggtggagataggactgcagctaggtctgccccactctgaagtcttcagttgtttgtgctgcagcatgctgcctctgttcttgtagtggcagaagtggagcacaggcaggaggaagtggagcaatagagatggccaagccctgcctgccaactcaggatgggtgctggggacccaagatactcgttggtgttatcccctgatcctaagaggaggtttcagggacctagatggtatagaatacaaactaacttgtcacagagagctgtcccaagatggggaaagcctgrctctgggagcaaaggcctccagggaggggagggctatatgggagccctcaagcaggcctgggacaccagatccctggtttggggtgtgttggggggtagttcatgagagccactgctggacccccaggtcttggttagagcctgagtcttttctagaggaggaatgaggaaaagtactgtttcccatcttatttggcctagggggagttggagagccatggttagccaaatggatagggagtggaatgggccttgcccagattgagcacctgctgcataccacacatttatttagggtttttattaaaaaaaaaaatcagtggttcgttcgtaaaatatagtcttggattagcagcagaagcatcatctgggaacttgttgaaaaggcataytctcagacctaccccagacctgctgaatcagaaaccctggggttggggcccagcgatcagcgttttaacaagccccccagttatgctgctacaagctcgagtttaaaaaccactgaactggccgggtgcggtggctcacgcctgtaatcccagcactttgggaagccgaggtaggaggatcacttgaggccaggagttygagaccagcctggccaacatggcaaaaccccatctctactaaaaacacaaagattagctgggtgtgatggtgcatacctgtaatcccagcactttgggaggccaaggtgggaggattacttgaggccaggagttcgagaccagcctggccaacatggcgaaaccccatctctactaaaaatacaaagattagctgggtgtggtggcatgcacgtgtaatcccagctactcgggaggcwgaggcatgaatgttgctttaacccaggaggcggaggctgcagtgagctgaaagattgcaccactacactccagcctgggtgacagagtgagactgtgcctcaaaggaaaaaaaagaaaaaagaaaaggcaaccactgaactgaaatttcagaacayggcattatttaatccttgtagttttttaaccccatgtggcagatgctattagcttcattttatagatggtgaaactgaggctcagggaggctaaggaacttgcccaaggatacacagctaagaaattagtagctgtcagatctttatgtgaccttgtgtctttccaatcctaggacaattgtctttattcccattctctgactatatacttcctgaaggctccgaaagattaggtaacttgtccaagatcccacagctaatgagtggggaagcaaagcttggaacatgatctctccagttttgaaggatgtgctactcccaactcaggcaggagaaggaggcagagatagtcacaaccctggtcccaggcctgcagactcgctgtagcctctgtgccagctattgccatcagagtctgggtagcaacgatacaactaattaccacccagttgggtaggagtggaggcctccttcagcccctccaggcacaaattattcctggggatgtgaagttgagcaattatgggaagagcctccatgtaaaaggtaaaattgctgagaaatttatgtactacctgcagttttattgatctgtagagggagataagagtcaatacagaattctcggctaacacttacaggtacttttctttttatttatttttcatgcagctaagaacaggtatttctaaggccaacagccccagtgtggcccacactgaggtctgacattaggtattcctaatgccagattcagccccagtggggtgaacacaggcagcatttttgaatcaaggatggcctgcttcatggggcctgcctgttggatctttgttcagtgagtagcagtcaccaaactggattgctgcaaagtctcagcaggtcaccatatgatttatctcccaaactgggacaccattgagaataatgaggtgccgctattagatacactgggacaccaggattaaaccagaacaacagggctttcagtgacttaatagcatggagtctgatccccatgggtgacctggagcaaattataccacctctctgaacctcagtttccttatctgttagtgggaatatacctctagatttatgagagtagaggtgacctgatgtaaaactggcaagatgcctggcacctgagaggccttcagtaaatgattttaggtgttactactattaccaagtggcagtaactagaagagatcagtagcaggagttgactggtgaaatcctggcgctggcatggctggagtggatactccagaaacatggcccgtgctgagttgcagcgtcagcatgaagcccagtgaatgtgactgccaggcccttagaagcaaggcaggggcgtgggggaagggtgtggtctggcatgagcctgtttgggttctacaccacccatcttcgtgacttccggcaagtcactttacctcactgagtctcagtttcctcatctgtcaaatggggtgagaactgaatgagattatatctatccgttgaccctccggattcacatttgatagctgatgtcactgtggtccttatcaagtaacgccaggagtttgagggatttctgtcattaaccccccagctggcctgcctgaactctggcttgcctggaaatcgcctctcagtggcaggaactattactttgatgtgctcaaatagaagagcaggcaccstggggccatgaggcacagccagcctgggtgaaggaaggcccggccctggacagtgccctgaactcctcattctattttaattgtcccaaagagaagccattcagtggacgtaggtggacgttgtaaagggaagaactagaagctgcctgggccgtgctgttccttacrctccacagcttctgatttgttttccttgtccccttttcctctcagaatgatgccaaggtcttggagcagcccgtggtggtgcagagcgtgggcacggatggacgtgtcttccatttcctagtgtttcaactgaataccacagacctggactstaacgarggtgtcaagaatttggcctgggtggactcagaccagctcctctatcagcatttttggtgtctcccagtgatcaaaaagagagtggttgtggtaagttgagccatctcctgcctgacccaggagggccatgcctcctcctacctggtgtgagcctcaggtgggattgctggggtgctctgtgaggagagccctggccctggggacttcccacccgggatctctgcctggaggactccttcagtcccgcccctacctaaggccctgcccagtgctccactccagctcctgcttccctttgcaccctccagccaatccagctcctcgcagctcccagggtgctctgcggcttcattagctctggcctttgtaggtgctgctccttttgtctgggaggcttcttgccttctcccctccccattactgtttgtcaggctatcctccacttgtccttccaggtttagcataagtgtttcttattttgggaaacttctgaccaccaccgtccccatcccaaccctcacttaagtgcctcaggtgggctgccctggcctccgtattcccscatcagagcacgatcacattgctgtgcgtagaacctcttcacatgttttttttcctccaccaaacagaactccaagctcctagatcctygagggcagggtctggggatgcattcattttgtttcatcccacagatacggagttcctcctgcggcaccattgtgctgcaccccactgctcagctgacggggtccaggcctgctctctgtgtagtgggcagtagcagtatctaaataaattcctgatagagcatcaggcagtaatatgcaccctggagagacctacagcagggtcaggactgcgaaagcggagtaggggtactgcctgctctgggaccaaccaggccccacacaggcctgagtgtgggcttgctaaatggagtcgctgagcctttgaacattctcagcaggtccgttcttgaactggttctccagcagctctcagtgctgtttccacctgaaatgcctgctgggtctgtgccctttgctttggccccagacaccctcagttcacctgcatagtcacaccagscacctccgtgctctctgctcttagtcaggttttccctcctgactctgtgtcttcaggttctcttccctcagcctctcccttccaggatactgactcagggctgggcctgttgtggtttggagacagcttctcctcacctctgcagcctcatctcctgccgctccacccctcagcattcgccctgggctccagcccgatcttgcccttcctgccttcatttctacttcttctattgcatgtgctgggctttctgaagtctccttccttttctttttctttctgccccattctgctcacccttccatgtataaatgtcggcaagtcagtcatttcttcctgctttcttctttttcctacttctgcagtggggtctgtctcctttcattttcactatttgatcagctgacggtaagctccttgaggacaggaaccagagtcaagttactgctgtgtctgtttccagcacaggatataggcgcagcagaaagcaagcaggtgcccaataaatgtgtgtggaatgggtgagggatgattgtccctgggattagagagggcagcagcccatttcaaccatcattcctggtggtggaagtgagagggcctcgggagcagagcagcgtcaacagttgttttggctgaagggggctgggaatgcttcctgtcctcccaggctacagcccctcaatgccccttcttagtccragagagagacgatgtcagaaaaagaaagttactgtccaggcactgaagatttacttcaatccaatctttgttttaattgctgccgttaaacctagtagcaggatcctaatgaaccgtgttctttccaggaacctgttggsccagttggtttcaagccagagacattcagaaagtttttagctctatatttgcatggtgctgcgtgagcrgaggacccctctgaatcctgaaacccctcttgcctctcttccacggaagagggcctgggcccygtggagcctcagtgcccgtttggcctgctgctctcgctgacaataaagagcccttgcgttgcactgaagcctgtgtttggtatgagggtgccatcgggaagggcgcccacacaagtccaagccctggagcctgacctgccccagctgaagcccagctctgcccttgacccatgttgtgatcttagataaggatcttcatctgtctctttccatttcttcatctgaaacctggggctaatgtgacttacctggcgttgaagactctgggttatgtgtgtgtagtgtctgccacatggcagatacgctgatggtcactaggttcttatggcattatttaaattgtggacacattccacaatgactgcagaaaatctcgctagcatatttattgtagatttctccctcgtatcctggttaatggggcaagtacacccctggttcagctggtctctgtccaaataatgtcaagtcctgatctgtgccagacactgctgccatgccaagcacctgatacatagcatatttaatctgcacacaccccttacaaggtaaatgtcatttccatattcaagaaaaatattgcatgcctagcatgtgccatgcactgttctgggccctaagaagaaaacacggataatttaaggaatttgcccacggtcacccacctggtgctataggtcagcttcccgaggaaacacttagagacttttatttggggagaacctttaggacaggaacctgtggagagcgaaggcagcagcaggtgggggtggcgggcccaagctcagtgtggctgcctctgaggcctcacccagttcatgggcactctggagccagaggcaagggagttgagccttctacaaacacccctggcctggcaccagccattggatatgtgctgcttcctgacagcgggtgggaccttgggcgaggtggctttgttggtctgtaattcctgctgagggactgctgagagcagttagtgtgggaacttccagcagctggaggagctctcagctaggcagtggcaaagtggcgtccagcctgtgtctctgcctcccaggcttgggctctttccacttgaaagcttactttttaggcttgagggattagcaggaaaagcagcaaggcacagaggaccatggggacaggaagtgactggaagtggggaggccggaggcttggctggggctggagtggccagctagggaggggcctgaacaccaagcacctcacctcctagggcagctgacctggggctccgggtactctgagccctgctgcccattttactttttattttacagacaggaaacaattatacataaatgataaaagttcagagttcagggaaagataagtcgacccacccaaggtgatccctagctagtccttttctctaaggttaacagagcttcaagtttcttccatgctgttggtgaaaatgtgtatgtatcataacaacacacatatatacatgactgaagagtcatcctatttacagcctgttctgcacttcctttttcacctgatgtctctggattgtaggctcttgccacatcaccacataggatctcttcgttcttttgagcagccacattagtatctgttgatggcagtccgggttgtttccagttgttattagaaataatgctgcagtgagcaccctcgttcatgtatcttagagtagttttgccagcagagccattgggtaagttcctagcagtggaattgctgagtcaaacgtttttttttttaaacaacactctgttgggagtacagaggaggagctggtgggatggcggtagggagtccagctggaggccactgcggggatcctggggcaagtggtggtgatggcttggcgtgatcctgagcaggctgaagcccctggagactgcttggagaggagggagggtgaggtgaacttgagccctgagcgagtgggacggaggctctgagtaagcggaccatcagcagatgaccttgtagcttgaggactgcctggaagggggccagggttgccgggcaggcctgggcagcctgtcctcccaacccaccctgaatgagggcagctcggatgctggccttagtgctaagttgtggagcctggaacccaactacacttttgtgtcaagggagctgcaaagtacagctgatctgcaaagtggggcaggcaggactggcggttttttttattgtccccatggagatgaggaaacaggcttagagaccacatgatgcagtgtgaagagctgggaagctcgtgtgtcatgacagctgccccctccacagacaggtccttgcttctccaaatcccaaatgtctaccagcttcgtcctcactccctcattcaacgcaggagaggaagtgatgcagcggaacctgagggcctcagccagcctcccgcccagtacaggctccccagccagtgagctggtgaaggagcaggagcacgctgcagggagagtgctgtgccgggtcatgctggatagcgaaaccccacgagaggaacttccagcagcagacttttggaaatgaaatggtgacattcccattgtgaacgtatttctcactgtctcatatatttaaattcctggttgttccattcaaaagttcttcagttcatttccagcaagcttcagtggcaagggaattctaatttggcctgggggaaagccacttttcccctcctgtattccagctgccctgtcagatcctccacttcctcgctggcaaaatggggatacagcacctcccttccaagtttccccacctttggatcaaataggctccattcgccaaggtttcaagtcgatgggtttggagttcttttagaagccaggtggaaaggtggacttgctggaggggacctcactttaggctgctctctgttctctcccaaagctggctcaggctggacctggggcaagtgtttggcagaggctctgtgacaacccacaggagcaggacaggatcctctcgggctttagacagcatctccctggttcctcttttgctgtgggtgaaagtctcagaaagcatgcaggtgacccgattgtcttgactctctctttaacatggacactcagatgtccatgacccataaggcctacctgcttcactgctggaagacccccgatccagggaccctctcccctcagaatacatctcctcatatccaaaaactgcatccaggggggcgtgctgcccagggcaggacctccatcccttagaggccagcttgtcagagcaacatggcccctgccatgttcactctcacacacgtgcacaggcatacatgcgcgcacacatgcatacaggcacatcacactcccacacatgcagtcacactcccacccacacaccacacactcagacatgtgcacacacacacacacgtgtacacgagacccatggatctcctcctccccagctaggccaatgatggaacccaagaataggtccagactggagattgagccctgaggtccctcaccgtagacctcctttgggggcagcccatttaataagctcctactgtgtaccaggtgttgtgctgggagcgagttacagaatgagggagacatggtccccgccctctgggagctcctggggtactgggtggacacggccagagtggtctcctttggattggcagtagcaggtacccacaaaggccacctccttccccacacctgggcgcctacccacccacaggtgacagcttgccatagggaggggtgccactgagcacattctggggctactcaacaacatccagttattccaagagcactcatcgagcacctactgggcaccaggacctgtgctggcaattctcaggacgaagagggctcttacatggtccctggcttagaggagctcccagcctgatgggggaagcatacactgaaccaggctgtggggacccagggagagagctaccccagcctggaaggcttccaggaggaggggccatctgagctaggttctgaagggcaagtgggaaggaggaggggccagcaggaacaaaggccctgggggggcagacatccacagagtactgcaaagttggaggtgaagtgctgaggggcaaggaaaagcaggagtgtccatggcccttccatgccctgcagctatctggaagctgtgaggagcgtggacttggtcccagagtcacggtgggcgtggccacctgggttccccactagcaagaagccctctcctctctgcaccccttttcttctcgtggtcaccagggcatctcactttcctggtcttctactcactgctctgtcgcctttgtgggtccctcctattccccagatctcagggcccagtccttcggcctcttctccattcattccctagatgatttcagccagtctggtggctttaaagaccctctaaatggcaacaactcccatggtatgtctgtagttcagacctgcctacttgatgtctttactggatatcaaatcagcatctcaaatttaactcgccagaacagagctcttcctgcagcctgcctcacctccacaaacggcatctctgtccttccgtgtctgttcactactgtacccctagtgccagaacaacccctggcataaaaggggtgctcagcaaacacgagtggatggatggaaagaaggaagtctatggaggctcaaagtgagatggtctttgtggcactggagggctgacatgggaggcaggaaaccaagggcatggctgaattccagaaaccagatgccaggttctgcggctccgcaggcaccctgggaatagagagaacagaacctctgcctttcagcacccaccctcgttggtctgatcttttacatccaacccccagccccaactccaagcccccagtgcttgtacccagtgagcccagggctgggcagagcagcgctcatccgcctgtaaccccaccctgcccagccactctgctcaagtccaggggagccccatggcctgaaccccaagaggcccagctcccctcagttcagggtcagagccctctgagggaccccaggtatgttctgggctcaatctcctggagtctgtggaatctgggaacacagcccaccacttcatgggacagccgagactggggcgggggattcctcaggtcaccagggagccagactgagcagccttcttacccccgctagagccctgctctggcctagcgcgttagtggctatgctgctgctggtgtcagcgacttgccttaagtttctttcctggctctggggcagggggcagtggggatgcccagcagggaggcaggtgtggggtcctgtctcaggcctggtcctacctctggccccccaggccggccgacccctagaatcaagtgcctgtggacagcgatgactccagcaggaaagctgtggtctggcccccgactccggcacctctcagtgatgggccgaagccctattttgtggaaggactggcatgatgctcccttttctcctcctcatttcagtatctttccactggctcatgtagagctctggcctggccccaggcagtgatgaaaatgcttagtgaacaagaaccagttctttgctcagagatctgcccctgaggaaggccaaactaacctgcaccagggccatttgtgttgtgaaggcaactgccaggctgccgaggggccccaggctgaggggtagcacagcacacagcaggcgctcttcccaggctgggccccgtgacctgccttcctccagctaggcaccctgatcccatggctctcgtctgtgcctgactcctgctccaaggagcacaggtatcggatggatatcccatccacccaacctcctttccccagccctgggtcagcaccattgatcaggttagtcgcagcctcagtctcttcatctctccaatggagatgcttttccaatagttcaaaggtgtctgtactcagcaaaagcctaggaaaccttgttccaaggtcaagagggaaggaccagatggaatctcctagatcctcccagctactccccaacacacccatttggactctccccacgagtaacatcacttgtagc

SEQ ID NO: 98004 - DNA, 50136 bp, Homo sapiens
  misc_feature (1)...(50136): n = A,T,C or G
tgtcagcaaaggcaaagacaagggaaagtacaagagatgtacaaggcccaacagtttgtccgaaagaaatgagtgtggcggggagctcagaggtagaattgagaagaaaagctggagcctgaccagggaggacctggaatccaaggctgagcctgggcttcatcctaaatgcagaggggagctgctgaaagtggttgagctggtatgtactcagagaagagcaatctggcagccattcacaagctgggctggctgagtgggcaagtcggggagaaggaagttctggcaggaagagaagctgggaggacaaaaaagagaaaactggaacggtcaagaactcaagtcgacgaaactggttttcctggactggggagtggatggagttagagagagaaaactgagactttttttaatttgtgacagcgtctcactctgttgcccaggctggaatgcagtggcacaatcttgactcactgcaatctccgccaccggggttcaagagattcttctgcctcagcctcccgagtagctgggattacaggtgcacaccaccacgcctggctaatttttgtatttttagtagagacggggtttcatcatgttggccaggatggtctcgaactcctgacctcgtgatctgccagcctcaatctcccaaagtgccgggattacaggcgtgaaccatcacgcccagccgagagctctttaacaagtatttactgagcagctaccatgtgccaccatcaggcatgggtgtaatagtgggtgagagcaatggtctcgacctgcattgagtttgcagactagtgagggaagcagacatgaatcctagccagccgtacataattacaaaccgcgacaggtgtaataaagaaaagtttaggatgttaagcaggcagatgagagagggtagcctagtatgggagagttgggcttggcttctcgaaagaagcgtcattgagcaacagtctgaagattgaacaagagttaaccaggcagagaggtgggcaaagagcagcccaggcagatcagcctgtacagtaagagcagtgttccaggggctgaaatgccagactggatggtttgtgatttgagtgcctgggaaggtggtgatgttacttagagaaacaatccacaagaagttctagtttcaggaagcaggaagaggacaagaaggtccaaaaggagcagcaaaagtagtaggagaattcaggactttccaacccatctcttcatccccctctaccactgctatttcaagcacccctcaagtgtgtggcagcctcctgaccttgcataaactcccaaatgttgcacctctgtcctgagaggcggaccaccgggcagtttggggccagaccccctagctcagtcgtgtcctctagtcgctgccaacggaccttcaagacgaaccagaaatactgggtgctgaaaaaggttggtatccagttgtcgtggctgaaatgggggttcctggtcatacccgtcttctcgcccatggccaggatgttccgcttgactctgtctggaaacaatatcagaagcactttacccacgaccacatgcacagccacctccaagagcacccagagcctcttcagccacagccctggctggggcagccccatctcggcaaagccagagtaagctctgagttctatgggcagagaggctgcagccaggcaacactgggcggagctgaatgaaggtgcagggtaggagcagccaaccccgggtcaggggaaggagtcaggtcagaagatgtttgcctttctgtcatgagatagaaaattcctaaccaggtgcacaaaggtctgttttaatcattatcatttccaattctttgcctgagcttttgagagattcttggattggtagattccacatcttaaattctccctctgattaattttttaaaaaacaagtacttaaaaagaccacacttaaagagaacctgttagatgctctctcacaagtcagtagatttggctattagttattctttatacacaaactcttcttttactaatgaaagatgtttttcccaacaaagatctttgttttcccaacaaacatccatggttttttgttgttgttgctggagatggagtctcgctctgtcgcccaggctggagtgcagtggcacgatcttggctcactgcaacctctgcctcccaggttcaagcagttatcctgcctcaacctcctgagtagctgggattacaggcgcctgccaccacgcctggctaatttttgtatttttagtagagacagggtttcaccgtgttggtcaggctggtcttgaactcctgacctcagatgacccacccgccttggcctccaaaagtgctgggattacaggctcgagccaccgcacccggcccccaatcatggcttctagctggtggttgactatttctgtagtcagagccctccccaggggatatggatctcaaacctcccagggcagagacagaactgggaccatttctaacaaaacctggggcctgcaactccccttagcactgggcatagagtgacaaataaaacaccctcttctctcaaggaagtcatggtctagtgcggggaatagacaagtaaacaaaaaactaccatttcctaaatgaagtccagaggcggagggtgtgcgtgggctacgagagcagggagaaggggaagctaattctggttagagaagtcaagaggacttcactgaggaagtgatttctatgctgaaaccagaaagacggcaagcagtcagctggctaaagtggggatagtgtcctggtggaaggaaccacatggccaaaggcccagaagccagagacagcatggctcattggagaaactgaaagaagaatcatagagctcagagttgggaagtgttttaaaatacacccaagacctttttttttttaaataattgagacggggtttccttcctctgtcaccaggctggagggcagtggtgtgatcatagctcactgcagcctcaaactcctgggctcaagccatcctctcacctcagccagagtagttaggactacaggagtgccacccaaacccggcaaattttgtgactgttatagcttctccttatgttgcccaggctggtcttgaactcttgacctcaaacaatcctccttccttgatctctcaaaatgctgggattatgggaatgagccaccatgcccagcccccaacttcttaaagtaatcagggctgattttccccaccatgtgtcactctttatttatttatttttgagacagagcctcgctctgttgtccaggctggagtgtagtggcacaatctcggctcactgcaacctccgcctcccaggttcaagcaattctcctgcctcagcctcccaagtagctgggattacaggcgtgtgccaccatgcccagctaatttttgtgttttcagtagagatgggttttgccatgttggccaggttggtctcgaattcctgacctcaggtgatccgcccaccttggcctccgaaagtgctgggattacaggcatgagccaccgcgcccagccggcactcttttctttacctgctggtgcagtggtatgagaagccaaaaatgcctaagtggtagttacagcttccaattcagtggaactgtaactggaatggaagtgttctctctccgccttccctgcttccctgggaccaggatctccaaccaagcagaacttaaacttgtgacgcaggaggcacacattctatgtgtgtaggtttcactgaaagtgatagtaagaagtgctaccccttggtttgcaaatctataggtatttagaacaaagtaccattataaataattgataaaccattggtttagtacatgtactacatgccggaggacaatgccccagtctcctgagtattttccccaacctggagccctaactgtgcctttaacaagccattccaccatcctattaggccacctactattggatgactgagtcacatggtaagaccagtgggtaagacccatggttatgtgtcactgttgcatgttctttacaattaaattggtcccttagtccaaagcaatgttgtgcaggtaatcattgcaggatccgtaagcaagaggactttgctttcctttaacaagggggaaaggactacttctgccacagccacctttcccttgaaagattcaagggaaactggaaacgagggatggtcaagtctcaggctttcctacccaaatatcctcatcccagttctcaggttcccattcattttctgacaatgccccagctttgatggaggagacctacagaggctgtgcattcagtcttcgttgaaactttgccacccttacaattagatcttgggcctgattttcagtccagtctttctcaaggctatagaagaataagaatcttcaaagctgccatagaggctctctagctttcacaaagtgcctcaagttgacagttggctgttctaagtctgtcattttattttcaaggtttccaatggagttaagaacacccagtccattccatagtccttataattaccattgtcctcttaatgttcctgtgccacagccactagataactcagcaccttatcttctacctgcacgttatcccaatcaactgcagacagacaccttagtaattgtgatgccattctattctaagtgttatcacaccaccaccacccccctccttctctctccccttaacaccagcaatatatttgttgttgccatgtgactggtgcgcagttcagttagaaaatgccaacctaaggttttattttctggggccacttttggtaccaacatgccttcatattgcttcctcatatgagtagtttattggcaagtatgaatccaagcaccaggagtgaagtacagggcttgtatatcagggaaggaaggagacccattgcgaagatgcattgtcaaatgcgtcacttccaaaggcatttggttgcttaatcctgctaggtagtttgaaagctatatgaaagggcgcctgagggggaaaaacaggaaaagcatatattcatcaagtgttgaccccattggtcagagatttgcctcatgagacattaacaactctctacccctacacttctgggatgcacctgtctgggtgctgattggctccagcaaggtcccatggccccaacgcatcaagaaacaagcctcgaagcagaaagtgagaagcctgaggcatagactggaggcaagctcactcaggttatatctgctgacgctggaataagatgagtggcggtgaaataagcagcaggtgaggccaagatgatctgaaatgggacataagaggtggctgatatactagcacagctgaattcatgaactgagattcattcctggtacatactcaaccaaaagtgccctgcacatgttctaagcctcagctttctctttgtaaaatgaggataatcaccccaagatagcaggattgttctgagaattagagatcctgcatgtacaaagcctgatcatgataatcttggggaaaaaaatacactatatatggctattattagatgtaaagtctttccaagtgctcacttactgggggtgctcatacgaacagacatcgcgctttcgatcactcattcagaatgtaattgactcatcatgtactttctcaccagtgaaatttttgtggccaaaagaaactgagggactggtgacgcgggtgacttaattttttctttcacaatcgtctttcatcacccgattttatatttccttaggaaaagaggtataaacacacagtaagaaaaccctaaactcgagaattttctacgttccctggagcaaggccagcccaagtagtcacactcagcgaccccaccactccgccctcgcctgtctctttaagaactcgaggctcagcctcgggagaagggcgggcgggagcgggctctgcgcgccgcagcacgcaggtgtctctgggagctgctgtctctttaaggaggcggggctcttcccggaggaggcggagaggttccgccccccggatctccggcttccggcaactgggctggaccgaaaccggcgcggagcaactgaggcccgagccttctcgggacccgggggacgcctaaccccgcgaggtgaggctgccgagtttgcgggacctgtacgaggctaagggggttcaggatctcctgcccgcccgggccgccgcggcccagctcctctccctgaaacactgcctctgcttcgcggtgtcccgggctgcagggtcgccgacaccccattgcctactaattgcctgactccgctctaggytccttacacgcactcccatttaatgacccccgcactgtgtgactaggtatcgttatgcacccattttacagatgaggaaactgaggccgcgaggagcgcgcacacagcagagaagcagcagaatcgggaatcaaacccagctctgtctgaccccagagcctgtgccyttaaccactggctaggctgaactgcctttgttcttcactgtccccatcacctctttcaaacctcagcctctccttcctcatcgttacatctctaggctgcacctgstctctaaacattcacacagtgagttgagattcattcctggtacatacacaaccaaataaggttgaattggaacctttggatccccggggttagtttctttgttacagttttaatatttaataatacctgatgcttagtggwtatctttatataaacctattaaaccccactgaaaagggaggcaagggaaagtgataccatttctaatacataagagttgtttgcagatactttatactgtcatcctattatgtttacctatttttttcttwtagamccctgcaaattttcttcctcataattgggagaagactcactggccgaatggcagcagtagatgacttgcaatttgaaggtataccagttgggtgcccacctttatatttatgatcactgttgctacagtcacagcaagtattttcattcctatactgcctcacacattgaaggatattatttcaaacatcttggtggctgttggccacatccaggtgtttcctgtttgtccacaccagctgtttttgtttttgttttttttgccagataacccttcagattggtaacgagtatcataaatttagtacagtgattacagaaaatgcttacacagttcctgctttagttcagaaaacatttattgagcacttactttgtgcttagaaccgtacaagatactggagacaaaaagatgaagaagtttatccactggtggagtagataaaaatgtaaaaagatcattaggatgaaatgtgatcagatcattccctcaytgaatcagtaaatatctcctggttgtgaccaggaaccgggcaattgttctagttatcagggatagaagagtgaacaaaatagtttccttgtgaagctctcagtctagtgagggggacatgtatttattaaatgatcatttaaatatatacctacaaactatgaaagtgctggaggaaaagttcaaggagatattaggactcataacccagagcctgacttaggctagggattgatgaacacttgtttgtttgtttgtttgtttcttttgatggagtctcactctgttgcccaggctggagtgccttggctcgatcttggcttgctgcaacctctgcctcccaggttcagacgattctcctgcctcagccttctgagtagstggaactacaggtgcccgtcaccacacccgactaatttttgtatttttagtagatacggggcttcaccatattggccaggctggtctcgaacttctgaccttgtgatccacccatcttggccttccaaagtgctgggattacaggcatgaaccaccaggcctggcccacttacttgttttattaacaccttacctaacatttactatatgtcaggcactgttctaaatgctgtacagataatccttatgtcaactttatgaaatagttactttattcccctgttttattaatgaggagactgaggcacagaaaaataatttgcctaatggtcacacagttagtaagggataaaatcaggatttgaacccatccagtctggtatcacagcttatgctgtctctgttatctaaggaagagatacactgtttaaagataaatctatttcatttgcaagtactagaaatccacctcaatttgcaaatactgtcaacctcgtcttcaaaattcatctagcatctgaccacctccaccactactctcaccatgctcaaggtcactgtcaccttttttctgaattatagcctttaccttccttctggtctttctgcttcctcccttatccctctacagtctgtactttgcagccagagtagtcctkctaaaactcaagcagatcatgtcattctttcagaaccttccagtagctcccatctcactagaagaaaaagccaggctgggcgcagtggctcacacctgtaatcccagcactttgggaggccgaggagggcagatcacctgaggtcaggagttcgagaccagtctggccaacatggtgaaaccctgtctccactaaaaatacaaaaattagctgggcatggtggtgcacgcctgtaatcccagctactctggaggctgaggcaggagaattgctcaaacccagaggttgcagtgaaccgagatcgcaccactgtgctccagcctgggcgacagagcgagactccatctcaaacataaacaaacaaacacaaaaacgaaaaagccagagcccttactgtggcttaggaggcccctatatgatgcagcctccaaccctctgatttcatctgctgctctcgtcctttctgtctctgcccaagccgcatgggctgtcacggttcttcctatgcaccaagtacattcacagcttgggatgtttgtgccatctttctgtgtgggacattctcccttcagatagccttatggcttgcttctttgctctgttcaaatctctcctcattagagagaccctcctcagccatcctatctaggagtgcagtgcaagaaagtttaaagacagtggccctcgcaaaagcccctgtggagtgaggaagtttaatttttttcctaaaggattgggagaacacttgtgttccagatcacggatggtggggaaagctgacacaaggtgaggcttaggaggaggcaggtgacaaatcacccagggctttatcaactgtgttaaggacttgggtctttagaaaagcacacaggatgctgggggtggggtggcggggggtgggtcatgaaaggcttctccggggaggaacagtagtattggatgaaaaagtagaggtcagaagccttcaggtgaaaggcattgtttcaggaaaggagcagaggctgaaactagcttaggatatgccaggatgtaaaagcagagaatgttggtggcagaaataagacacataccagttttatgctcaaggagctgagatggacaagaatmaccagcacagagcagactgtgtgaagagtcgtcatgttaggggtacacgcagcccacactccagtcaaactatgccgtcactgtccctccatcacgggcacactttccatcttctgggtcttgctcatccccttccctttgcatgagatgccatccccagcacctctggccatccttctcatatggtatcttctccaagaaacctttcctgatcccaataactagaggagttatcgccctccttggggcctttttgacctttgtgcttctaaagtggtactgtctgttcctccttctggcattccttccccctggtaaactactgctttttaaaaattttttaattttcatgggtatgtagtaggtatatatacttacagggtacactcatatattttgatacaggcatgtaatgtgtagtaattgcatcagggtaaacagggtgtccatcacttcaagcatttatcctttgtattacaaacaatccaattatactctttttctctctttttttttttttttttgagaccgagtctcgctctgtcacccaggctggagtgcagtgacatgatctcagatcattgcatccttcacctcccatttcaagcgattcttgtgcctcaccctcctgagtagctgggattacacgtgtccaccaacatgcctagctaatttttatgtttttagtagagatgggtttttaccatgttggccagcctggtctcgaactcctgacctcaagtgatctgctcgcctcagcctcccaaagtgctgggattacaggcgtgagccactgcatccagcccagttatactttacttttctttctttttttgtgagacagagtctcactctgttgccaggctggagtgcagtggtgcratctcggctcactgcaacctctgcctcctgggttcaagcgattctcctgcctcagcgtcccaagtagctgggaccaccagtttgtgtgtgccaccacgcccagcttcagttatacttttctagttattttaactactgctttttaactgtgagagttaagtatatcttccttggtctaattccctccagcaaagttgtgactatctttttaaatgtcattgccctgtacaatcaataagaggtacctgtaatgatagttattatttcatcatcctcaaaatctctttgtggggtaggtattatctatgttttataattgaagaaacagagactcagagccatggagtaatttgctcaaggtcatggagctactgagtattaagagtcttaccttgaacaaaggaccatctcactccagaacctcatgttgcttaaactacccaaacattgccaattgaggcttcagtaattgttgcatattagctacctgattaatttcagtcactttagtgttctccataaaactgctcatatagttgagaggcaataagagtgaactcagctgtcctactgctaggactggtgccctgcttgtagtgttataatggtgccctgctggcactcttcctttggccttcgaaggttcagagctgccctgaattttattcaagagcagctgaaataaagtatgttaggatattcggagacaggaagtctcaatcactgctggtggacacaagtaggtaaggttcttttggaaagcagtttggtaacatggttcaggatccttgaaaatggtttgcaccctgttgacctagtgatcacactgataggtgttcatcwtaaggctgccccccaaaaagctttttctacamagacactccttttgtatttgtaagaaaaccttcattgatggaatattatgcagtcacataagtgatcattttaagagactgttatatgaaaaatcrtttttgtgtataatccccaattttacataatcttgacaaagcaggatgcaaaattaattatagtatcatgttctagatcagtacttggcacattgtgggcatgcagtaaatatttgttgaataaatgaatgatcatcagtggcatgaatctcactatgtgaagaaaaggaaatatactaaaatgttaatagtgtttgcctttatgtggtagaactaagagtgtttttttgttttttgggtttttttttttttttttttgagacaaagtcttactctcttgcccaggctggagtacagtggtatgatcacggctcactgcagcctctacctctgaggctcgagcagtcctcttgccttggcctcccaaagtgctggaattatagacatgagccaccatgcctggcctaagagtggtttttatcctgtgatttctactttcttttttcctttttttttgagacatagtctcactctgtcacacaggctggagtgcagtggtgtgatctcggctcactgcaacctttgcctcctgggttcaagtgattctcctgtctcagcctccagcrtaactgggattacaaggcatgtgccactacacccggctaatttttgtatttttagtagagacagcatttcaccatgttggccaggctggtcgaactcctgacctcaggtgatccgcctgccttggcctcccaaagtgctgggattacaggcgtgagtcactgtgcgcagctgatcccactttcatttttgttcccatattttctgtagtgattatgtagacttactggaaaaawtaaccttcattaaaattttttggacttgaatcaaagaagtaaagtttaggacttagattatattccttgttctcccaaaattatttaaaataaatgttattctccccatgatacagatgaaaacactgaggtttagaggggtttagttacttactcaggcttgtgtatttagtaagtggctagctgagccagaaccaaaatctaggtctgactccaaattctgttgtcttcatagtcatttttctatatcagattgatctcctgatgagattttttgtttttcaaagcttttgccctttgtatcaggtagggtctatagcaaagctgaggttgtgacagcttgtctttaaattcaaagtatagcatttctagtgtgggtaaggtttctgaggcccktgtgctctaattgatttcagaatttggcaatgcagccacttctctgacagcaaacccagatgccaccacagtaaacattgaggatcctggtgaaaccccaaaacatcagccaggatccccaagaggctcaggaagagaagaagatgatgagttactgggaaatgatgactctgacaaaactgaggtttgaacttgtctttgagatattttttaaacaatttttaaagcttgtttatgtgcttattcactgtctrctgtgtgccaggtacagtgtcaggcaatgacagctcagaggtaaatgacacatggcctcttccttggtgggggaaacaggcaaacagaccattactttccgtaagtacacttgtggaggggaacactggggtagtgagcagagatcctagcttatggaatgtgggactcccatgctcaatattttctaatattagagtaggaaagaaccttcatggccctctgttttagcctctctcctgagatattgatgcgtccttgctatgtaggaaagataacacttggagccaggcgtggtggctcacgcatataatcccagcattttgggaggctgaggcgggcagatcacttgagcccaggagttcgagaccagcctgggcaacatggtgaaactccacctctacaaaaagtacaaaatattagccgagtatggtggtggacacctgtagccccagctactcgggaaactaaggtgggaggattgcttgagcttgggragtagaggttgcagtgagctgagattgcaccactacactccagcctcggcaacagagtgagaccctgtctccagaagaaagraaaaaaaaaaaaggaaagattgaaaacacttgcttgagtacctccaggaatgggctgtttaccaccatgtaaggcagttgctgccactgtcgactttaattgtgaaaatgtttttctttaatgttttttcttcgacttttattttaacttcaggggtcatgtgcaggaggtacaggtttgttacataggtaaacatgtgccacagtggtttgctgcacagatcaccccatcacctaggtattaagcccagcatccattagctcttcttcctgatgctccccctcccatgtgtccatgtgttctcaccattcagctcccacttataagtgagaagatgtggtgtttggttttctgttcctgtgttagtttgctaaggataatggcttccaactccatccatgtccctgcaaaggacatgatctcattcctttttctggctgcgtagtattccatggttgtatatataccatattttctttatccagtctatcattgatgggcatttaggttgattccgtatctttgctattgtgaatagtgctgcagtgaacatatatgtgcatgtatctttataatagaatgatttatatttctctgggtatatacccagtaatgggattgctgggtcaaatagtatttctgcctctaggtctttgaggaatcgccacactgtcttccacaatggttgaactaatttacactcccaccaamagtgtaaaagcattcctttttctccgcaacttcactagcatctgttgtttcttgactttttaataatcaccattctgactggcatgatatggtgtctcattgtggttttgatttgcatttctcaaatcaagatattgagctttctttcatatgttttttggccacatgtatgtcttttgagaagtgtctgttcatgtcccttgcccactttttaatggagttgttttttccttgtaaatttgcttaagtactttgtagactctggatattagacatttgttagatggatagattgcaaaaattttctctcattctgtaggttgtctgttcactctgaagatagtttcttttgctgtgcagaagctctttagtttaattagatyccatttgtcaatttttgcttttgttgcaattgcttttggtgttttcatcatgaaatctttgcccatgcctatgtcctgattggtattccctagattttctttctttttctttttttttttttttttttgagatggagtcttgctttgtcgcctaggctggaggctcattgcaacctccgcctcctgggttcaagcgattctcctgcctcagcctcccaagcagctgggactacaggcacgtgccaccatgcccaactaatttttgtatttttagtagagacggggtttcaccatattggccaggctggtctcgaactccttacctcatgatccacccatcttggcctcccaaagtgctgggattacaggcatgagccaccgcgcccagctggtattccctagattctcttctagggtttttttagttttgtgttttacatttaagtctttaatccaccttgagttaatttttgcttatggtataaggaaggggtccagtttcagttttctgcatatggctagccagttctcccagcactatttattgaatagggaatcctttccccattgcttgtttttgtcaggtttttcgaagatcagatggttgtagacgtgcattcttatttctgagttctctgttctgtttcattggtctatgtgtctgttcttgtaccagtaccatgctgttttggttactgtagacttgtagtttagtttgaagtcaggtagcatgatgcctccagctttgttctttttgcttaggattgtcttgactatttgggctctcttttgattccatatgaattttaaaatagtttttttctaattccgtgaagaatgtcaatggtagtttactgggagtggcattgaatctataaattactttgggcagtatgccatttgcacaatattgattcttcctaactatgagcatggaatgtttttccatttgtttgtgtcctctcttatttctttgagcagtagtttatagttttctttgaagaggtcctttacttcccttgttcctaggtattttattctttttgtagcagttcattcatacaaaagaatgagagttcattcataatttggccctctgcttgcctgttgtcggtgtataggaatactaacaatttttgcacattgattttgtatcctgagactttgctgaagttgcttaccagcttaagaagcttttgggctgagatgatggggttttttagrtatagaaacatgtcatcttgcaaacaaagatgatttgacttactctcttcctatttgaataccctcttcctatttgaataccctttatttgtttctcttccctgattgccctggccagaacttctaatactattgaataggagtgataagagagggcatccatgtcttgtgctggttttcaaggggaatgctttccttggttggggatgggtgttcctttgtctccrtgctrctcctgggtgagccatcgccccaccctgcttttcttcattctccgtgggtcgagctacttgcctagtcagtcccaatgcaagaacctgggtatttcagttgaaggtgctgaattcattcaccgctttcactcctctctgtgagtgctgcagaccacagctacttctaatcggccatccgttttcctttataatgaacaaaaaatatctgcctatagcacctgcccttgtcctgcaaagcagctcagtgttcaccgtactttttgctgtatgaattcccttcggatatctgaagatgacaggcacaattcctggcattgggcatgcattctgccaccaaagagctgtgttgttgggatgggtatggccctcctcaggtgcctcttctcaataggattttttttttgtcagagtagtaatatttttagtactttagagtgagtcaatatatcagatttttgagaattcaggtggcaatagtagggaggattgtggatggatgggggaggaagagatatttacactgctggatgcagtggctcacgcttgtaatccccgtgctttgggaggctgaggcgggagtatcacttgagcccaagagtttgagaccagcctgggcaaaataatgagactctgtctctacaaaaattaaacaattagctgggcatagtggtgtacgcgtgtagtcccagctgcttgggaagctgaggtgggaagattgtttgagcccaggagttcaaggctgcagtgagctatgattgcactactgcactccagcttgggaaagagagtgagacgccatctcaaaaaaaaaaagcgaaaagatatttacactgactgccttctgtatgtgttgtatgtgtgtatatgtatttattattgtacataattctatatactrttgaatctagataagggaactaagcccagcaggagtctagtgatttgccaaagctcccctcagtggagggrccaggatttgaacccttttggtgtgacttcaaaaccaatgcttgtttttctaatcaggctgagagttgcgaattggctatttcagagttggttattgaatgtggaagagcctattgtttcaaacgttttgcttttccattagatcagatccctcctgcaccccacgcagctggaattaagaaattgcttatgtgttcattatgttttattttatttctgacagttacttgctggacagaagaaaagctcccccttctggacatttgaatactaccaaacattctttgatgtggacacctaccaggtttggaaaccaatttcacctttccttttacgkgtaaaggagacttgtttctttaatggttgaacaaccaaataatgtgaaagcctttatatactgaaaatggtcttacaaaagtaaagggttattagcatttgaaaatactatcataaaagctctaatgactgagtttcaattttgtagtagttgaatttattaaacttaaaaaacttcagtagaattactgctatgatgttttccaggtctttgacagaattaaaggatctcttttgccaatacccgggaaaaactttgtgaggttatatatccgcagcaatccagatctctatggtatgtttagtactgatttgtttaccgtatttcagttgaacttgggtgagtgtgagggttgcctggaaatgtggagaactgcactattggtggggcatgccatgtattattagacttttctgaacttcagtagcaacccttgcaagtaattttggaggaatacaattatgtgttatattagtgccacgtcatcattacaagtactagtatatccttcaaaggtctttaaatggggctgagcgcagtggctcatgcctataatcccagcamtttggaaggctaagatgggaggattgccagaggctaggagtttgagaccagtctgggcaacatagcaagaccctgtctctactaaaggctgggttggcacagtggctgccgcctgtaatcccaacactttgggaggccaaggcaggaggattgcttgagcccaaggagtttgagaccagcctgggcaacataaggagaccctatctctactaaaaaataaaaataaaaagaatgatttttaaaaattcttcaaatractttacaacttgagacaaatttagtcactttgactaggtggagattggaccatttgatgttggaggagaaggtattctcacactttttcattgatatgctgagttccagctctgccctcagatgagctggctccttttaggatttggtcaccagcagtggaagtctraaacaggattgggccggggattgttgtcatccctgaccttaatgctgtctgagaaaaactcagaggtccacccagtactcctgaggaaaaggccccaacagtggcctgtgtttgaggggagaagagagtgctgtccgtgtgccaggtgctgtaccaaagactgtgtgtgtacttgatcatatctcattcttgcaacaacccttgcaaagtatccccacttttcaaatgaggaagctgatgctcagtgaggatcattgatatatatgctcaatcagaaatgataaatagtaaagcagtcatatatgttgattttaaayatggactctagggagcctggtgtgaaaaccattgcactggcccatgcttttcatctgagggttgtcagggtggtttctctgtctcattcattcttacttgtagcctgagaacatcctgaggggcaggctctgtgcctcartgtctttagtgcctggcagaggccttggcacacagcaggtgctcaaacaatttttagcaccttattttatgctagactctgtgctagaggctgaggatttaaagataaggccatggtccctagccccaatgaggaagaagagagaacactaacatctgttgaataccttataagtgccaagcgtggagataagcactattttagtattttatgctattttatttcccatactccaaggtagccttatcttacaaaagagaaaactgagattaaggagataacttgcccgtagttacagagttagcaataataatggcaaacacacatataatgcttattatgtgccagacactattattagggcagtacctgtattaactcatttaatccttatgccagatccaacttcatgagggagatactattattatccccattttatagatgaggacactgagtcacacagaggtccagtaacttgcctgagattatacagctagtaagtgctgggctcaattttcaaatcaacactgtagctcataatccatttcttcatcactatgctatactgcctctcatgacaaagccagggcttgaatccaaggcttgcttcttttctgtgacactagtagcctcattagctcatagacgtggttaaaagaagaaggtacaatataggtgaagtgtttgatagcagagaggattaggttttgttgtgggtggaggttagaggaaggcagttaagaaaaagatgacaatttacagagtgtaaggaaaagattgataactttgactacatttcacctaaaatttaaaatttctacacaacaaaataaaccataagtaaagtaaaaaaataaaccacagaccaggggacatacttccaatgyatataaccaacaaacagtgagaaacaagaatatatgtcgaactcccacaaattagaagaataaaccaagcaactctggggaaaaaattgccaataaatatatgaaaagatgcttagccccacctgcaaccagagaaataaaaagtaaaataagattatttatgctcattattttagtaaacatayacagtttggcttgtcttcatttattcattcaattcattcaacaaacattgagctcttgctattgtactggagatacagcagtgaaaacataaaaatctctacccttaggcaatttktaatttactgagcttaacaataagcaaagaaaagtaaaatatatagttttctagtaatgaatgcttaggtgaaaatttaatagcagagagaagaaggacatgaagtgtttgtataaatgggtgaatttgaaaatttaaaaaggtgaattttgagtaatgacctgaagtaattgggagtgatttatgtagatatctaagggaagagcacttgaaacagaaggatcagcaagtgcaaaggccctgaggcaagagctagcctagtacattcaaagaacckcaagaggctattgcgactggatgagagtgaacagggggacctagaaggagatgaggtgagagagacagtgtggagggacaggtaaggtctcataagtcacagtgaggactttggcatttgcttgaatgcaaagccattggagagtttggacagacgagtaacatacttttttgttttttgagactgggtcttgctctgttgcccaggctggagtgcagtggctcgataatggctcactgcagcctcaaaatcctgggctcaagccatcctcccccacctcatcttcatgagtatctgggactacaggcatgtgccaccatgcctggataatgtttgtattttttgtagagacagggtctcactatgttgtccaggctggcctcaaactcctggcctcaagcaatcctcctgccttaccctcccaaagtgctgaccttacaggcatgagccactgccccaagccaggagtgacatactctaagtcagatttcatgaacattgatattaagtgtggccaaggatatggagcagtggaaacttttgtatggtaggtatgtaactggtgggtatgtaactggtacacaaattggagcagtttgaagatgcttataccctataattcagcagtttcactcctaggtagataattttagaggaattcacatatatatggaacaacatatagaagaatattatycactgtagcagtattgcttgtaatagcaaatatttagaaacaaccaagatatccatcagcaggagaatggatacattgtgctactatatttatacatggaattctgtagttaaaaaaatgaatgagagctaaaagcataaatatagataaatcttagcacaatgattttaaaaagcatgttgtggaaggatatgaatagtatgataccattaaaaatatatatatatatttttgagacagagtctcactctgtcacccaggctggagtgcaaaggcgcaatctcggctcactgcaacccctgagtcctgggttcaagtgattctcctgcctcagccttcccgagtagctgggactacaggcatgtgccaccaygccagctaatttttgtatttttagtagagacggagttttaccatgttggccaggctggtctcaaactcctaacctcaaatggtctgcctgcctcagcctcccaaagtgctgggattataggtgtgaaccaccatgcccggcctaaaaatattttttaaaagtgacatgctaggtaaccagtgtttgtgttattcttcgtgcttttctgtatgttagaaatatttcataatataaaaatgcataatatgaaattttaattataaatacaacctaaattaaggctctctcccacccccaacccataataagagtaggaatttggcaggaaacggagaaggcagtatgaagcaacatggcaggtcctgggatgagtgggtgtcgtaagtctctggagtccagccttccactgggggtagctggagaagttacagagcccagatcctggggccttttatatcagcctcaggaattaggattttgtccttaagcagtggaggttcagtgaagggttgcaaacgggggagagggatgataataggagagggacaaaaatgctaagggctgggaaagttttcttgcttgtgtccaaggatgagcattgggccacatagaggtagtgggtgggcaggtgttggacctttcaggccacctgaaaatattgtttctccagctgttcccgtgccagagttgttaggtagcttagagcatggggcagctagagaatgctagataagtcttcacattagtatacatatcttcccataccagcctgcctttaaaaaagttaattaatattttagtgaaagggtttcatcatgttgcccaggctggtcttgaactcctgagctcaagtgatctgcctgcctcagcctcccaaagtgctgggattataggtgtgagccaccgcattcccccccgcccccactttttttttttttgagatgaggtcttgctgtgttgccaaggctggagtgcggtagctattcagaggcatgatcatagctccctgctgcctcaaactcctagcctcaagtgaccctctcacctcagtgtcctgagtagctgggactacaggcttaagccaccaggcccaattcacaggcttcctgttgccctcaagataaattcctaactcaacagggcttctaagacccttcatgatctgactctggcccatctcttcaatctctggctactcctgacctgaagcttggcctcgaactggtacctcttacttcagtctctgctcctgctattccctcttcacggacctctcttctcttctgtcctcacttggtgaactcctgttcttctttagatcccagcttacacatccctttctctaggttttccaccttccctatatgctcccataggcaccctgtactaccttctgagattagatattttattgatcgtctccccggagtgcatgggtgcactagaggcagtgactgtgtctctgttgcccatcatcgtgtccccagcagagggtagtgggtacttagtaaataatgactgagaggacataatattcttggttttctagttatttgggtattgtaagttaatattttggccacttgtggtcatacccttggatggtctcagctcatctataacacatggtcagatttattcattcagtaaagctttttggctataggggctttgtggggttttttgtttgttgttggttttttttgccactcttatgtgtggtcactcagaataatactgtgagatttagtccttgtctacagcagaaagctttcagtctagtgagtaaagaggcagtttgtggagagctaatattggtgactttttgaagcatacccatttgattgcttgtgttccttttcccaccttcaggggccagtgcttgcctttgaaaagtactaatctgtttctgctagtcatctcacctatgacagtaatgttcgtaattttgtgacgtgtcaaggtacctgaaattatcccaaagggtgttgcaaaatattagtgaaattgaaaaatgaaattcatacaatttattaaaatctctcaatctaaagatagtatttgttctacatagtactttttctagatggggagagacaaggatagtgttcacgaaatcatgcaaataatgaaagaggtttgtaaagcatggtccactcatctgctcagtggtatatcttaaaaccattgaaaaagaacaagctgatttttatgagtagctgtgatagactcaccaggctatattaaggtgaaaatagaagggtacacaggaggacatatatgtatgttatcatctgtataaaatatgcacatatacacatgcatttgcttatatacatgagtggaatattcctagcaggtttcatcagaaactgcttactttggtgagctttagggaggaaagatagagagctggggcacagagagggagtggatcttgctgttctccatattccctttgtaccttttgaaacactggaccatatacatatattactttttttaatttttaattttaatttttgtgggtagacagtaggtgtatatagtgcattgtattactttttcattaaaaaaaaaaagaaaaagccttaagcacacacacacacacacacacacactgacactcaacacaaccgtggtgaactggtaggtttaatcgactctgccctcatgtgttctgtttgccctgctctttctgtatgctgcacaagctctgtctgatttaacttctttctctgtgatgctaacatttggcacttagataagcgaagtaatctttacttcatgtattctggtggaaggtttaataaaaagcctgtgaatttttctttgtcggtggtgatcctccaacaaaagaagctatacagaaatcagtgtcttcattcacctaattgtggaaggcgttttggyctttggattggagtaccaacaccccaccttctttaaggcagctaattactgagatgtgtgtttgacctttgaaaaaaaaatttcccttcagcaagtgttgatcccatctagaaaattcattttcttttgctaacatgaatacaagaggaagataagaaattctgtaagaatctaaaggcttatgcttcattttcttgtttctgaattttctggtttcctttgcaggccccttttggatatgtgccacgttggtctttgccatagcaattagtgggaatctttccaacttcttgatccatctgggagagaagacgtaccattatgtgcccgaattccgaaaaggttggtgaatagcttgactcatttggaatgctgtcagtttctagctttgagttctttttacccactgagctcctgggccccatctctagatgctgcagccctgcttttgtgttttagggttcaatgtatctactcaaatgtgtagatgagtttaccacccatctatataaatccacataatctttttcttcttacagtggtaaaatatatattacataaaatttaccatttaaatgtgtaattcaatggcattaagtacattcacaatgttatgagtccacataatctttgggaaagctgtaaatcaaggccgaatagcaactgcagtttattccttttttttttttttttttttttttgagacagtgactcgctctgtcacccaggctggagtgcagtggtacgatcacagctcactgcagcctccacctccctgggctcaagtaatcctcccacctcagcctcctgagtagctgggaccataggcatgcaacaccatacctggctaatttttctatttttttatagagataggtctccctgtgttgcccaggctgatctcaaactcttgggctcaagtgattctcccatcttggcctcccgaggtgctaggtaggattacaggtgtgagccatcacacctggccacagctggaatatattctaagacaagtgtacaaaataatttaaaggtgtgtgtgaaggtctcctgtgtggcattatttgtattatccacattttggagacaatagaaacattgttttaggctgtgatggctcaactagctggggtcatctgcaattgccagtcacaaagcacctagagctatgtggaaaattcataacttattccaaactggtgcctattctgttagcaactttgctgaagagaaatctgggctggacatggttgctcatgcctgtcatcccagcactttgggaggccaaggtgggaggattgcttgagctgaggagtttgagatcagcctgggcaacatagtgagaccttgtctctaaaactaaaaactaaaaaaaagttaccgggtatggtggtgcatgcctgtagtcccagctactcaggaggctgagttgggaggatgacttgagcccagagattgaggctgtagtgagctgtgatcgtaccactgcactccagcctgggtgacagagcgagtcactgtctcaaaaaaaaaaaaaaaaaaaaaaaaaaaragagacccggtgcggtggctcaagcctgtaatcccagcactttgggaggccaaggtgggtggatcacaaggtcaggagttcgagaccagtctgaccaacatggtgaaacccgtctctactaaaaataaaaaattatccaggcatggtggcgcatgcctgtaatcaggaggctgaggcaggagaattggttgaacycaggaggcggaggttgcagtgagccgagatcacgctactgcactctagcctgggcaacagagagagactctgtctcaaaaaaaaaaaaaaaaaagcggggagaaagaagtctgcaaatgatcaaagcctggaagggaaaatgcagaaatgaatgtgtcctagggatgggcttgtgaatgacattcttgttttaaaacgtcctttcttatgtcagtattgggtatttagaagaaaaaacaaaacagcttttagagacttgcagatgacagctgcccccaaatgaggaagtttggctttgtcggagattggcctgtaccactttctcagttccctcgctctctccctgcctgctctgctgtcgagaggctgtaagtagcctggataagagcaccagttctggaactagactgctagcttcagttccagctccaccactcactagcttctactctgttgggcaagctattttatgtctgagcctcagattcttcattggtgaaatggaaataataatatttatcttacaggactattgtaagaataaagagttaatatatataaaaagcttagaatagtggtttgtaccaaaaagagttcaataaacattaactattactatacacacacacacacacaaaaatatgtgcacatatattcaatcccattatttatccagtaaccttggtttgagtttaatgcaataaatgttaaccatgagatagaaaccctgccttcagctagttcactgtgtgtacatagaaagatatgtatttgcctgtgtgtgtgtgtgtgtgtgtgtgtgwgwgagagagagagagagagagagagagagagaatgtatccatgtatccttccttcttttcttcccctctaccttccatgcccactttcccttcttgtccatcatggagtcagacttggattcaatcccaactctatcaaataaccttgatttgagtttaattcagtaaatattaaccatgagatatagatcctgccttcaagtagttcagtggttagaaagctagtaaatgactattgctgtaaacagtacatattaacctctatatcagagataagtgtaggtatattgacatagaagaaggagtgaaccactttgcctggggatctggaaactcaggagagtctttacctgttcttatcctctttggctgggcatcccagtatcaggaagtgatgtgatatatatactggtaaagtagtcattggccctatcaataaacatttttccgttttatgtaaaaagtatgagtcacatctgagatgagatcctgcttctactaacttgttaattatgtgacctwgaccaaacaacttagcttctctgaccccttttcctcatctctaaaatgacaatatagattgtatgaaataaatgtagctacatattagttaacaatataaaaactaattcttgattgagcatttattattgatcagtcgctcttctacatagaacagttcttacctgcttttattcatttaattctcctattaatcttagaaggtagtatattatttttcttcccattttatagatgaggaaactgagacaggaaggttaagtaacttacccccaagagtttcttttcctagarctagaacccatggagtctgtatacagagtctgtgcccttgaccattattccacattgcctctcaataaagcaccgagtgtaatacctgatgcccagtagttgatcaataagtgacagctatagccatgggagtaatttcctcctcttcccttagttatccaagaaaaaggcagtacatcagcagaattacatttggcctaacgaggcaattcccagtgtgaaaaaactgttctgggagctaaaacatgttttggacattcatgtcttaaccagagtctgactataattgttaggggtgtctttgttcttgccaagatgcattaagtgaattacctactgattttcatgtagaaagggctggtgccatggcttacctataactttatgacctccactccagaagagggaaagggaatcctccagggcrtgctgctactagaggaagaggagagaggtacaggaatatgctgaacgttgctgttctgaggagccactcaatagcatttttgccacagtggcggaattatttatttaaggaagaaagtawaactggagaatatttcaagcagttaatcagtgagctgcatctcccaatttcagagacagaggaactctagagagcatgcagagcaagttaatctctacccaaggcattttaatacatttgctaaagaagtcagtgtcagccgggcgtggtggctcacgcctgtaatcccagcactttgggaggcggaggcgggcggatcacgaggtcaggaccatcctggctaacacggtgaaaccccgtctctactaaaaatacaaaaaattagccggrtgtggtggcgggcgcctgtagtcccagctactcgggaggctgaggcaggagaatggcgtgaacccgggaggcggagcttgcagtgagcctagatcgcgccactgcactccagcctgggcgacagagcaagactctgtctcaaaaaaaaaaaaaaaaaaaaaaaggaagtcagtgtcagctcttgttataccgaggaagagaacatgttcttccaaggggatagttggtttttatttgattgaaatatctactatatatgaacatttgcagtgtggccctctgaagtatttcagttgcatagttcagttgtttaataatattagttgttagttattaaatgacctataaaaaccatatgagagactattgatcctcaccacaaagacgaatggtaaagattcattaattcaacaaacatttctaaagtgcctactgtgtgttaggtactgtaccaagctcagggattacagaccagtaagacatgattccgtggtccactgaagtcaattgacatgttagcatttaagtacaataaggtgttggaagtgctctgatagtctactaaaggcatgatggagattgaaacttgtgtcctgtcatcctcagtgtccatagcagctaccatcatctatgcctatgcctggctggttcctcttgcactctggggtttcctcatgtggagaaacagcaaagttatgaacatcgtctcctattcatttctggagattgtgtgtgtctatggatattccctcttcatttatatccccaccgcagtaagtaccatacttagggagtagattctgagtgatgctctgttcttggtagaaacttcaaccaagaatttgacctaccatcattatttccagcgcaatactcatgttcttctgaaaaaatctcctttgaagttagaagttaagcatgaaaggggtctggggagcctagtgccttcattggatcttgggccctttgttataaaagcatatgcctcagtctacatgctggtggtgttcctccagcctgtactgaaaaaccagagtggcaatgggggcccagctgctgattggctcaggggcctttgtaaacatatgtgcctggaatgaacaaatgcctcccaagaactccccgctcctccttttctcttctttcagatactgtggattatcccccagaaagctgttcgttggattctagtcatgattgccctgggcatctcaggatctctcttggcaatgacattttggccagctgttcgtgaggataaccgacgcgttgcattggccacaattgtgacaattgtgttgctccatatgctgctttctgtgggctgcttggtatgggttcagtcgtatattcttttggtgtgttttatatccaaatgctaaaagacctcaaactgttagacacaacagttcttttaaaattgagtccatgggctgggcacgttggctcacacccataatcccaatactttgggaggcccaagtgggcsgatctcgagctcgggagctcaagaccagcctgggcaacatggtgaaaccctgtctctactaaaaatacaaaaattagctgggcatcgtggcttaaacgatcctcccacctcagcatcgcaagtagctggtacttgggaggctgaggtgagaggatcgcttgagcccaggaggtggaggttgcaatgagctgagatcataccactgtactccggcctgggtgaccgagggagaccctgtctcaaaagaaaaaaaaattgattctatgaaataaaatttcattttaagtagactcacctacatgggaagtggtgaaattatgagaatttggctttagtctttggttttgcctaatttcagtaatctgatgagaatttggggtctgaccagaggaaataggtgtggatgagtgtctgtatacatttgttccttggtatgggggttgtgggggtgtggttggttccaggaccctctatggataccaaagcatggatgctcaagttctctatataaaaatggtgtacagacatcctcctatgtgctttacatcatttccagattactcataatacctagtgcaatgtaaatgctatgtaaatagttattatactgtattttaaaatgtgtattatttttattgtcatattggtgtttttaacttacatatttttaaagaatatttttcatcgtggttggttgagcctgagcatgctgagcctgtggatgtggagggctgactatatagagttagggagctggggtgggggattctgtttttggatgtctttgctgattttctgcacatacctagaaagatttttgaaatttaaagttttatttaaaggtagaaagtttaaagtttaaaggtaggaattaaaagttttaaatttgaaggtagaaagcttgaaaatgaagtcagatatgggaaagtggagttacttttaaggtgaacaacatttaaagtagtgtttgagttcatatgtaggtgtctttttagggagagagcatgtgcttttgagtcagataagcccagattgaagaccggctctgtcactcattggctgtgtgaacttggagatgttattgttcctctctgaatcttaatttcttaatctgtgacatgggtatatttcctgccacaagattgttctgagaggcaaataaaatgatatctataaagcacttaacatggaacttgtcctgtaaatgcccataaattaggtccctttcctttgatcctaaggagacatggttttgtgtcttctgtacactgtgcacaaaatttgctgcccacggccttaacaagccctgttgcaggttttgaaaaaaaaatcagagtccaagaatgttaaggtccctaataaaggaaaggacatggccatgggaaggtgtcttagtccacatggcaggtttccagacccttggtcaggttttgcaattttaggagtaaatgtttctttggcatcatttgatctttaacatttttgtgtagataaccatgtctcattaaatgcattaatctgattagaatttcattagattaatgaaatcccaatgccttatcattaaacaagtttcataaaaagtgccaagttgtgaaacacaaacctagtttacatgcactttacatgtgcgtaagctttaagccctcaaggcgggcctgttggtttgactcatggcagaatgacactattaatttctggcacttggaatctctgagttgatcccttaaaatgctgccgtgactcttctgggacttttctgtctgctgaagaacatccttttcattgtgaccaactctcactggcatctctcgtccctcactggcatctcccgtctctcttctgaagttcttcccctcacgtgcctggctgagaagttggtgaggagaaggaggcaggagaggaggcattgcccttctcatttctctaaggaataggagcagggcaggttgagcagtgaagcagggagctattatggttattattaagaacccacttcaggccaggcttggtggctctcgcctataatcccagcactttgggaggaagttgcaggcagatggcttgaactcaggagttcgagatcagcctgggcaacatggttaaaccctgtctttaccaaaaatataaaaaaatcagccaggtatggtggcacgtgcttgtagtctcagctaccagggaggctgaggtgtgagaatcgcttgagcctaggaggtggaggttgcagggaactgagattgcgccactgcactccagcctgggtgacagatcgagacttcatctcaaaaaaacaaaaaaaagaacccatttcatctagtacctgtggcaggaccttttacctcctgtgcctattgttcccttttggggcagatggcgctgaaaccaggatttacctgcccatcttgctgctcaggaactttctaaaagagcgtaattctgaagcagggagtgccctggactgagagatgctcagcgctgcaaacctaggcaagagacttgcttctcagaaccttggtttcctcatctgtgaaagggattgttgttttcttggggttttgtgagatgccatgagctggctgtgaaagccctccatatactgtgaagtgttcctcagatgcaaagtcattaaaggagcctgtgtcgtcagacactgccagggccagtatgctgcttattcctccatagtacccaagtaagagtggtccaaggtcccacagctggtaccckggccaaagctgaagtctcccactcttaatgacaatgcccttccttgttgcctctcactggcatcttcttatctctcctgaactttttacccattacacacctggatgagaaagcagtggagatgaggagacagaagaggctgttcagtctgtaagggactcagaagagcgggaygggttggactgtggagcagggaggtccttgtggggtgcagggcctcttcctggagaggaaggctcagttttctctttctggaggaagggaaccatcccgtggtcaggtgtctagccaggggcccatcatgcctgggttttgttctccacagtgaccagcccctcctttttcttctggaggcattgtgcgctgcagaagggctgagccagaagttaggaaacttgggttccagtcctagctccactgtcacctggttgggtgatttcccttctctggactcctgcctcctcacttagaaacaggggccgatcgtgcatgccatggcaacatctttacgttgcaaggattgaatgatatatgcagcatggaaaatatgacgagtcatgtaaatggaagacattattattagggcagagagaggaactggcaggggagttatttgagctgaggggcaccggctgaaccagacagcttggcttcctcactctcccctggggaacacggattggtgtttttgccttagtgcagtgaagcatataacagccccacacttgccagggacccctcggtgattgcacatgtaaatgatgtctaagttatacaagaacacactggcagggatgactaaggaagcacctagaggctgcacccttggtgtatgtttggagatgtacaagcctaagtttgaggtggttactgctggcttttacagggagctgtgccctacccctactcacagagaacctgctgattcagctttgaggtctccacggtgcctagatccggactggacatagactaggtgccaaattgcaggaagtgttggagaaytagaagagcacagactatggagatggactcgactggattgaaatcctagctcagacacatagttgtctagccttgggaaaatctccatttctttgagcctcagctttctcatctttaaaagggataaaatggcctgttacagcacttttgagcagattaatgatcaagtatatgtctggtgcacagtaggcattccccaaatgatggctgtgattgttattaagcatttttggaattaatgaatcatagaattcaagattgttcaaggaatggccctaagagatcatcttttctttttgagtcagtttccctctgtcacccaggctgcagtgcagcagtgtgatctaggctcactgcaacctctgcctcctgggctgaagcaattcttgtccctcagcctcctgagtagctgggatgacaggcatgtgccaccacgcctggctaatttttgtatttttagtagaggtggggtttcaccatgtttgccgggctggtcttgaactcctggcctcaaatgatccacctgccttggcctcccaaagtgctgagattacaggtgtgagccaccacacccagctgagatcttatttacttttcttccctccctccctccctccctctctctctcccttccttccttccttcccccctcccttccttccttccttccctgcctgccttctctctctccttctcactctctttccttctctctccaccacacccaatctctctctctctcttgagtcaccacaccagccccaagatcatcttttctaatcctttaattttatagatcagaaagttgaggccaaagcaggtggagcgacttgtccaaagtcacagtgtgagctaatagcagagccaggtgtagaagctgggcctctttgctcattctgtcttacaagggcaccctgcagtagcctggaagaaaggctttgttcctgcatcctgggggcttgtggcacagtgtacctgagggagaactggaggagcccagcactagcactgtggccccatcccccacttaagttagggactcttctttccttgccccagaaaacagctgctggaagggttcctaaggaggaagcctcttaaaagtaatagagttgctttgggaatggggcaaactagagggagtctgcagagaaagacatcatctggaaacttttcaaaaagagttaacatggaatagcaacaggtaggggagagctccaacatgttgtgttggtgcccccttctggctgatagagagcagagctggtgaaaaatggttgttggctttccaacagtgtaccttcctaagggcactgaccccaagggggtatcatgaacattcagtgagccttgatgtagtaacagattcacctttcctttgaacaaccagtattcaagggtagtgagattggtattttcctgggctcaagtttggcttcgctcaagttaggcttctctagaccttatgtcttccctcctttacctccttctgwcttttgaccgttaaattgtagatggtgagtggaagcacttagcaaacctttcatttcccagctgaagaatttttagggaaagcatgcctagcactctcttttcaaggtatttgcagaaagccaactaactagtttagcagcaagctaatgtagttcagttcattaggtattgattggttacatactgtkccaggccctgtgcaggggtgctggtgacacaaagatgaagaagtctttgccctggaggaaagactgtataatgttgtgattaagagcttgtgctttggagtcagaccgacctagctttgagttctggcttcaccactcattagccatgttcacctgatcaaatgacagtctctctgagccttagtttctttatctgtctaatgaggataatcctaacaacctcatagggttattaagagtaagtcatgtaatatagtaagtgctcagtacatgatagctaaattttttaaagtatgcacaatttagtgagacaaacgtaaacagagatggttgtagtttagtgtgatggcaaatatggtaggaagaacttaggggctgtgagagtccaaaagtactgttagcatggagtctaaaaaaacacttacccggaccactgtctttttaactccctcctgggtctttttttccccacaggcatacttttttgatgcaccagagatggaccatctcccaacaactacagctactccaaaccaaacagttgctgcagccaagtccagctaatgaggaaagtaagagattctatttttattttgctgtgtggtgccataaracatgggcaggtgtatcaattctgttagtgttagctttaagcacagagggccagaccctttcatccttctgcacagttcagcgtgggtttgtgcatgtgcatgtctgtgtttctgtgttcctcttattgaagtcctctgttttgaaatccacatgatactggctttatagagttggataacatgagctcttaggttcttctgtaagaggagctcctgcctttggtcccagtagaggggactctcttctccctgaaccctttcctagaacacaatatgggtttgttccattttataacaatcctggtggttttttcttttttctttttcttactttctttttttctttttgagacagagtttcgctcttgttgcccaagctggagtgcaatggcatgatctcagctcagtgcagcctccatctcctgggttcaagcgattctcctgcctcagcctcctgagtagctgggattacaggtgggtgccactactgcctggctaatttttgtatttttattagagatggggtttcaccatgctggccaggctggtcttgaactcctgacctcaggtgatccacctgcctcggccacccaaagtgctgggattacaggcgtgagccaccgtgcccggccatttatctggtcatataatttatctggtgatcccattacactttgtattaagtatcactctcatggtgcttgaaacactaatggctgactaatcatgtgtccatctgcctattcattaatttgttcggctatttattcattcatttgtccactgtatactacaatgtctccccagttaggctcagctcgacaagaacaaggcatggtgttactctatatcttcattgcctaccacataacctagtatacatagggcactcagtaaatatttgtggcatgaataaatgaagccacactctgcacatgatcttgctgcaggacaagaacctttactttgctgtgtaatcacagactgtcctttctgtccaagctgctctctcccagaggcatgagatgtgtgcaaaaaccaggggcttagaattaaataaaattacaattaaatcccaggtcagctatggtggctcacacctgtaatcccagcactctgggaggccaaggcaggcagatcacttgagctcaagagtttgagaccaacctgggcaatgcggcaaaaccccgtttctacaaacaatacaaaaaattagcttggcatggtggcatgctcctgtagtcccaactagttgggaggctggggttggaggatcacttgagcctgggagatggaggttaaagtgagctgtgattgtgccactgcattctagcctggatgatagagagagaacctgtctctaataataataatgataaatcccagccctaccatgtactagcaatgtgccttgggtaaggggcttactctctttgagcttcagctaacttgtctttacaataagaatgacacaaactatataagattgtagtgaaggttggagattatttttataaaagctcctggcacatagttaaggtgctcagcaataaaatcaaagctactgccactctcagagtgcgtcagtagtttatgtttggtggctcccactgactttaccttgaycattttttcctttttgtaaaacaaatggggattttccctcttagttgaggaatccaggttgtaggccctgtaggttgactagatatgactggtcaaatgctttccagttccttaatggtaagayagtcaccctggccagtagaatgactgggaactattgtaaaatgtcrtagtctaccactttcgcctcttcctctcttctcatgggtatgcgatgttagaatcaaagaagatcagagcccttggagacattaaatagcatgggcttccctcctcattttacaataaggaagctgagaccgagagaggacagtgccttacccaaggccaccccagagttctggggcaaactaacatgtgtctatcacattccatttgacaaaacactttttttttttttttttttttgaggtggagtctcactctgtcgcccaggctggagtgcagtggcgcaatcttggcccactgcaacctctgcctcccgggttcaagagattctcctgcctcagcctcccaagtagctgagattacagktgccygtcaccacacctggctaatgttttgtatttttaatagagatagggtttcactatgttggccaggctggtctcgaactcctgaccttgtgagccacccaccttggcctcccacagtgctgggattataggtgtgagccatcgcgcccggcctgacraaacatttcctagtttattctctcattggccactcttactggccctcttgaccacattgtatgtatagatgagaaggctgggctgagtaaatctgggctgactaagatcacctacctcttagaggcagagctgggactcatatctaagtcttgggaagccaatttttgaggtttttcactttcccattttttagacaaatgttctttttaccactaaaacgtgcaggttctcactgctagcctttggctgtttgatggagccttcctctgcgggtctagaggtgtttagtagcagtctccacactcctttgattgcatgtcttatcagctgagagtttgcgtgctgtattaattatctattgctgcccagtggtattaccacaatacacattctcacagtttctgtggggcaggactgtggggatagcttagcttgctcctctacttcagattctctctcaaggctgcagtcaaaacattggccagggctggtgtctcacctgaagtctagactgggaaaagatctgcctcccaactcacaaggttgttggcaggattcaattcctgtggcttcgtagaatgagggccttcttgctgacggtcatttggagaccaccctcagttgcttgccacgtgggcctctctgtatgatcactcacttcatcaaagccataaagggagagagaggcaatcgagtctgatagtgagatggaagttgctgtcctatataatgtaaacataggagagatggtcatcacctttaccatcttctattgactagaagcaagtcacaggtcttgcctaccttctaggggagrcaattacacaagggcatgaatgcctggagacaggcagggatcactggaggccattttagattctcagtcacaagcacaaacttgtgatacgtatatatttgaagtatttgcatatactgttgtcaatccatataggaactattaaagctttaaatgccatagccaagttgtcagtttagcattatggggccaagaagggagggactcagttggagttggcctggagggaagcttcagagaggggctcttgtttgaactgggtcataaaggttgagcacagtcagttagctgttctggaaaaagtagtctgcttcccatggcttttgggaagatgaagacctaggctgtacaggggaaccatgataagacgatgtggactcacatcactgagaacgagacaattcgagcccagctggagagggacagaggtagagaacacaatggcaacagtttcctgggtctctcttttggcccaaagtacctgacatcgccatgttgagggtctctctcaacctgcccctgagctaggacttaagttatttcatttcattttggttgtaaaggccttcagagagtcagagcagcatctgagaagagcctgcccctcagggcccttgaagacttagcagactggtgtacacagatttgacgcctctgcgctttgctcagatctatgaacttggctgttagagcctccatttgggtgtcaagtctccaaatgaggtagtgatgaacagcttctttgcagcctccctggcagaagcatcaattgctttgctgatagagaggctgtccagagccctgaatgctgctgatttacgagctggctgtgccttctactgtcatctctggactcccagctttcactgaaaaataaaggcttctaatctcaccagtaacctaccttccccatgtaaatctgtgtattggaaaacttagcctagagcgcattcccaggagagcattggaaggcttagcttagaacacattccagggagaaccccttctctccctggaacctcaggatcataggggagcttccagttacagtcatgcattgcttaatgatgggatgcattctgagacatgcgtcattaggcagtttcatcattgtgccaatatcatagaatatacttaaacaaacctagatggtatagcttacaacacacttatgtgggatagcctattgctcctaggctacaaacctgtgtggcatgttgctatactgaatacagcaggcagatgtaacccaatcgtaaatatttgtgtacctaaacatagaaaaggtacagtaaaaatatggtgtgatctcatgggaccaccattgtatacgtggtctgttgtcaactgaaacatcattatgcagtgtgggactgtacttgtaatcagcatgctacccctatgtaagttattgaaataatataaagaatatctggcttccatccttccttcttcattaacttttcacatgagggcagtgctatgtcttctctgagccaagaccctggtagagcctggaaactgtacctgggaagccctgctttggcttgagggcttgagaccgcatccagattggggtgagctttccaggggcagtgacaggtggggctgtccggaggagggccatcagcagataatcatatcgcagtgtgatcagggctttaattaatgatgcagagagggcttctggagagtcctttgtcattaaatcctcctgattggatacacagggtttgtatgcagttatcctgtcactcgctcacattgtcaagagtgttcatttcacaagccttgtctacttggcaatttcctgtttatttttcaggactcacttgagataccctctccttgctgaagtttttcttgacttctccaggtagtattacttattttcttttctgtgctcttctacagctctcgtatgttcttctattatggcagtttgcttattcactgtaacttcatagactgagagttccttgagggcagagctttatttaccaatatagctccctagcacccagcagacacttggagaaagcttcatttgaacaagttgttaggccaatcatatagcatcaaaactttcctggatttatgtggcaggttacttgggaaatctttacttgttcattcattgaagttctactctgtgctggtgaacaamggagatcagtccttaccctcccagattctatactccagttttacayctcatacgccacacagactagaaggcccttttacattaaagagagaaacatgattatgggaacttctcattggaacatcccagatcagactgtggtgacattggaaggtttggctgcagggctgaggcaaggaaagggacagagaatgcccatgcgatagtgcagccacccaagatggggagccaaaaatggtcaggagtcaggtcataggccaagaggtggtagaggcaatcttcaagaggtaaggaagtgctggctgatggtgacattagggaccaactttggcacaaagggcaacagcatcttacttttctccctctggcctaagtgccaagaattcccaacctcttcgcttctggccacccattaaaagttggcagcaggagaaggaattttttttttcttttttttcagacagagtctcactctgttgcccaagctggaggacagtggtgcaatctcggctcattgcaacctccacctcccgggttcaagtgattctcatacctcagcctcccgagtagctgggattacaggaatgcatcatcatgcctggctartttttctgtatttttggtagagatggggttttgccatgttggccaggctggcctctaactcctggcctcaagtgatctgcccacctcagcctcccaaagtgctgggattacaggcatgagtcaccatgcctacctgagaagggaattttctagtcttcatattcttccctagtcttgacattgatttggaacagacagctagaaagaggagagaaaaacagagtatatatttatgaatataaaatcttgagtgcttgctctgtgggcccgtttgtccctacctttatttagcgtttcagaacccaagttgatggttactaaaaggctgatcagggctttaggttctttcatgccagcaaattacagcgtctggctttctccagccacttttcacagatattttgttggcaatgtttctcttttcttgagccagtagacttgggcagttagcccttgccttagcctcaccttcgtggtatcatcaaacgctgacatctgaatgtggtattgtcctgttgatgtctccaggaaggcctagctcattctcccaagtggaaggctatgcattaggaacttattctccaccatattccttagtcttccctggatttaactctatctccagcccctctttccaagtttccctgtcttgcaaatccccaggtaggtataccaacagttgcctcaaattcattacattccaagctatactcatcccccactacaaccagatcctcctcatgttttcctgtctcagggaatggcaccatcatttatactgtccctgactgcagagtaggttagattctttattacaccctcgcctggcaagttaagattataattaaataaataatattttctgtatttgtttgccctgttgcttctcttggtagactggttccttgacagttgggaccatgtctgtcttgttcatcactgtccccagtacctggcacatgggtcctcaatatttgttggattaattaagaaatccatccagtcacccargatagaaacctcagcatcaaggtagattgtagattccccccactcaccttccacatagtatcagtcagcaagacctgtcttttctatctctgaagtatttttcatctctgtcctgttgttaccatacccagtgttcaggaccgatcatttcatatttgaactgcagcagtaacatgatggctttctccacttcttttctttttctccttccaattcatcctatacacagccacaggggtctttgaaaatttataattctgaccacgcctttaactatgtcacttccctacttagaaactttttttttttggccccctattgcccaaataacaaaattgaaaccccctgcattgycacaatctatccctgatttatttgtcctgcctcatatcctgccattatctcctgtataaccttacatttcaattaccacggttttccaggtcccagatctttaagtccctccatatccactcttatcttttctcctctagtgcttaacacagtgctgtcacggagaagagaaagagagaaggatgggcaaaggtagctttaggatctggcttggaaagggtcactgggtttccaagcaaatagaagaaaactttttaaagcatcatctttcttccaacactaagctctacttttagcatcaaaattagactcaagcctcaagatttagggaattggtggcagcagactgctcyggtgttgggagttatatctctaaacatacatgaatatccttttctacaatgtagctctttcctgtcggggtgggggggtgctttatcttgaaagtttcccgttttgtttttcagttctcttttgttttttggagcatggttctttgggaagtggcatccactgcaggaaagcagaatgagcagagccagcagaactgatggagyggcacaaattcccagtgtctggatggtgccacactggcgcctaatcacccgtttaacaagcagaaattaaatgttgctcagcacatgtgtctttcagctcttccttttcacccatggatgatcattgcgagcatgcgctgattggactgaaatgccrgggaataggttaggcatgctcagtgccgtccctttgccaccacagtcaaatgacatgcttcactgtggtaccttaatacctgaaatagaaccatggaaaattytgatgtcctctctctgaattatgtacagactacctgggggatcctcttctctccaaatgttagccatcctgaagtagccgaacagtagaaactttggtggggattaacygggagcttgaaaatttgtctttggtaacctgatactggacagctgaactgaatggctgcaaaataaatacctcacatgatgtctgtgtctgcattttgtgactttgacctcaagtttttccttgatggtttgtctgtactggaggctgctgggaatctgattgaatgtgctcggtgttatgatgtgtggattaaaatgggacatctgaatgtttcttcctataagaatggaatatcagttttaaagaacacattcggccagaagttgtggctcacacctgtaatcccagcactttgggaggctaagatgggtggattgcttgagcccaagagttgagaccagcctgggcaacgtggtgaaacccagtctctacaaaaaaaaaatacaaaaaattagctgggtgtagttgcacatgcctgtagtcccagctacttgagaggctaaggtgggaggtttgccaaggtgatgttaagtatcctcgagaggctgagcctggaggttgaggctgcagtgagccactccagcctacgtgacaaagtgagaccttttcttaaaaaaaaaaaaaaaaaaaagttcatttacatcccattttgacaaatttcacaaaattctcttagggtacttggagtacctggcactttgacttcctggctagtgtgcattaaagagagaaaccagtgacaccgcaaagagctttaacatactgtttgttcaaaatgcatatgatctgggaggctgagcttctgatggtcaggattactgatcacctactgtttctgttgtcctctgtattagtctgttttcatgctgctgataaagacatacccaagactgggaagaaaaagaggtttaattggacttgcagttccacatggctgtggaggtctcagaatcatggcaggaggcaaaaggcacttcttacatggtggtggcaagagataatgaggaggatgcaaaagcggaaatcgttgataaaaccatcagatcttattcactaccatgagaagagtatgggggaaaccacccccatgattcaaattatctcccaccgggtccctactacaacatgtggaaattatgggagtacaattcaagatgagatttgggtggggacacagagccaaaccatatcatcctcttccagacagaattccctatatatttctgagatagctacaaagacacatttagacttaaaaggttgaccacgcaggtaaaggaagacacataaatcaggctacaatgagcttaacatcaccttggcaaacctcccatcagatgctgaatatccctccattaattaaccaacgaatatattctgagcacctactatgtgctgggtactattgtatgtactgaggctagaacagtgaacaaaacagacaagctccctgttctcctggatcttacagtccagtgatcactgctcagtggctgccggcatccggctttctccaggcagcgtttcgtccttcaatggcctgttctgtcagaagtgcctctgcagccatcactgcgtggtctttgctctgcccctgggcctcacagaacaagtgtgagccttattcccttcagatgtttgaagacagctgtttgtgtcccttgagtcttctaagtattttttttttttttgtcttgctctgtctcccaggctggagtgcagtggagccatcatagtccactgtagcctcaaacccctggctcaagggatcctcccacctcagcttctcaagttgctaggactacaagctactaagtacttttaagtcggtatcaccggtaaatttttccaaaaatatgtttagagattctataataaagtggccaggatttaatttttaagtaaggattttggacacagccagcattgtcagcaccattatctttatagaagaaaggacattataatatcaaataatctggaaggacataatcttagtactaaaaacttggtaagtttagctttatgaaaaactgactgttaattttttctcacctagccaagaccagtgaaagtttcgtgaactaaccagcaccaccatttgggagccactgcccttgggacctccatgcagctcttacgaattacattcagctgtaaaagaaccctgagaagcagttagcttaaataaatttgccgttttgtctttcctatgtaaatagaaatttagagatagtctgaggttaacatggctgctccatgatgccatctctttttatttttcttctgcccagcagtccttagcatgaatttgtcatctactcccaagatgcccgtgttacctccagcaaagggtaggtggtgcggagtgtgcctccaggccaaaaacccgtgcctgatctttcaggcctgacaaaggccttacccaacaggcctcttgggaaaagctgcctgcccacaccagactgggtgcccagtgagtgccatgtgtctctgaagggactacagtcaaggatactcttacgcatatctgcgtttcatgcccaggctcctccatttggaggcctcctagccatagcctttttcaggtgcctctgcagagaccaatttatctatggggtaccggggaacttgaaaatatttttttcacttccaaggctcagtacttttctactcctaacccttccccctcttcctcttctcagtccccaggccctgtgaaatggcaggagccttttgtttagggatcaattggcagtgagaccatccccacatttgcactgatccacctgacccttgcctggcactggttcatggtgggaaatggaacatgaggggagccagcgctttctcctggttagcctgttgcttgtaccatcacagtaagtgatgaaaggcttgctgttacttcattttcacttaactgtactccaagtcctggcagctcagctttttctagctcaactcagctcttgacaggcagcaggaagggaaagggtaaaagagggttggccagtggagttagcctgccttgtaatgagctttctccagagaaaaagttcatgtcttattggttagaactgtatcccacagttacccctagctgcaagggaggctgggaaatactctttagctgggcacactgtcaccctgaatgaaccagaatactgtcggtaaggaaggaagacagaatgggttttagacagataactagtacatcttggagcccctccttttacaaaagttggtggtggtttgtccattatcagtttgatttaattggttggtatcatacaaagaattgagagaaatgaatgttgggaaaatggcagtggcactagcatactttttgaagctccctgaattctttcatagaaacagggcacctgggatagcaaaatcaaaaacaaatcggcatctacaacaaaaggtgaaaaggtatccccacaaacccaaaaattcaagcagagggaatcttctggcagcgccaagactgacatggtatcagcatttttatggaaagaaccacaggaaagcaacagggtatctgcgaaattggaaaataagagcaccccaaaacagccaataggtactccctggaaagtgcaatgggctaataggagaacagcagctggaactggagtttcgtaatacccagtttgcagcacatgcatgcaagggatccacagcaagttctgaagaagctggagtaaccaggcaccagaaaagaaactgcacggagcaaaacgcaagcggagcaggccagggatatttggggcaaagaaaagagaagtccagatgagagtcggggaggggaacagagcaatgtcagaaagatgaagctgtatttttgaacatgtcatggaaacagaaaaggaagctgtaaagccttgaatttggaaaagctattctgcctcacctcttcctcctaaatgtgcaggaaaactaatttcacataaaaaagagtaacagaaaggatcgcagtcaaatcttgtaatgaagttattatatgaaaaatgagaacaaggagcagaataacatccctaatggtaatgaaagcattccagacagtcatgctcacaaaaccagataaaagccataacttaatgttttaaaatgagctaaaataagaaatggtacaggatatgaaagaaaatcactaatcagaattataaggcagaaattaggtaatagtactgaggaaagaattggaaagaaaagaaaactcatctcacaaatgaaggctgaattataatagaagggatattagagtgaatgagcacaacagataatgctttaagggaataaaaagtgaaaaaggaggaaaacagatgaaattccagaatgaataaagagaaatcaaagaacttaagaaaaagtgaccagtatgggtcgggcgcagtggctcatgcctgtaatcccagcactttgggtggctgaggcaggtggatcacctgaggtcaggagttcaagaccaccctggccaacgtggcgaaaacctgtctctactaaaaatacaaaaattagccaggcatggtggtaggcgcctgtaatcccagctactcaggaggctgaggcaggagaagaacttgggaggcaaaggttgcagtgagccgagatcgcaccattgcactccagcctgggctacagggcaggactccatctcaaaaaaaaaaaaaaaaaaaaaaagtgaccaatatggaagataggcagagaagatctaaagatgtattatagatgtccaaagaagaaacaaaagccatggagaaaaatacatttttaaaaaactataaaattttctggaaaaaaatactacatataaaatgggcacactcatacctggggaaatcaacacagaagatcaacactgagacacagttggtgacactgttttatgtccaaagacagtggtaacatagatacccaaagaaagaaaatatgaactaaggattttacatctagccaaactgaccacagacaagacgttatcaatgtgaaagaacacagggaatattcccatgagacctttccgaggtatcttctagagaacgtacttcagacaacccaaatgactgttaagacattgacatagcagttggtgagcacgaaatacctattcacatgtagaacttaataatgcttataagggagaaaatagaatttataacggttatgtgcccttaaaatgaatctacagtataactaaaaaaagaggaaggagaatggggagagcatgtttaaagcagaataaatctgctggttgccttatagatatagcaaaacaactttgcttcaaatcacctgctggaggataagaaggggaggaggaagaagttactaaataacgtctatgttgttcataagaggaaaacaatagacaatcattacctgtttcccaaacagaggggataaaagatgttatagataggaaatgaggccgggtgcagtggctcacacctgtaatcccagcactttgggaggccgaggtaggcagatcacctaaggtcaggagttcaagaccagcctggccaatatggtgaaaccctgtctctactaaaaatacaaaaattagccaggtgtggtggtgcgtgcctgtaatcccagctacttggcaggctgaggcaggagaattgcttgaacccagggggtggaggttgcagctgagccgagatggtgccactgcactccagcctgggcgacagagtaagactccgtctcaggaaaaaaaaaaaaaaaaaaaaaagggaattgattagaacaaaaatacaaacctttgaaaatttttttttttttttttttttttttttttttttttgaaacaaaatcttgctttgttgcccaggcgggggggcggggnnnnnnnnnnnnnnnnnnnncccccagcctctctgatagctgagactacaggtgcccatcaccacgcccggctaattttttgtatttttttttagtagagatggggtttcaccgtgttagccagggtggtcttgatcttctgacctcgtgatccacgtaaattttttttaaaaagcaagcaagcaaataagatataccactctgaaaaattatttatataaaagagctgaaatgttaaaattgataggagtgtgtgagtccgtgcttctttttacctcagcttggcttactctctaaaatattttattta

SEQ ID NO: 98005 - DNA, 109472 bp, Homo sapiens
ggaggttgcagtgagccgagatcgcgccactgcactccagcctgggtgacaaaagtgagactctgtctcaacaaacgaacaagcataaccatgaaactgactactgccaatagcttctgcactctcaagacaaagcaggtaagcctgaataatgggtaagttcctttttcttctatccaattcagtttaatgaaatcactgaaatcacaataaacaaccaaaatctaaaaggcctcagagaaaaatgactgaacagacttatttcagtctaggaaacctctttttgccaataacctaaaactatcagtaagttaggatattaaagaactacatttttaaaaaacccaagacattagcagagttaaattttacttaaaaaaaaaaaaaagaaaaatcaagggacaggtctagcatcggtatacttatctatttattacaaataacagcaagcatccattatgcacagagaaacccagcagagaggtagagaacaactgctttgaggttatgtcttcaagtctgtaacacagctgctgaaatgatacacaagtaccaaaagaaaatacacaagtaaagcttacattacactacacgttaagaattaccaagcactggccgggcgcggtggctcacgcctgtaatcccagcactttgggagtccaaggcgggtggatcacgaggtcaggaaatcaagaccatcctggctaacaaggtgaaaccccgtctctactaaaaatacaaaaaaattagctgggcgtggtggctggcacctgtagtcccagctactcgggaggctgaggcaagagaatggcatgaaccctggaggcggagcctgcagtgagccaagatcgcgccattgcactccaccctgggcaacagagcgagactctgtctcaaaaaaaaaaaaaaaaaaaaaaaaaaaaaaaaaaaaaaattaccaagcactaagattatatacaacaatctaaaaattatatttattctgtaacatccaccagatttttactcttccaccctatctggcctggactctcctcaggcttggccttattaactaaagcttggcctatgaaaaaagtggcacagaataatccactggcttaacactaaaacatggcagtgacagttgatatccatccaggcactctaatggcacgttagtcaggggagatgtgaagaggccctgatcactgaaccaaccaagagaaagcattctgaagaatctgctggggtcaaagaacccttccaagcaggttggagtccagtggcatgatcataactattaacttcaaatctctgggttcaagcaatacttccgcttcagcctccaaagttgcctagaactactgatgcatgccaccatgcccagctaactttttttttcttttttgtggagacagtctcactatgttgcctgggctacaactcctagcctcaagcgatcctcccacgtcctcacctccagtgccacctcacccagaccaatcaggtttattagtataccttcacacataccacattgacatgaaatcatccttgccctcaggaagcctacagtccaatcagggaaacaaaagcaacacatgtcaacaaatgcaatactgtaatgcagaaacgaagcaagtacagttaatcagaaatacaaagatcacaggtagaaacttgttcgaggaagtgatctgaagacatgagttgtaagttgttcttcacatcctttatcttctatgtttttctgtacatagtgggtgcttgcttgatttaaatgagggaaaagtccatgtcaaacaggcaattgcaaggaatgatttcagtgaagattaaaaaaccaagtaggttgctgttttgacttgagtccatcaaatagcaaacaaaaaaataaaggagcaactggtatcacatttgctcaaaaagatccctacccatccacttaaaaggggggaaagttccctaggttctgtaaagaaaacagtgaccaagattcagaagcattattccctaattgtaatctcttacattaagtcaatttcattagagtcacaaaccagaacaggtactttgtcaataaaaaacgtaaatgaatttgaagtttctttaaacatattaacaagttttttcagtagaatgtatggcaaacaagtatctggcatgctgataccaaaaaaagaaggtaactttaaaaagacaaaaatgagacccaaattctactaccaattaagcagcaatttcaaattatgaagttctataactctgtaccttcaacctagtttacattaattctcccctgccccatggaccaccacgactaatgagaagctgtatcttttaaaaatgacctcaaaacagctcatgtaattttctaaaattaatttatttagcatgttgttttttttcagtcattacatctgttgggtctcacaaccacccagtgaggtaaaatagagattacccactcccattttacagataaaataaatgaagaccagataggttaagtgactagctcaaggtcacaaagctactaactggtagtgtgtgaatttccaagccagtgatgttttccttgctaagatgaaaaccttaaaataaagcaggatattaaaaccttgtctagataacataaatacaataatcttacaagttacactggggccggcgtggtggctctcccctgcaatcccagcactttgggtgaccaaggcaggcggatcacctgagaggtcgggagttcgagaccagcctggccaacatggtgaaactctgtctctactaaaaatgcaaaaattagccgggcgtggtggcgcgtgcctgtaatctcagctactcaggaggctgaggcaggagaatcgcttgaaccaggaggcagaggttgcattaagcctacactgcaccactgcactccagcctaggcgacagagcaagattctgctttaaaaaaaaaaaaagttacaatgggaaaggaatcatacatggaatcatacattactacaaatttactttgccaggtgaaagtactgattttaccgtgatctacctagcatcccattcgttttttaaatgtaactactttagtttagcaccttctggaacctaactgccaaaattgttctcaaactttttgaaagtaaatgaaaaaaaaaaagaaaaataaagcctgttcatagactcaaactaagtagtataaatgtcagctgaacagacttaaaaactgctcacactccagaaaaactggggattgaatggaaacaatgataatcttaattacagttttccaattcttatggatattggcacattcatagaaaggcagacatgtacaaagcccacaaaccccaatcatattatgtactcttaagcttaaaataaaactccctcaatctcacaaagatagtcacagcagttcaacatttctggggctgaacacacagcaggaagtgtcaaaagaaagaattagaaattctgtatactttaaaacttacacttaatattgatcactttgcatgtggtaaatatgaaaatcagcctcaataaaatcctctacaatttattgtctctaaacctctgctaattccattcctcaacccccccggggtgtaaatgcgacacacacaggcctcatatacaggcctcttgcctttttttctaacacaactaggacctttgttctgagcgtcgttttaccccactcaatagctctttcaactttctaccccgtattttttgttttgtttttaaagaggagactctgagactcaacttgctaggtctttaaaaaatgaaatgccaaaaatacctaatgagactctcgagaggaacataaagttaaacacatcactaaagggcctacaaaacggagtaaagcccggagatcgggtgatctggcagcccaggcaagatcgaggaccgcgactaggaaaggagacagcaggagagcagttagacgtccacttagaacggattcactgcgctattaaccgtacccgcctccccccgcaccggcccaacctttacacacaaacacattccctcccccaattaactaaagaagcaattaaactatgcccaccaccagactcgatgcttaggctaaacctcccccaaagtaaaacagcattatcaaaaaaacacaacatttgtcttaagggtttggaagctgccccttccgttatctcctcaccacgtaaggtaaccaattccctcctgtcccccaccaggagttcaaagtgtgatttccccccgatttacatgtgtttttatgtttttccgcatttttccgtctaggaaatgaaggatttcttattctgaggaagggagagacgccgaggaagacaggatttgaggttttactaccttcgttattcgaactcccctctaacttgttcctgtactagaaacccactcactatggagaaggaaggagaggggctgaactgatggacaaacgttgtaaataataggttttatgtaatccacatataaataaattaatcgcctgactcgctctgaatgctaatacgattggggtgacaattggcccacctccctcccccaagtcctagttaaacccacctaccaccaatttccattctgatctatttaaaaggatactctattcctctcagtcaagtttctcggcttctttaggcctccctgcatgcccccctcgtcatcatcctccctcagcctcaacttcccacggcttaaaaaactgccccgcgcagaccccgtctccgggctcgccctccctcaaccgtccctcgccgtccccctgggcaggaaaccccttactgcggtctaaagtctctctggcctctcccttctctgaccctcgcttcccacaactgttgtcactggagctgcttcctagtttccatttccgggccgtccacggccccggagcctcccctttcccgatttccgggcccctcgtcccatttccggggaacccttgccgtcttcacaccccccacctgcacttccggccccccactttctctcttcccagacaccctccaagctccaaagcccacttccggccccccttggtccccgccgagctccccaacacccgcaagccttaccccggttctgtgaagggccctcctcattgcgggaagccggaggagggacccagcgacccctacctcccgccaggccccggtccctccggccgcggccgccctcgagcgtctctcccgtccacccccggcccggtccttccgcggccccgccgccgccggcgccgggagcaggccaagcgggggccgaatcgcggcgatgacacaaccgggcttcctgggactttctgttccagctcctccccccgcccccccaacccctcagctggccccctcccccaaggcttgcccccgccgcccagagctgcgccccaattacctagttaggccccaaagtctccggtccggactcggtggcgcggcagtaacttccactagctccccccaccccccccagcggcgcggcggcggcggctccgggttccttcaattatcagctgagccgcagcaccgcgcccggcgtgcgcctccgcccgtgccgcctccctccccgcctgctctgacaccctcggggaactactttgtcctcgggctccggttacgggctcgtccgcgggaccggccccgctgcctactggcggcccatcacatcgcccctccctcccacgcctcccggctcgactctctcagcagcctccgatctccgcccgatcccttcgagggaccaggaaggggactgtggagatctacttggtatccctccgccggggtcaccccctcccctccgtggtagcaggaactaattccccctcgggtcacccgggacctggagctggaaatttcacggatcagggttccctaagacccttggaagaggggacgatcgccccaagttagaaatccttctgccagctcataagcgtggttcaatttaaactagggttttggccccttgaccccaaccaagccccgccccttcctggttgtcttagcgacggcggtggcgtcccaagatggcgtcgtggctgccggagactctctttgaaactgtaggacaaggcccgccgcctagcaaagactattaccagttactggtcacccggtctcaggcaagtgcgagccgcggtttaccctctctcctaactccctacctggcccggttggggcccgggacgcaggctgtgctaggccaagagcaaccgtagcccgccggaagcgcccagtcccggctccgcgccgggagattttcctcgtcacctcggcctcctcggtccgacggcccgcgtgtccctgctctccccgagcccggctagtccctggcaagccttctctgcctccccgcggtgccgcgtgctcctttcccgccaccccggcttcttacccgtagagtttcctccgcgcgaagaggaaaacgggcgtctccggcttgcgtgcggcctcacctcagcgtgagaaggagggaaagaacgactcagccaagtgtcccaaggaggagccggctagggaggggaaaaggagattgcctcttttccaggataggaattaatcatggagaattttataaatctctttgtggcctttacgcgtgccacggccacatcaaaacttagttatttctagtagcaactgacgattgggagctcttaccttttggagtcccttctatcccattgaaagtgtgcgggtggtggtataaaaatgtttcagctgctctgcgcttcagccccacccataatgacatctgctccacaacwagaccgaggattatattatctccaaagtaaccatcggcctatttttatgcctactttggttattgaaggtgggcttttggatgatttactgtgtccatgaaattctcaacttgagcggggcctccattgggaagacgtttctaatcctggctgagtttacgcctgtcactgagttattcatgcaccctgccctttcaatagatactattcctataaaatgaaatttagaagtttgtatatatttgttttggtgtgcatattgatcattccctcagtttttccaggagcccttaaacaaaataggtaatgagttaatttttttatatttttgaaagcatcttttaaaatataaatgttaatatatattttttaatttaagatttagaaatattacaaatgtaaaatcagcctgtccaaaaaaaattttttttaaaacagtactgctccttgcggagcagggctaattcataggcagtgggcccagggtcagactcaaatttttaattaaactgttcttagggggttttgcacatttagtgatgtatgaaatactgaaaggtatccttttctgtactttttttttggtgttggtttttttttttttttttttttttgagacggagtctcgctctgtcgccaggctggagtgcagtggcgcgatctcggctcactgcgacctcgtttcaccatgttggccaggatggtctcgatctcttgatctcgtgatccgcctgcctcggcctcccaaagtgctgggattacaggcgtgagccaccgcgcccggccttgtacattttttaaacggattattgatttttccatttgttttaagatttgtttgtttatttatcgagagggagtctccctctgttgcccaggctggagtgcagtggcgcgatctcagctcactgcaacctccgcatctcctgggttcaagcgattctcctgcctcagccccccgagtaactgggattacaggcgtgcgccaccacacccagctaatttttgtatttttaatagagacggggtttcgccattttggccagagtggtctccaactcctgacctcaggtgatccagctgcctcggcctcccaaattgctaggattatagacttgagccaccgagcctggctggctttaagatttatgatcctaacatttcttcacctcctaacatgagtggtcaaaaatataatctgttctaatcttacatgattttctatttttatctacctcaagtaagttagaatgttttaatttttacagcctttaaaaatttgtctttttttgcattttctttcccctgaaggtctggtattttacaagtatgcttcatttctctcatttgtaagcctcaccaggctgagtatcttgttacctttttattttagtaaattatccttaggagtgctccctggcattcggcttcctaaagaataattctgttgttggtgttcttcagactttgctctcaagtctaacttaggcgcatgccttcctctaactactctttttttttttttctttgaggcagcgtctcgcactgtcgcccaggctggagtgcagtggctcaatctcagctcactgcaagctccgcctcctgggttcacaccattctcctacctcagcctccccagtagctgggattacaggcgcccgccaccacgcccggctaattttttgtatttttagttgagatggggtttcaccgtgttagccaggatggtctctatctcctggcattacaggcgtgagccaccgcgcccggccctaactactcttttttaagaaatctttcccaccatcccttcagtgttcttaatttttctttttctttctttatttttattatttatttatttattttttattttttgcaagtgaaaaactctcctttatctcaggttctgtcagttacatatatataaaatcctaaattctgatccattttcttttttaagcatgctgaataaatccactacacttctaccagtgagagttaatctccaagctaattaattcaccctctttttaaagtaaaatttgttgtaaaaaatggcatgccaaaaaaatatacttttcagtcaactgccttgagaatatgctattttctaaccacaagacaatttttctgagtctcagcacaggaaaccaaacatccagtaagaggtggcctgacataaataagtactaaaagactagcattaaaatatgttttataagatagattttttttctggaatgactttctaaaattatttcttgtacatttcctcccctttctcctgtctttatttttttaatgttgtatattatccaaattatgccccagatttagatgaatccttctttcatgctgattctgttttttagtctctttttcactgcatctttttcgttggccttaaatccaaataactgcacatttgacatggatttgagggcagatatttctctcattagtgtcataccaccactgacatagtccagaatataaatgttatacataaacattttctttgtttatatagtaacatttgaaatatactgtatgcttatacaggcacttctcttttactgcttgataccatgttgttttgggtcttgggagaggggttttattcaaataaataacttttggattacagcttggggtcagtttagtttctcgaagctgatctttataatgatgatctccagctttagaaaaaatagtgcgctgctttctaaatcaaagattcactcaagggttgggcacagtggctcaaacctgtaatcccagaattttgggaggctcaggtgggaggattgcttgaactaaggagtttcagaccagcctgggcaacatagcaagaccccttctcttaaaaaaaaaaaaaaaaaaaaagggggggctgagcacagctcatgcctgtaatctcagcactttgggaggccgacacaggcagatcacttgaggccatgagctcgagaccagcctggccaacatggcaaaaccccatctctactaaaaatacaaaaaattagctgggcatggtgatgcacgcctgtagtcctagctactcgggaggctgaggcaggagaatcgcttgaaccctggaagcaaaggttgcagtgagctgagatcacaccactgctctccagcctgggcaacaaagcaagactcagtctttaaaataaataaataaataaataagatttacttggccaggtgtggtggctcacacctgtaattccagcattttgggagcctgacgggtggatcacttgaggtcaggaattcaacaccagcctggccaacatggtaaaaccctgtctctactaaaaataaaaaaattagctgggcatggtagcatgagcctgtaatcccagccactgggtaggctgaggcaggagaatcacttgaacccaggagacaaaggttgcagtgagccgagatctcaccactgggcaacagagtgagaccccatctcaaaaacaaaaaaaaaaatactgttattcttactctagctctagtagtttacatatattttcttatattggattctaattctttgaaaaccagtagattaataaagtgttaggggtggaaaggatctttgttttttttttgtttttgcaacaagagcctcactctgtcatccaggctggagtgcagtggggtgatctcggctcactgcaacctccaccttctgggttgaagtgattctcctgcctcagcctcctgagtacctgggattacaggcacccgccaccatgcccagctaatttttgtatttttagtagggatggggtttcaccatgttggccaggctgatcttgaactcctggcctcaagtgatctgcccgccttggcctcccaaagttctgggattacaggggtgagacaccaaacctggccagggctagaaagaatcttgaatattatttagtttgtactttcatgacacatatrtattcctatttatagtggggagaatgtagctagtatttgatttgtaaaaacactttaatgactaatcttttatatgttgtatttttttttaactccaaaggaagttcatgaccaattggcaagttaatgagtgcaggtgttttaaaatctatgagtttagaagaagcaaaaaatcactttattctaagtggtccaggagggtactgttaccagtattgtactcttgaaatgttgtcttctttgtcctctcaaaatggaagtgttgcttaggtggccagaacagttaacttaggtttaatgtgacaaatactggaaaagtgttagaaagagaataatggtatgctaagtagatgggaactggcagatacggcctcttgcagccaataacccaggtggttgtccgaagagcaccaatatgttatagttaactccagcagatgaaagaaggaagaattgggcaatagattcgtcttgttttatctctttttctaaatcctatccaaagctccaaaaagatatatgaagctagtgtcatttgaaaaaaaaaaaaaaatgaaaaagctcacccctctaaaaaaaatggcaattatttttgaagtgcattagagttgtggcactaaagactgaaaacacctgaggttgcatgccagcctgtgacaggaagctgtcatctcaatgacttctgacaaaagaattaaactagacttggtgatggctgggcgagagacaacaaaaaattgagctagtgccatttcatactgcagaccaattttgaagatttaaaatgtaaatgcagtctaataaaaatgttaatgcacacaccctttgacccagcaaatccatttctaggatttggatatccaaaaatgctatcacatgtgcacaaggatatgtgagcaagattattgaccaaagtcaataattgtaaaaacatttttccatgagaggaaatgtggttaaactgtgattcattcatgccatagaatactatccaacttttcaaaaacaatgcggtggatctctgtttactcagtagaccaaataaaatctttagcaagaaaagcaagttgctggattaaacatagcatatcctacttttttaaaaaagtgttttaaataaatgttagtgaggttttaaataattcttaaaagaaaaagctggaatgatgcactcttaagagttacagatttttactctccgcattcatatttctggaagatctgaattttctaccatgagcatttatttttataatcagagaaaagcaataaagatttaaaatgaaagtgtaaatggataactgttactttgaggtggtgtcctgcctgtattccccctattgggccagcaccacctttcacccacctccctcattgaatattgaggctgaatattgaatattgaatattgaatagctttgatagctgtgtcccaaactcctgctgtttttgtggaaggaaaataattctaattctacagttttagagtgcaaattgattaatgattaattttgcaattttccttgcaaaattttaaggaggatttttggtgtttttgtttgttttagaggcagaatctcattctgtcccccaggctggtgtgtagtggtgcagtcagctcactgcagcctcaaactcctgggctcaagcaatccttgcgcctctgtgtcccaaagtgctgggattacaagcatgaatttctgtacccatccttaaggaggatttagtgtctagaaacttctgacctttttttcttttcatttttttttttttcttttctgagacagagtcttgctctgtcacccaggctggagtgcagtggcatgatcttggctcactgcctcccaagtagctgggactaaaggcatgtaccaccccgcccggctaatttttgtatttttattagagatggggtttcaccatgtttgccagactggtctcaaactcctgacctcaagtaatccgcccgcctcaacctcccaaagtgctgggattacaggcgtgagccactgcacccggcctctttttctttttaatataagtaataattacctttgagaaactaaaggagctgggtatggtagctcacacctgtaatcccagaactttgggagcctgaggcaggcagatcacaaggtcaggagatcaagaccatcccggccaacatggtgaaaccccgtctctactaaaaaaaaatagaaaaattagccaggcgtgggagcgggcgcctatagtcccagctactggggaggctgaggcaggagaatggcttgaacctgggaggcgaagcttgcagtgagctgagatcaggacactgcactccagcctgggcaacagagcaagactctgtttcaaaaaaaaaagaaaaagaaagacacagccaggcgcggtggctcatgcctgtaatcccagcactttgagaggatgaagcagatggatcacgaggtcaggagttcaagaccagcctggccaacattctactaaaaatacaaaaaaattagctgggaatggtggcgcacgcctgtagtcccagctactcgggaggctgaggcaggagaattgcttgaacccaggaggtggaggttgcagtgagcagagatcacgccactgccctccagcttgtgcaacagagtaagactttgtctcaaaaaaagaaagaatattttgcagacttctaagctatcatgcccattctgcccactgaccaccgtccacagccaaaatgtttccacacagaaagaactactgctgctccttttaaattccaaaagtcagtatcatacttgtgcttatgtatttccacagcctggtcatcatagcgagatctcatctctacaaaaaaatctaaaaattatccaggcgtggtggctcacacaggtaatcctagcacgttgggagacctaggcagaaagatcactcgaggccaggaattcaagaccaacctggccaacatagcaagaccccttctctatttttaaaaataattagctgtgcatggtgacatgagcctgtagtcccagctacgcaggaggctgaggcgggaggatcacttgaacctaggtgtttgaggctgcagtgagccatgatcgtgccagtgcactccactgaacagaatgagaccctgtatcttacagaaaaataattactttcctcatctctgttgtttgtgttgatttacactcctcttttcagctgtctttttgtttttctttcacagtcccttattcttccctcttcccttaagagagatgctttaggctgggcacggtgactcacgcctgtaatcccagcactttgagaggtcaaggtgggcagatcacctgaggtcgggaggtcgagaccagcctagccaacgtggtgaaaccccgtctttactaaaaatacaaaaattatctsggtgtggtggtgggcgcctgtaatcccagctactcaggaggctgaggcaggagaattgcttgaacttgggaggcaacagttgcagtgaaccacgattgcgccactgcactcaagcctgggcgacagtgagatgccgtctcaaaacaaaaacaaaagagagatgctttaccccttcgccactgcacctgagaacctcagcccagctcagctgtgctggagccctcctcgaggtgtgctgtggttttccctcctgctgtcatttaccccctcactgctcctcctgatggcagcaagtgcgcaaacattcccttccctgccctacaggttaggccaggtgtttataataataaactgcattattcttctgttcctcatgtttgacacacttcagaaaaatgattcccaaacattgtgtcttgtgacactccaggatctgcccaatttaagttgtgaaatcccttttagtcagaaatttttaatttcttttaatttttttaagtggcatatggcacttttctgaggagagggatggcatgatccaagtaaggtgattaaactcttaaaaataacagtattcactgtttagttagtctagtcaagtggctcctaaatcctcatttcaaaatcacatgacagctggacatagttccagtatcaccttttcccaggtaaattgttcacttggtacctgtgagtgcctgctcaatctgggcagttaatttggtctcaccctacagtgacacagatttgcttcataattatatggggcagtagagcacttaattggaagtcactgagtcacggatcctttcattcctcctgcagtctgcaagctcttgacctggggcaaggcacttaatttgtctgagccctatttgcctcatcagcataagaaggttactagtctaagagctcactaagctttatcccaactctaaaatgatgtttcacgaccggcatgttggctcacacctgtaatcccagcattttaggaggccaaggcaggcggatcaagagatcaggggttcgagaccagcctggccagcatggtgaaaccccgtctctactaaaaatacaaaaatgagctgggtgtggtagtgcatgcctgtaatcccagctactctggaggctgaggcagcagaatcgcttgaacctgggaggtggaagttgcagtgagccaagatcgtgccattgcactctggcctgggcgacagagtgagacttcagtctcaaaaaaataaaatataatgctgtttcacatgaaagtagtcttttgttttcttttggttttttgcttgtatatgtgtatatwtttttttttttttttagacagggtcttgatctgtcacctaagctggagtgcagtggtgcaatcatagctcactgcagcctccaactcccatgctcaagcaatccacccactttagccccctgaaaatagcagagactacaggcccgttccaccatgcccagctaagaaagtagtgttttaggctgggcgcagtagtcacacctgtaatcccagcacttcaggaggacgaggtgggcggatcacaaagtcaggagttcgagaccagcctgaccaacatggtgaaaccccgtctccactaaaaatacaaaaattagccagggcccggcacggtggcttacgcctgttatcccagcactttaggaggctgacgcggatggatcacctaaggtcaggagttcgagaccagcctgaccaacatggagaaacccagtctctactaaaagtacaaaattagcctggtgtagtggtgggtgcctgtaatcccagctactcagagggctgaggcaggagaatcacttgaacccgggagttggaggttgcagtgagccaaggtcacgccattgcactccagcctaggcaagaagagtgaaactttgtctcaaaaaaaaaattagctggatatggtggcgcacttgtaatcccagctactcaggaggctgaagcaggagaatcgcttgaacctgagagatggaggttgcagtgagccgagatcgcactactgcactccagcctgggcaacacagcaaggctccgtctcaaaaaaaaaagaaagaaaagaaaagaaagtggtgttttatactggaaaaagcactggagttttgtttttttcttttcttttcttttcttacagaaaaattgagtttgcatagccgggcgcagtggcttacgcctgtaatcccagcactttgggaggccgagccaggtggatcacgacgtctggagttggagaccagcctgacaaacatggtgaaaccccatctctaataaaaactaaaaattagccgggcgtggtgatgcacgcctgtaatcccagctactcaggaggctgaggtagaagaatcgcttgaaaccaagagtcggaggttgcagtgagctgagattgcgccattgcgctccagcctgggtgggcaacagagcgagattccgtctcaaaaaaagaaaaaaattgagtttgcatcgaagattgtatattagaggctgggcacggtggctcacacctgtaatccatttgggaggacgaggcgggtggatcacctgaggtcaggagttcgagagcagccttgccaacatggtgaaacctctactaaaaatacaaaaattagccaggcgtggcggtagagtcctataattctagctactcgggagactgaggcaggagaatcactcgaacccaggtggtggggcagaggttgcagtgagctgacatcataccacttcactccagcctgaacaaaagagcaaaaaaagagcaaaactctctcatatacacacacacacaaagattgtgcgttagtagctgtgtgacctggcgtaacctgcctgatgttccattctgttcttctgtaaagttaagttgtggctacttcacaaatatagtgagaaccagatgtatgtaacaagcactccaggccagtatttctcaaagagaagcatcatgagccgggtgcaggggtgcgagcctatagtcccagctattgagaaggctgaggcagaaagcttgagctcaagagttgagtacagcctatggaaaatactgagaccccctctatgttgttatttttttgagatggagtcttgctctgtcgcccaggctggagtgcaatagcaccatctcagctcactgcaacccacacttcccgggttcaaacaattctcctgcctcagcctccctagtagctgggattacaggcgcgcaccaccatacccagctaattgttgtatttttagtaaagatgggattttgccatgttggccaggctggtctcgaactcctgaactcaggtgatctgcccgctttggcctcccaaagtgctgggattacaggcgtgagtcaccgtgcccagcccccctttaaaaaaaaatacacaaacattaaaaaaagttttgtgattagaaaagattggaaaattctaagtaaaacaaaattatatttccttcttttctctgaaatttctcagagcctttcaaatcctattgtgcagccgggtgcggtggctcacgcctgtaatcccagcactttgggaggctgaggcgagtggatcacaaggtcaggcgatcgagaccatcctggctaacacggtgaaaccccgtctctactaaaaatacaaaaaattagctgggcatggtggcaggagcctgtagtcccagctactcgggaggctgaggcaggagaatggcatgaacccgggaggcggagcttgcagtgagccgagatcgcaccactgcactccagcctgggcgacagagcgagactctgtctcaaaatataaataaataaataaaataaaatcctattttgcatcatgaatctccaagagactactgcagagtggagcttttcctacgaccacagcaccctcttttccctgagcatctttaggggctgtgactggaatgctgtttggaaaaccagtcagcagtctgcctggtacacagcagaaaatgctgaagaaatgttaaatactggcaccaaatcagtcagactttaccttttctatgactgtttcattttccttatttatttttacttttatttttgagacagagctgtgttgcccagactggagtgcaatggcgtgatcttggctcgctgcaacctctgcctcctgagttcaaatgattctcgtgcctcagtctcccaagtagctgggattacaggcacttgcaaccatgcccggctaattttcatgtttttcgtagagatggggtttcgccacgttggccaggctggtcttgaactcctgaccacagcctctcaaagtgctgggattgtagacatgagccactgcgctcagcctttcctttggttttacaaataaatgtgctgctgagtttctgcaaccattttattctaacctcctctttagaaatattttaaactaataatccaaaagaaaatacctgcaccctcaaatgtgttatatgccacagtttaacgtcttaacttgtgcctccacaatctggatgaacatgttttgatgcacgccacagaggaaagcatctgtcatcactgaatatggtagaatttcttacaaatgttttattgtttgggaaagctcagctctgaccaaccccctggatttgtgcctatacaaagcaggtataattggagcagagagtaagcctgaaaatcataagagtctcagatgcaccagctcagcacaaaatcttggaacattgacagttcacaaaaacacaccaccgtgtgataacaatatcaaacattagccagatgtggtggtgcatgcctgtaatcccagctacttgggaggttgaggcaggagaatctcttgaacctgggaggtggaggttgcagcgagccaagatcgcaccatcacactccagcctgggcaacaagagcaaaactccgtctcaaataagtaaataaataaaaataataataataatatcgagctagggagagtattaacacatagtaattttcaatgctttttttctgaatttggtatttgataaggagataagaatttggcagatattgttaacgattcaactctgaaacagaagtcttcctgtccttacattagtggatcttttggatccttggaattgaagggtatcctaaaatcagcagcaagaatcattttttaaaaaatggacttcagctcattccgttaccaaatgttcaagtatcttctgtgtatcaagtgctaccatgtgctgtgccaagcactgaggagcaaaagtatgtagtctgccctcatggagcttacagcctagtgggagatagagatactgatcagaaggccaggtgcggtggctcacccctgtaatcccaggactttgggaggccaaggcgggtggattatttgaggttatgagttcaagatcagcgtggccaacatggcaaaaccccgtctctactaaaaatacaaaaattagctgggtgtggtggtggacgcttgtaatcccagctacttgggaggctgaggcagaatgcttgaaccgggaggcagaggttgcagtgaaccgaggtcacgcaccattgcactccagcctgggcaacaagagtgaaactccgtctcaaaaaacaaacaaacaaacaaaaaactaactcatcccctctcttccattctcacagcaccttcctgtctctccccatcatgcttctatattgctgtggccagagtcacagttctatcctacaacttcaatcattttattctcctgtgcaaaaatccttggctaatgaatccctattacctagaccagcagtttccaaactttttaaaacagaacacttttatgaagaaaaattctttacagattttatctgtatctgtttacaaatatctatgtaaatttatgcttatctattaaaaggggcattttataaagatagattgttttataagttcagattaataatatttacttatgaagttaatgagaacaaaggaactactgtgataaaaagaaaacttcaagctgggcacggtggctcacacttgtaatcccaacactttgtgagcctgaggcaggagaatcacttgagcccaggagttcgagactaacctgggcaacaaagagagaccttgtctctacaaaaaaaaatttwaaatgagccaagcgtggtggcatgcaactgtggtcccagctatctggaaggctgaggcaaaaggacgacttcagcccagaaggatgaggctacagcgagtcgtgattgtgccactgcactccagcctgggtgacagatcaagaccttgtctcaaaaataaaaaagatttgagatgaaaacattagtgttactcagcatcaatactaaatttctgcattttattataaaattaagcctgatccatgtagctgatcataaatctattctccatattacatctaacatgaacttctaaaattgcaaatgtaatcaccaaacctcaccacctctaaaacgcccctgactataggtcatatcattattttatatatagcccagaaagaaaacaatgctaattaaacttcgatttcagcgattttgtaagaaaaaaagtgtcccacaatygttggaatatagtgcggcaaccacctcacctccttaaaaaccaataattgggctgggcgcggtggctcacgcttgtaatcccagcactttaggaggctgaggcgggcagatcacttgaggtcaggagtttgagaccagcctggccagcatgatgaaaccccatctctactaagaatacaaaaattagccgagtgtggtggcaggcacctgtaatcccagctactcgggaggctgaggcaggagaatcacttgaacccaggaggcggaggttgcagtgagcagagattgtaccattgcacttcagcctaggtgacaagagcaaaactccgtttcaaaaaaataataataatttaaaaaataataaaaaccaataacttttcatcttctcagtatcaggacaaagctcctaccgtattctacaaagccagcatagcctggcctctgcctcgccaccctggctctccctgcttcagcagtgttggctttttttccactcacccaatcttcctgatctcaagtcaagcttcacatcctctgaggagcctttcctgaccttcttaccaaggccacaccctgcataacacactgtagaacacatgggtttctctctctttttttttaagcagactcagaagggaaagggtgtctcttcttgctcaggggccatgctaatctctgtatcgtttcaatttttagtatatgtgctggtgaagcgagcacaggtctctcttcttgatagcacttaccatggtggacatcttagttttgcttatatgtttatctgatcagtatcttttggtttgtttgtttgtttgtttgttttttagacagtctcacgctgtcgccccagggtggagtgcagtggagcgatcttggcttgctgcaacctcygyctcctgggttcatgtgattctcctgcctcagcctcccgcatagctgagattacaggcacctgctatcatgcccggctaattttttgtattttttgtagagatggggttgtagagatggcgtgagccaccgcgcccaaccggattggttagatacaactttctttttttttttttttttttttttgaggkggagtttcgctcttgtcgcccaggctggagtgcaatggcgccatctcggctcaccgcaccctccgcctcctgggttcaggcgattctcctgcctcagcctcccgagtagctgggactacaggcacccgccatcatgcccggctaatttttgtattttttgtataggtggggttgtagagatggcgttgtagagatggcgtgagccaccgcgccagaccggattggttagatacaactttctttttttttttttttcttgaagtggagtttcgctcttgtcgcccaggctggtatgcaatggcgccatctcggctcaccgcaacctccgcctcctgggttcaagcgattctcctgcctcagcctcccgagtagctgggattacaggcacccgccatcattccccaccatcatgccgggctaatttttgtattttttgtatagatggggttgtagagatggctcaagccaccgcgcccggccggatgcattagttttcttacccccaaaaaaccttttttttttttttttcccccgaggcagagtttcgctcttttcgcccaggctggagtgcagtggcgccatctcggctcaccgcaacctctgcctcctgggttcaagcgattctcctgcctcagcctcccgagtagctgggattacaggcacccgccatcatgccccgccaccatgcccggctaatttttgtattttttgtagagatggggttgtggagatggctcgagccaccgcgcccagccggatgggttagttttcttaccccaaaaaacagatacaccttttttttggtttgttttttgtttttttttttttttgaggagtttcgctcttgttgcccaggctggagtgcaatggcgccatcttggctcaccgcaacctccggttcccgggttcaagcgattctcctgcttcagcctcccaagtatctgggattacaggcatgagccaccgcgcccggcccaacagatacaactttctacctcgtaataatgtttcaaggattatatgaggtaagatatacaatttttttgcacattttcttgccctattttacatttttatcgtggtaaggtcctctcgtcccaagatgagtcttcctcctgtctaaaactgtattaaagtatctcttcagcattttttgaaaagaacaacctggccagcacggtgaaaccccatttctactaaaaatacaaaaaaaaaaaattagccggacatggtggtgtgcacctgtaatcccagctattcgggaggctgaggcaggagaatcgcttgagcccgggaagtggaagttggagtgagctgagatggcgccactgcactccagcctgggtgacagagcgcgattctgcctcaaaaaaagagagagaaatagattggcatttggctggaaaagtcgtttccacattaataccctttaaagcctctgctcccctattacttactgtcttccacacgttggttccccaaggctccctcttctgaagatggcggccaccttagcctttacagcagctcctcgagaccctataggagctaagaaccgccgggcgccgtggctcacgcctgtaatcccagcactttgagaggccagggtgggcggatcacccgaggtcgggagtttgagaccagcctgatcaacatggtgaaaccacgtctctacaaaaacatacaaaaattagccaggcgtggtggcgcaggcccgtagtcccagctacttggaggagaggtgggaggattgcttaagcccgggagtccagggtacagtgtaccgggactgcgccactgcattgcagcctgctccgctggagtgagaccctgtctcaaaaaaatataaaaaaaaaaaggctaagaagccaytggcaacatttttaatgcttttacattctgcctactgtgtcaaactaattgttcccaattagtggagcttgtttaagctgtgactaaaggatgtttttatataagtgaaataattattcctaaatatgacttttaaacacggattttgtttaaccttgtttcttttttggagggtggttrgtaacaccaagactactttattgaaagcgtaactaagagcgattgatggatacgtaaagacatagtaggcacatccatgtaatagtaccgcggtgaggagcattcaggagtgattctgccgtaatgcttaggtgtgtatctgatttatggaagataggctgtaggctgtataacccgtgtacatatatgttaggggccgaattatgtctccccccaaaaagatagttggaagtcctaacgctgagtaccacagactgtgaccttatttagaaacaaggtcattgcagatgaaattagttaaaatgagatcctgctaaagtagcatgggccccttatccaatactactggtgtccttatgtgaagacagacacacagaaagccatgtgatgatgaaggcagagattggagggatgcagcaaaaattgccaaagattttcagcaaactagcagaagctaagaagagacttcttccccttcagaaggaaggagcatggccttagtaacaccgcgattttggacttctatccccagaatcgtgagaaataaattcgtgttgttttaagccaccccatttgtggtcctttgttatgacagtcctgagtgtgtaaagctatttgtggcccacctacttgattcgcctaaatatgttagtgggaaaatagagttgcctgggtgtgttgctcgtttcacacctgtccaagcctccacctgagataaatcaccatctgtttggcacaatccccctggcctactgcttgccactggaccaaagatagacacctgactctagcgcagtgaatctaccgactgaccagcagccataggacttgggtggcctggtgtggaaagaggagccccttcttgaaaatggggacgaagccgggcacggtggctcacgcctgtaattccagcactttgggaggccgaggcaggcagatcacgaggtcaggagatcgagaccatcctggctaacacggtgaaaccccgtgtctactaaaaatacaaaaaattagctgggtgtggtggcacacgcctgtagtcccaggtactcgggaggctgaggcaggagrattgcttgaacccaggaggcagaagctgcagtgagccaagatagtgccactgcactccagcctgggcaacagagcgagactccgtctcaaaaaaaacaacaacaaaaaagaaaatggggactaagacacagaagaatatagctgtggggagtagcttcagggaactgaaataggtccagaggaagctcgaagtggccattctgaagtttatgcaaactgctggccaggagaggcgaaaaaaaaaaaaatagagaagggacatgacagtggggaaggggagataggaggggatttgttactctcactcgaggctgcaagttgcctctccacaattaatctcaccttttagtagagaacccaaattttcaggcctggcgcggtagctcacacctgcaatcccagcactttgggaggccgaggcaggtggatcacttgaggtcatgagctcaagaccagcttggccaacatggcgaaaccctgtctctactaaaatacaaaaattggccgggtgtggtggcgcatgcctataatcccagctactcaggaggccaaggcaggagaattgcttgaacccaggaggcggaggttgcagtcagctgagattatgccactgcactccagcctgggtgacagagcaaggctcagtctaaaaagaaaaaaaaaaaatttagatgggcttaatgcttcccagtaagactgcgtgtcctaacctccctggcagctaagtgtgaccttgaagctaagtattaactaaggacttttaggaggtttctttaaagggaggtggaatagggctgggcctctttgtctggctacttagaaataaaatcaagggtgagaggtaaaatgggtaataggaggcagcgtccttcccccacgcaccacaaccctgtgctggagctcccaagagcacatggcatagcagtgcattctgccattccgctgtgtaccaccctctgtcctgtcttccctttccctttctcttcagttcttcattctgtttccttttatttcttttccttcttgtgtgtctttacctaccctgcataaaaatgctggttaggacctttgggttcctcattctggttacctgttggagtgagtctgtatcctgagaaattcatggagatcaccatgattagaagtcatggctgctgagccaagcatcatagacttgaggcctagcagcttccaggggctccaggaccatcaggtgggaaggccctgggggggtccaggacagctccagcctagctccacaggggcagaagtgtaccagtgcctacttgctgctccaccacaggctaggccacttgtctcccaccacgtctctgggtttacgcgtccctcgacttttgctgcccataccaaaggctcagttctgagcctcaagttccatttcctctcacgagaggatgtgacgctctcattcagccactctgccctgtttgggagctttttcccacagtcaagccggtctattgcccatccttggatcatgtggtaggagctgatgtttttaccaccygcctctgtccatcttcttgtggttacagtgccctggttttccacaggaaagccatgcctccctcacccttattttgtatggtccaaatagtctcatatggatccaccatcctcagtgtctagtaatgcagagatgggtccactccccaatccaagccaatgaratgcttaagaaaggcgcacttcctttatccctgaacttggttgtagtgatgttaaccagggtccagcagtcatgctgtcagcaccagagacaacctacctacagatgcagccaatgtggagggacaggagccaataggtgaaagagaggtggggcctctgtggcactgtttgagcctccacagccagctaggcattaccgctaggtaagtcaataggcctcttttctttgctcaaatcaggttaagagggttttccatcacctgtaactgaaaatgtcctaactggtccaggtcaggtggccaccctggtccaatcagcagtggctggagtagcaggccagatgtcacttgcagaacaaagtgtgctcaagtcagcccttgaaatggggctgtgggacgggcagtgtgaagctgagtctttccactataaataaggctgtgcaaggccaagttaatagatgtttggagttcataaatcatggtggctgtggttatcaaattaaaaaaaaaaaatcaaaccaaaaccaccagtagcctcaaaaagcacatgattggaaatgtgagaggctgtcaggagccctggcccgtgggcaaccttgctggaagtgctgtgaccatgtgtgtgtttgaacctggacaaaccactgatgtagacatctccccagatccattcctcaaaactccctgaagtgattagatattgaatcccatgcctaagacagagtagcagtgtctgtttgctgaatgagattcttcccccaaatatggtttggatttgtgtccttgcccccatctcagttcaaattgtaatcccagtgttggaggaggggcttggtgggaggtgattagatcatgggggcggacttccctcttgctgttgttgtgatagtgagtgagttctcatgagatctggttgtttaaaagtgtgcagcacctcccccttctctctgtcttcctcctctggccacgtaagacggggccagcttccccttcaccttccatcatgattgttaagtttccagaggcctccccagccatgcttcctgtacagcctgtggaactgtgaatcagttaaagcctcttttctttataaattacccaggttcaggtagttctttatagcaatgcaagaacaggctaatacaccacccttctcaaagactgccacttctatattctgtattttaggagtcagcactatttgaggaattgaaatgaaacctaaggtaaaataaagctagcaaacaaaggagagatttgtgtagacagcctagacaagtttacattccgcattaaacacttggatttatttaacagtttcatttatgactttacagttgtttaataaatattacggcattccagctaggaagatagtatcacccctttaaacatgagaaaatcaaatgaatggcttaaggcaaaaaattcttttattagtacccaaaagtgtagactttgttattactttaaatttagaaaagtaaattttcaatagttagtggctagcaaaactggtattttttttctttttctttttttttttttttttgagacggagtcacgctctgtcgcccaggctggagtgtggtggcgccatcttggctcactgcaagctccgcctcctgggttcataccattctcctgcttcagcctcccgagtagctgggactacaggcgcccaccaccacgcccggctaatttttttgtatttttagtagagacggggtttcaccatgttagccaggatggtctcaatctcctgacctcgtgatccacccacctcggactcccaaagtgctgggattacaggcgtgagccaccacacccagccccaaaactgatatttttgtgtgaactaataaataatttagttaggtttatttagaaaataaactttaaggatttagggatttgcaaacttcagtttgaaataggtttagacagctaaagatctttggattttgtaaagagaaaattaattgaagaaagaatttaaggtaaatatgatttatgactattctgttttagatgtgaagcggtaaacaatattgggccacagattgggagtagagtgggggaaggaagacaggaagacagcagtgaggtaaaggagagtttgtaagtcattcataaccaacactacccatttagcatgatagttatgaatataccaaggccttttagaccactctgaaatgcacattgaccctctcttttaaatcatgaatttctgtttttttgtttgtttgtttgttctttgttttagctggaatctgcctctgtcacccaggctggagtgcagtggcgcaatctcggctcactgcaacctccacctcccaggttcaagcagttctcctgcctttgcctcccgagtagctgggagtacaggtgcccgccaccacgcctggctaatttttgtatttttgatagagacgcatttcaccatgttggccaggctggtctcaaactcccgacctcaggtgatccacccgccttggcttcccacagtgctgggattacaggcatgacccaccacacctgacctaaatcatgaatttctcccttaatttgtgcaaaatttagtgtacctggatttccttctgtgttcttctctatccttaagatttttcagttcagaaatattcttgtttgggatagatattaaaagatgaaactggaagccaggcgcggtggctcatgcctgtaatcccagcactttgggaggctgaggcaggcggatcatctgagttcaggagtttgagaccagcctggccaacatggggaaaccctgtctctacgaaaaatacaaaattagccaggcatgttggcgcatgcctgtaatcccagctactttggaggctgaggcaggagagtcccttgaacccgggaggcggaggttgcaatgagctgagattacgccattgtactccagcctgggtaacgagagcgaaactccatctaaaaaaaaaaaaaaagacaaaactggtaattgggaggatgaaaaggaagtaaaacaggagtaagaactttgcattgcggccccagggggttgtggtggagggaaggaagcggaagcaggtacctgagaccataggactgtacttccatgggacatgtatgatccaggtggatacaagccaggtcttgatgcactgctgtgtttaaggtgtgctgtgagctaagcctctgcagcatagtttatgctcgtcctacccccttgtaaaaattatcttttcaactcgcccattgtcacctctatccttcattcagcctttgcttatgctactcctccacttggaacacgctttccccaatctttgcctagtcattcatcctgttagatctgcctgcatctctgccaagaatccccttaacttggcctttttcaggagtgagtttgaggagaaagcttaggaaataataagccaaatttttgtgtcttaaacatccagttaactctggatagtgacagccaacaacatggagtcataaaagcaaaggtaaaaacttgaataagcaacaagacattgaagaaaatatctcgacatgatcagcaacaggcaacatcagtttcttagcatctcttaaagactgatagaggagagacaatttcttttctagcaaacaagagatggtgaatggaaattagcctcttctaatgtaagctgtgtagactaaacactgtaagagcctaatgttcagcgtgcacatggtcatgaatccagcttttagtacaatgccaagcacagtgtgaactcagtacatatttgttgcattaataaatattagtcctatttgctgttggattaaaagcaagtatagaagtcaggcgctgtggctcatgcctataatcctagcactttgggaggctgaggctagtggatcacctaaggtcaggagttccagaccagcctggccaacatggtgaaatcccgtctctactaaaaatacaaaaaattagctgggcatggtggcaggtgcctgtaatctcagctacttgggaggctgaggcaggagaatcacttgaacccgggaggcggaggttgcagtgagccgagatcacaccattgcactccagcctggacaacaagagcgaaactctgtctcaaaagtaaataaataacaataagaagcaagtatagaatacaaaaatggcacaaagcaaggaagtaaggcaggaagggttttatgtaggttgtgactatatgatatgaatctcaaaagttatattttacagagtaaagaagtagggagctggaataattctaggcaggagggattcattttagcagtcagtgaattgtgatactatagttgggaagtacagtgatgtgctgaaatgtagggcatagtcagtggctagtatgagatgatgctgaaggagagatggacaggggtcactccttggccttctatgccaccccaaggatttgggccatggggaagaaaaagggatcacatcgacaccagcatcttagtaagcagcctttggctgctgtgtagaagattgcttggatcagtttaagcccatggaggcagagagctttcttattagattttgtcatgatcctctaaagtaccacggagttgaatgtcaagttatattaaggaagtgaaatcaatagaatttagtcatggagttgatattttgtgatgatagaggctaagaaagtctagaatgactcaactagtgccaccaaaataaggaatacaggaagtggactaggtaggtttcaaagggaagatgatgagatcagttttttatagctgagtataaactgcccctgtggattacaggtgggtgtgcacagtaagcagctgcataatttagtaggattcaacatcaagagtgaagatacagattttgactctgcagcactgaaaaccatttggattagattacctagacagaggagggatgtcactaaggacagagcttcaacatttagaagtcaggctgggtgtggtggctcacgccattaatcccagcactttgggaggccaagacagaaggttcattgagaccaggagttcaagagccgcctaagtaacataacaagaccctttctctacaaaaaaaaaaaaaattatgtttttaaaaataaacatttaagaagttaaggcagaggaacacttgtgtccccacatttacatgttctttttacttttggggagaaatgtacatcattgatattggtgttctaatctacacaagttatttgaggttgggttaaatatttttcattgtaagtaacgaattgcttttagagcaggaacagtctgaaaaaacagtgttggtaaaggcatgggaaaaggcctcctctgtgtgatgtcccaaggagtgtaaattagtacattcttcctgtggcagaaaccattagttgcccccaatatccattttctcttttccttagtaaacaattatctgacttttagccgaacacttgggctttagagaaaaaaaaaaaaaaaaaagacttcatttctcatcctcccttgcagctacagttagccrcatgactaaattctggccaagggaatggcagtggaaggggtgactgtgactacacagaagagtctgtgagagttggacccttttcatctcttcctccttcctactgtctagaatgcagattctgtggctaggacttcagcagctatctggtaccacgcaaaagcagccaaattctgaaagtgacggaaaacccaaatggaaaggggcctggttccctgggttatggactgcctactgcctctttattttattttattttattttttatttttttgagacgaagtctcattctgttgcccaggctggagcgcagtggcatgatctcagctcactgcagccttcgcctcccgagttcaactgattatcctgcctcagcctccctagtagctgggactacaggcgccggccaccacacccggctaatttttgtattttttagtggagacggggtttcaccatattggccaggctggtcttaaactcctgacctcgtgatccgcccgccttggcctcctaaagtgctgggattacaggcatgagccactgcgcccagcctcaggatgcctcttttttttacataaatgcctgtctgtataagccacccttttggatgttgtctcattcaactggacctagttctgtctgatgtgcttcccaaagacagcttagcaatgttttgtcaagtgtaacgtgtgcacgtcctttattctggcatcccacctcagggaatttaccctaaggaaataattacacaaatagggagtggagaagagtaaaataaaagtccttcaaagaaaattggttaagtaaattaaaattatgtaaaaaggaacactgtgaagccactaaaaataatgatgctatatttagacatcacatgaatagatgtctgtgacactaaagtataagaagagattatagacaagcatgtttagaattatcccattcatgtaaaatgtatacacacacacacacacacacacacacacacacagattaatctgtrtaagtatatagatgctgagaaatacttggtagatgtctataagtataaaaatattccaatattctttgccaggcatggtggctcacacctgtaatcccagcactttgggaggccaaggcgggcggatcacgaggtcaggagattgagaccatcctggctgacacggtgaaaccctgactctactaaaaataccaaaaattagccgggcgtggtggcgggcgcctgtagtcccagctactcgggaggctgaggcaggagaatggcgtgaacctgggaggcggagcttgcagtgagccgagatcgtgccagggcactccagcctgggtgacagagcgagactccgtctcaaaacaaaaacaaaaacaaaaacttgtctctggaaaatgagacacattagatggcagccaactggaagaaattttacattaacttgtctcaggaaaaattaatcatagcatgtagcttcagtgcctccagcagccaccctgagctctaggacaggggacactggcccaggggagctgacaagagcagtgagaccaggagcttgctttaaaatcacagcccaggctgggcgcagtggctcatgcctgtaatcccagcactttgggagcctgaggtgggtggatcacgaggtcaggggttcgagaccagcctggccagcatggtgaaaccccatctctactaaaaatacaaaaattagctgggcatggtggcacgtgcctgtaatcccagctactcaggaagctgaggcaggagaatcgcttgaacccaggaggcagaggttgcagtgagccgagatcactccacggcactccagactgggcaacagagcaagactccatctcaaaaataaataaataaataaaatcacagcccaaagggaaaagagagagctgagtgcaggatagtgagggaggaatgtgaggtatggaggtaaagtaagttctgtctaaggtcagaaatgtcaaaagacaacattacaacaaattttatcatagatctaattagctattattcgcaattcatgagtcaggtcagcctcctttccacagaacggaatgagagctcccactgagcaatggccgaacagtgggttttgtaggatggaaaacaaggaaacagaacaatagggaaaaaaatcatattggttaacacaggttacttcaggctactttttttttttttttttttttgagacagagtctcgttcagccgcccaggctggagtgcagtggggtgatcttggctcactgcaaccactgtcttctgggttcaagtgattctcctgtctcagcctcccaagtatctgggattacaggcatgcgccattatgccccactaattattttattttattttattttatttttgagacggagtctcgcactgttgcccacactggagtgcagtgttgtgatcttggctcgctgcaacctccgcctcctgggttcaagcgattctcctgcctcagcctcccgagtagctgagactacaggtgtgtgccaccacacccggctaattttttgtatttttagtagagacagggtttcaccttgttagctaggatggtctcgatatcctgacctcgttatccacccacctcagcctcccaaagtgctaggattacaggcgtgagccaccgcgcccgtcccaggcaacttttttttcttctttttttttagacggagtttcgcttttgttgcccaggctggatttcagtggcgtgatctcggctcactacaacctccgcctcctgggttcaagtgattctcctgtctcagcctcccaagtagctgggattacaggcacgtgccaccatgcctggctaagttttgtatttttagtagagatggggtttcatcgtgttggtcaggctggtcttgaactcctcatctcaggtgatctgcctgccttgacctcccaaagagctgggattacaggcgtgagccgccgcgcccagcccaggctacttttttgtaaagcattaaagcagaaaggacttccttatgatgcttactcaggtagactggaatctcctgatttcagggaaaatcgatctgctttgggatctatcttctcccttaaagtttcagttggatgatggggcatttagaagaagtgattccattttagttggtctgctctcttggggcctagtgcaggagcacaggccaaaacaatggtctcccataattttgtttaactgaagtcagcaagtggaaacaaggaaagatctagattatatgacttgtcaagtgattgcaagtgattttgctcaattccaatttagcttaaacacaaaggaccctggaatgctttggccatttgagcctgagaatgaaacctcataaatattgacacgaaagctctcgccaagttttgcactgtggtcatggctataacttrgtgaaaaaaaaattttgcatgaaatgttttatttaaactttttttcaagaaaatgtttttttctccctaacagaacatttcataagttattttaattactgtatctaattttttttaggcattgctttattttaaattgtatgtttgaaaatttataactatcataaccagactgcaggccaaacaacttcaggtttggtggagaaggacattcccttgaattttctcctcttcttttccctctagtttctgcttttctcccttaaatcctcttcattccttgccttaggggagtttcccaagacaacaccttgagatgcaagagtttaggagttttaaatttcaaaagcccaaacattgggtagaggcttaaagtttaagacacagataatagaatggttagaatatgcagagtccatctctgtattctctaatcaagcaaacatctcagattgcaagagggagaagatattytcagagaatgaggttagatactgctgtttcccatgaggcatcctcagctttcaatcaagttggggagtgaaagtcagtaaaccagtggctgagcaaacctccgccccgacctttctcacagggccacagatgaatgggagagccagccgagaaatctaaagtgcctcgcatccccagcagtttgctaaaggaggtagtggctggacaggttaagacaccctcccagccccccagcctcctgcagtactcagggaaccatyaggcaccttattctgcagccaccagtggggcagtgttgccaagagggtaccaggaggagaatcctgcagccttgagctgtgcaactgataacgaactacagatgggatggacgccatcttacctgatgctggccagtagatcatgacatggagaactccccgctattcctgagaaacttggactttgactcaacagagaggtgagggaggtgccaacgtgaccaatatttggttttaggaaacattttctcgggttgggatggagagagatgtttttccctgtttactgtgttcattttgccatgtgcatgtattgcctatttgaaaagaaaacggccgggtgcggtggctcacgcctgtaatcccagcacttygggaggctgaggcgagtgaatcacctgaggtctggagttcgagaccagcctggccaacacggcaaaacccaacctctactaaaaacacaaaaaattagctggacgtggtggtaggcgcctgtaatcccagctacttggaaggctgaagcaggagaattgcttgaacccgggaggcggaggttgcagtgagcggagattgcgccattgcactccagcctgggcgacagagtgagactctcaaaaaattaaaaaaagaaaagaaaaataaaataatattcagttagaaaaaaaaatttcttggcaggtgtggtggctcttgcctgtaatctcagaaccttgggaggccaaggtgggaagatcgcttgagctcaggagtttgagaccagcctgggcaatatggcaaaacctcatctctaccaaaaattaaaaaaaaaaaattggccaagcatagtggtacatgcctgtagtcccagctactcagaggctgagttgggaggatcacttgagccctggctgcagtaagctgagatcatgccactgcactccagcctggatgacagaatgatatcttgtctcagagaaaaaaaaaataaaaaaagattttttttttcaagaggggaaggagagaggagggaaaaggagaacaagaaaaatttatttcttgcacatctttgttagtgaaatgagaatcctgtactaccttagtataacagtaaaaatttaaagtattgaaagccattgattcatcttttacaagtcaacgtaattatttctttttttttaaattttaaagacagagtccattctgttgcttaggttggagtgcagtggcgtgatcacagcccactgcagccttgaactcccacctcaagggatacatatgcctcagccttccaagtagctgggactataggcatgtgccatcacgccagctaatttatttatttttgtagagacggggtcttgctttactgcccaggctgctttcgaactcctggcatcaagctctttttccacattggcctctcaaagtactggggttataggtgtgagctaccacactcaaccttatttaattgataactttgttgactcaataggtaaatgaatgatgcaactgtcattacaaaccctttggatttttttttttttttttttgagacagagtctcactctgcttcccaggctggaatgcaatggcccaatctcagctcactgcaacctccgccccctgggttcaagcaattctcctgcctcagcctccctagtaactgggattacaggcatgcgccaccacaccctgctaatttttttatttttagtaaagatggagttttgccctgttggctaggctgttctcaaactcctgacctcaagtgatctgcccgcttcggcctcccaaagtgctgggattacaggcatgagccactgcacccggccttttttttttttttttttttttgagacgggagtctcgctctgtcacccaggctggagtgcagtggcgcgatctcagctcactgcaagctccccctcccaggttcacgccattctcctgcctcagcctcccaagtagctgggactacaggcacccgccatcacgcctggctaattttttgtatttttagtggagacggggtttcaccgtgttagccaggatggactcaatctcctgacctcgtgatccgcctgcctcggcctcctaaagtgctgggattacaggcgtgagccaccatgcctggcgttttttgtttgttttttttttgagacagagtctcgttctattgcccaggctggagtacagtggcaccatctcggctcactgcaacctctgtctcccaggttcaagcaattctcctgcctcagcctcccaagtagctgggactacggacatgcgccaccacgcccggctaatatttttgtatttttagtagagacggggtttcaccctgttggtcaggctggtcttgaactcctgacctcaagtgatctgccttccttggcctcccaaagtgttgggattacaggtgtgagccaccgcgcccagcccgatcaccctatttaaaattgaaccctcatcccctgcccagcactttttatcttttccttgtttatttttcttcacagcatttttcagtaacacactatgaaatatgttggccaggcatggtggcttatacctgtaatcccagcactttgggagactaaggtgggcagattgtttgagcctgggcaatatggcaaaaccctatctctataaaaaattagctgggcatgctggcacttgcctgtagtcccagctacttgggaggctgaggtggtaggatcccttgaatccaggaggtcaaggctggcgtgagcyctgcttgtgccactgcagtccagcccgggcaacagagtgagaccccgtctcagaaaaaaaaaaaagagagagaaatatgtttacttgttttatgtattgtctacctcccttttctctccctcatcaaagaatggaatccccatgggagtcgggggttttgtctgttttgcctaaaacaatgccctctgtgtttgtggaatgaatgaaatactatgattgctcaagcacaccattcgaactcctatcaaatttaagtacaaaacccatctaattccaaacataaataatttgtggattggcatcatatggattatgaacaccactcattctctacattatcatggccaatgaaaagttaaggctttctgtcattcctataaggtcacatgtttaacaggtttaacaggtttatagactgtaggaccaaatagacctggattcaggtcccactgagcagtgaatggttgagggcaagttcttctaaacttccttgcatcttgctttattcatctttattcatcccagcaccacaatcctaattaacctcttagggttgttgtaaagattaaatgggattcagtccaaagcactctgtacatgtcacatgttagccactcagtaaaatctattcttacaattatcattttgggagctgtattagttttctcaggctgccataacaaactgccatagactcgatgacttaaacaatagaaatgtattttctcagagttctggaaaccggaagtccaagattaaggtgttggcaggtttggcttctgccgaggcctctctccttggctttcagatgsctgacttcttgctgtgtcctgccatggtcttttctctgggcatacacattgtcggggcaaagggaactttcccatcaccctctgaaggttccgtaatttgagtctatgaaatgaactgactgtaaacagattaacaatagaaaaggggcatcacaagaaagaaaatatccgcaaagcagtgagatttagaagcttatatgctctcatcacagggtagagggaaggagggatgcagatagcttaggggagcataaatgatttgagggagagaaagaatgggccagaagaacaggtgacaactcgtgacaaagtctgtccggatatttgatgttaacctttggtcttctttcctgtggtaagtcagtctccctacatgatgggattcttgtggagggggatgcaggacaattgagttctttctgaaggatctcaaggcagataagggaaattcagagaatgcctctcactgcactttgggagagaaaaagggacaagagacagaaggccaggaaaaggtcaaagagactagttctcctttagttcaaagcactcagcgccaaacctcatgaggtggggtattgttttctaagccccaacaacacccctggggtctcttccccttattctaagaaccccagtcctattgaattaggattatacccatatgactttatttaatcttgatatccttcttacaagtcttatctccaaataccatcacactgggggttaggacttcaaagtatgtatttgggagggacacagttcagttcctaacaggagtggaggaagatttcagaaaactatatccaattttgttatgtttaataattttagaatatttaattccaagaaacacaagtgctttagtggatattcttttcactagcagataggcactgaaaagggcatagatgcaggcatcccgcagcaggaagaaaggaarccacacagtaaagagggaaatgttacatatgcagagagactgaaggaggcacagaaatcaaactatgaagtaggccgggcacggtggctcatgcctgtaatcccagcactttgggaggccaaggcgggcaaatagcctgaggtcggtagtttgagactagcctggccaacatgatgaaaccccatctctactaaaaatacaaaaattagcttggcgtggtggcgggcgcctgtaatcccagctactcaggaagctgaggcaggagaattgcttgaacccgggatgcggaggttgcagtgagccgagatcgcaccattgcacttcagcctgggcgatagagtgtgactgtctccaaaaygatacaaaacaatgaggtgaccatttctgagtgataggactctacctgaggatgcatttgaagcaagcagtaatagggaatgagtcaataacaagaagaaattaagaagctctcactgttgagagaaagggacgagagagagaaaaattgtgtctctgatagcaaatgtttgtctgatccaaagttaactgtcagcttctcaaccagctggacctggcatttccctcattccccgccaggagattagacactaacagagttccttctagctgtgccctcaagaaacttgggcaaaatttttaaaataaattttttactactagattacagttttgtaccagaagtagaagtatagacaccttcaagttgtaaatagtaactttttgaagaagcagcttgtaggcttagagtcaggtatatcccaagatgaatttggtacagtggaaccacagacacttgggggctttgtaccttcttagtcactttgcctgcccatatctgggaaggttttggaaacaggattccaggttgtattattttttcagaggtttgttctggaagataacattgtactaatgcaaattaaaaaaaaaattttttttaaaaacttyacttccatctgtttgacctttacaattttttttttgttcttattgtttacagagagctctgactttctttttttttttttttttttttttttttgagtcagagtctcactcactctgtcatccaggctggagtgcagtggcacaatctcagctcactgcaacctccacctcctgggttcaagcaattttcctgcgtcagcctcccgagtagctgggactacaggcgcccgccacggcgcccggctaatttttgtatttttagtagagacggggtttcaacatattggccaggctgatctcgaactcctgaccttgtgatctgcccaccttggcctccctaagtggtgggattacaggcgcgagccaccgcaccctgccgagggctctgaatttctttgaaagttttagcacacttatctgcagacaccttgagtgttttggggtcaggcctctataaagtatgtgttagaattgttggtgtggcattgactcaccccgtccctctgcacttgggagtgatgtctcacggtgtcccgctgcaagagtggatctgagcttcttcccataaagcttagggaactatgactacattctcgccctgtatgtaaacaaattccagtaataagttaatgggagaggaaactaaaaatgttcctggtactgtgctaggcatgtttacatgtatcatttcatttccatcctcccaaaacattgtgaccaaggcattattatctctttgacactgaagaaacagatgatgaaactcacccaaggtcacccagttagtaagtccttgggccggaatgtccctctaagtccaaaactgcttggatgctctcaaagtctcctttgttccttcacactgtagaacacagtgacattccattcacttaggttatccatcttgtagcctcctattgcttatatgacttttttttctgaatcgtaagtacccatgttagattttgccctcattttcttttttaaaataatttttaatttttaataaaaagaggtggaatcttgctattttgcccaggctggtcttgaacacctggcctcaagtgatcttcccatgttggtctcccaaagtgctgggattacaggtgtgagccactgagcatggcctccctcattttcttttggaaagattttgaccattggtatttatactttacttacgtatcctccttcccttgtgcaaaatcttgtgcaagttttgctttcagaaaacctgcctaatgtgagattgtgtctgaggtgtaaacatccaagtttttatgcatggtgaggagaaaatgacagcaatcatgaattctccagtttgctttattgtaatagaacatttttctataaagaatattgccaaagtaggctgggcgcggtggctcatgcctggaatccgagcactttgggaggccgaggcgggtggatcatgaggtcaggagatcgagaccatcctggctaacatggtgaaaccccatctctactaaaaatacaaaaaaattagctgagcgtggtggtgggcgcctgtagtcccagctactcaggagactgaggcaggagaatggcgtgaacccaggaggtggagcttgcagtgagccaagatcgtcccactgcactccagcctaggcaacagagctagactccatctcaaaaaaaaaaagaatactgccaaagttacatttctggatctgaagacctaggagaggaagcaaaatgaataactaccatctctgttgaagtgtacagttaaaataacagcttctaatcagtcaactctaaagttctaatttcagggtttcagcctgataataaggatggtattgaaagcatgcataatgattcttagtgtgggggtgctatccctgtttcctgtacccttttctgaaatgaatgtgatattataattatttattattattaaaatattatagtattactttggcatttctcatatccatctagaatttatttatttatttacttttatttatttatttttgagatggggtctcgctctgtcatccaggctgtagtgcaatggtaagatcatagctcactgcagtctcaacctcctgggctcaagtgatccttctacctcggcctcctgaggagctgggactacatacaggcccacggcaccacacctgggtaattttttatttttgtagaggtggggtgagctgtgttaccctggctggtatcaaactcggaggctcaaaccatcctgccaccttggcttcccaaagtgctgggattacaggtgtgaggcaccatgccggtcttttttttttgggcgggggggcggtggtgttgggatagggtgtcactctgtcgcccacacagcagtgcactggtgccgtcatagctcactgcagcctcgaacacctgagctcaagcaatcctcttgactcagcctcattagtagctgagactacaggcatgtgccgccatgcctggctaatttttatttttactttttagttttttgtagagatggggttgcgctgcattgcccaggctggtctcaaacttctagcctcaagccaccccaaagtgttgagccacaacacccagcctagaatttatttttgagtgtcgttggaggtagcagtttaaatgtattccttttaggctgggcgcagtggctcatgcctgtaatcccagcactttgggaggccaaggcgggcggatcacctgaggtcaggagttcgagaccagcctggccaacatgatgaaaccccaactctactaaaaatacaaaaattagctgggtgtggtggcgggcaccataatcccagctattcaggaggctgagacaggataattgctggaacctgggaggcagaggttgcagtgagccgagatcaccgccattgccctccagcstgggcctcagagcgagactccatctcaaaaaaaaaaaataaatttattccttttagatggatggcttatcatgttaatactatttattaagtaaatcatcctttcttcccaatttgaaatactaccttttccatatatacctgaagatactggtgaactcttccaccaatatatttgtttattatatacaaataccatgctaatttataatagccttatattactttctaatatattgcaagacacaattttttttcccaagattttcttggcaattttcacacactattttattttatttttttcatttttgagacggcatcttgctctgtcacgaggctggagtkcagtggtgcgatctcggctcactgcaacctccgcctcccaggttcaagygattctcctgcctcagcttcctgagtagctggaactacgggcgcatgccaccacgcccagctaatttttgtatttttagtagagacggggtttcaccatgtcggccacgatggtctcgatctcctgaccttgtgatccgcctgcctcggcctcccaaagtgctgaggttacaggcatgagccactgcgcccagccacatttattttactacatgaatttaaaataattttgtcctctttccccgaaaaaggtgaattttgattggctttgcattaggtttacatattcatttgggaaggggtagtttttttaaaaaggaaattaaaattttaatcttagactataaaatgcctctcaatttgttcaggtattggctttagggccatcaataaaattgaatagttttaaaattaggtttttggccaggtatggtggctcatgcctgtaaacccagcactttgggaggcagagctgggccaatcacatgaggccaggagtttgagaccagcctggccaacatggcgaaacctcatctctacaaaaaacacacaaaaattagctgggcacagtggcatgcgcctgtaatcccagctaccagggaggctgatgcatgagaatcacttgaacctgtgaggcagaggttgcagtgagccgagattgtgccactgcastccagcctgggtgacagagtatctcaaaaaaaaaaaaaaattaggttttatactccttatgttatttatttttaggtattttattgttttgaactgttgcaatgtagggtatatttcttcccatattcattttctaactacttataaataattagataatgaataaagttaatttcggtatctttttttcttttttttgaaaccaggatcttgctctgtcattaaggctggagtgcagtggtgtattcatagctcactgcagcctcaaactcttggactaacgcaatcctcctatttctgcctcccaaatagctggcactacaggcatgcaccaccacacctagttgatttttattttattttattttattttattttattttattttattttattttattgtagagatagagttgcactgtgttatccatgctagtctcaagctcctggccccaactagtcttcctgcctcagcctcccaaagtgctgggattacaagcatgagccactgcactcagcagccttggcatttatttatttatttatgagacggagtttcactctgttgtccaggctggagtgcagtggtgcgatctcggctcacttcaacctccgcctcctgggttcaagcgattctcctgcctcagacttccgagtagctgggattataggcatgcaccaccacatctggctaattttgtatttttagtagagacagggtttcaccatgttagccaggctggtctcaaactcctgacctcaggtgatccacccatcttggcctcccaaagtgctgggtttacaggcctgagccaccacgcccagcttcatcattcttttttagggtagcacataactgagtactcctttgtgaggttatgtcaaagttcattcattcagtcccctattgcttgacccaggttgctttttttttgagatggagtctcaccctgtcgcccaggctggagtgctgtggcatgatctctgtttgctgcaacctccgcctcccaggttcaagcgattcttctgcctcagcctcctgagtaactgggattacaggcacctgccaccacacccagctaattttcgtatttttagtagagatggggtttcaccatattggccaggatggtttagatttcctgacctcgtgatccgcccacctcggcctcccaaagtgctgggattacagatgtgagcgaccgtgcccggccccccaggttgttttttttagcttttgccagtaatacctcaatgaagaaacttatacatgtatcctttgcatttcttttttctttttttttttttttttcgaggcggagtctcactctgtcgcccaggctggagtgcagtggcgtgatctcagctcacggcaagctccgcctcgtgggttcacaccattctcctgcctcagcctcccgagtagctgggactacaggcgcccgccaccatgcccggctaattttttgtatttttagtagagatgcggtttcaccgtgttaaccaggatggtctcgatctcctgaccttgtgatctacccgcctcggcctcccaaagtgctggaattacaggcgtgagccaccgcgcccagcctatcctttgtgtttcttatgtgtggcactgttgtctgtagtatgtaatcctatgaatggaattgctgagtcacaggatgaaagcatccataattttattagattatgccaaatttccctccatacattttgtaccacagtggtgagttcctgtttccccagatccttacaaatggagtgtgtttttattcttttggattttgctagtctggatggatgagaaataatatttcagtatgattttaatatgctttactattatgagtaaaattgagcatctttttatatgtctatgagacttgtgaattttttttttccctgtgaactatttgttgatatttttctctctttatacaaactctttagggagattgcctgtttgtctgtaatgttaattgcaaatgtttttcagtttatcattattttattttttactttgttttgatggtttttgttttcaaatcacatttgagatatgcttttaatacagtaaaaatcactcttttcaggtggcatgaatttaaaaaaatgtataaccgccatcattatcaagatacagactatttccatcaacctgaaattgtcctcatacctctttgtggtcagtttcctcttccatccctaattctttggtatcattgatctgatttctgttttttctttgttaacatgccgtaaatggaatgttatgtatggaacatagcattttctgtctggcttctttcacttatcttaatgctttgagattcaactgttattgcatgtatcagtatttctttttgtttctttgtttttgagacggagtctcgctctgtcacccaggctgaagtgcagttggtgcgatctcggcttaccacagcctccacctcccgggttcaagtgattatcctgcctcagcctcctgagtagctgggactacaggcacctgccaccacgcccgattattttttgtatttttagtagagacagggtttcactgtgttggccaggctggtctcgaactcctgacctcgtgatccttccgcctcggcctcccaaagtactgggattacaggcgtgagccaccgcgcccggtgcgtgtatcagtatttctttttattgttgagtaacattttgtcatatggatgtacttaccygtttaccagttgatgtttgttttggttatttccagtttggagctacgatgaactaagctgctttaaacatttctactataaaggtctttggagatttttccatggaataagtttttatgtttatttagtagagtttatcagtctttctttgattgtttctggattttgagacacagtttgaaatatgttaaaggaattcaccatttttttccatctaggacttatatggtctgattttttaatacgcagaccctttctttcttccttcctttttttttttttttttgtagagatgagggtcttactatgttgcccaggctcgtctcaaacacctgggcccaagttcccacttcagcctcccaaagtgttggggttacaggctgagccactgcacctcgcctatatgctgatctttgatctacttgcactttttcctggcgtgaggcatgaatgaattttctttttttttcttttttatttatttattttttatatatttatattcttttattatactttaagttctagggtacatgtgtacaacatgcaggtttgttacatatgtatacatgtgccatgttggtgtgctgcacccattaactcatcatttacattaggtatatctcctaatgctatccctcccccctcccccaaccccacaacaggccccagtgtgtgatgttccccttcctgtgtccaggtgttcacattgttcagttcccacctatgagtgagaacatgcggtgtttggtttttttgtccttgcaatagtttgctgagaatgatggtttccagcttcatccatgtccctacaaaggacatggactcatcatttttatggctgcatagtattctacggtgtatatgtgccacattttcttaatccactctatcattgttggacatttgggttggttccaagtctttgctattgtgaatagtgccacaataaacatacgtgtgcatgtgtctttctttatagcagcatgacttacaatcctttgggtatatacccagtaatgggatggctgggtcaaatggtatttctagttctagatccctgaggaatcgccatactgtcttccacaatggttgaactagtttacagtcccaccaacagtgtaaaagtgtttctatttctccacattgtctccagcacctgttgtttcctgactttttaatgatcgccattctaactggtatgagatggtatctcattgtggttttgatttgtatttctctgatggccagtgatgatgagcattttttcctgtgtctgttgactgcataaatgccttcttttgagaagtgtctgttcatatcsttcgcccacttgttaatggggttgtttgtttttttcttgtaaatttgtttgaattctttgtagattctggatattagccctttgtcagatgagtagattgcaaaaattttctcccgttctgtaggttgcctgttcactctgatggtagtttcttttgctgtgcagaagctctttagtttaattagatcccatttgtcaattttggcttttgttgccattgcttttcgtgttttagaaatgaagtccttgcccatgcctatgtcctgaaatggtattgcctaggttttcttctagggtttttatggttttaggtctaacatttaagtctttaatccatcttgaatttatttttgtataaggtgtaaggaagggatccagtttcagctttctacatatggctagccagttttcccagcaccatttgttaaatagggaatcctttccccatttcttgtttttgtcaggtttgtcaaagaccagatggttgtagatctgtggtattatttctgagggctttgttctgttccattggtctatatctctgttttggtaccagtaccatgctgttttggttactgtagccttgtagtatagtttgaagtcaggtagcgtgatgcckccagctttgttcttttggcttaggaatgacttggcaatgtgagctcttttttggttccatatgaactttaaagtagttttttccaattctgtgaagaaagtcattggtagcttgatggggatggcattgaatctataaattaccttgggcagtatggccattttcacgatattcttcctacccatgagcatggaatgttcttccatttgttggtatcctcttttatttcattgagcagtggtttgtagttctccttgaagaggtccttcacatcccttgtaagttggattcctaggtattttattctctttgaagcaattgtgaatgggcgttcacccatggtttggctctctgtttgtctgttattagtgtataagaatgcttgtgatttttgcacattgattttgtatcctgagactttgctgaagttgcttatcagcttaaggagattttgggctgagacaatggggttttctagatatacaatcatgtcgtctgcaaacagggacaatttgacttcctctttccctaattgaatacactttatttctttcccctgcctgattgccctggccagaacttccaacaccatgttgaataggagtggtgagagagggcatccctgtcttgtgccagtttccaaagggaatgcttccagtttttgcccattcagtatgatattggctgtgggtttgtcataaatagctgttattattttgagatatgtcccatcaatacctaatttattgagagtttttagcatgaagggctgttgaatttcatcagaggccttttctgcatctattgagataaacatgtggtttttgtctttggttctgtttatgtgctggattatatttattgatttgcatgtgttaaatcagccttgcatcccagggatgaagcccacttgatcatggtgataagctttttgatgtgctgctagattcggtttgccagtattttattgaggacttttgcattgatgttcatcagggatatttgtctaaaattctctttttttgttgtgtctctgcccggctttggtatcaggatgatgctggcctygtaaaatgagttagggaggattccctctttttctattgattgkaatagtttcagaaggaatggtaccagctcctccttgtacctctggtagaattcggctgtgaatccgtctggtcctggactttttttggttggtaagctattaagtattgcctcaatttcagagcctgttattggtctattyggagattcaacttcttttttcaaatggccacccactggttcctaaatcatttattcctaaatcaatatttttaatctgatttgagaagttctattttataattatttatatttaattagtattaaatattataatattcaattaaagttatgaattaaaaatgtattttcccttaaactttcaacacacaacttacaaacctagtaaattcaattataaatcaaataattttgtgttaaaacttaaaactcttattttcattgtactttgattgtttaattatacatttgacaaattaaaatctcaaacatttatgcactgttcacaaacttaaactgtcttaaacatataaagacacaaaacttatatatctagcaaatttaattctctgaaatttttkttttgttttgttgagacagggtcttgctttgtcacccaggctagaatgctgttgcaggaataccactcactgctgccttgaccttcgggcttcaagcagtccccttgtctcagccccactacaagctgggactacaggcgtgtgctaccatgcctggctaatttttgtattttttgtggagatggtatttcgccatgttgcccagggtggtctcaaactcctgatctcaagcagtctacccaccacagcctcccaaagtgctgggattacaagcatgagccaccatgcccggccaaattattattattattattttttgaaatggagtcttgttctgttgcccaggctggagtgcagtggtgcaatctccactgagtgcaaccactgactcccaggttcaagtgattcttatgcctcagcctcccgagtagctgagattacaggcgtgcaccaccacatctggctaatttttgtgtttttagtagagacggggtttcaccatgttggccaggctggtctcaaaytccagacctcaagtgggatccagccaccttggcctcttaaaggcatgagccaccacaccaggctcaaattatcttaaatttatataccccttataaacttgagtaaattctgttaagcatttcagtctataatcatgaattgaatatatttaattttctcaagcattaccaaaatctaaagacgcataattagaattctaccaagatcaaacaaagttgttttttttttcttttttgagacagggtcaccctctgttgcccaggctggagtgcagtggcacaatcaacagctcactgtaaccttgacttcccaggctcaagcaagcctcccacctcagcctccctagtagctgggactacagctggaggccaccacactcacaaattaaaaaaaaaaaaaaaaaattcaggccaggcacggtggctcacgcctgtaatcccagcactctgggaggctgaggcgggtggatcacgaggccaggagattgagaccatcctggctaacgcggtgaaaccctgtctctactaaaaatacaaaaaattagccgggcgtggtggcacatgcctgtagtcccagctactcagtaggctgagacaggagaatcacttgaacccaggaggcggaggttgcagtgagccaagatcacgccaccacactccagtctgggtgacagagactctgtctcagaaaaataaaaaataaaaataaaataaaattgataaattggactttgtcaaaattaaaaacttttgctctgtgaagaccctgctaagagatggaacagaatagcagaaaatatttgtaaaccacatatctgacagaggattagtatttacaatatataaacaaacaatcttgttagaaaatggacaaaagacattaagaggtatttcaccgaagaggatatatgaatggcagataaatgcatgaaaagatattgaacaattaaaatcacagtgaracagcactactcacctatcagaatggctaaaataaaatagtgacactaccaaatgctggtgaggacccagagaagctggatcattcatatactgctgataggaatgtaaagtgcccattaccattttaagtgccaacattttgacagtggcaaaaaaaactaaatattcagctaccatatggcccagcaattgcactcctgggcatttatcccagagaaatgcagacttatattcatacgaaaacctacacacaaatgtttataaaaactttatttggggccgggtgcagtggctcacacctgtaatatcaacactttggaaggctgaggtgggaggactgtttgagcccaggagctcgagaccagcctgggcaacatagtgagatgctatctctatttaaagaaaaaaatgtatatatctgtaataggcagaaactggaaacaactcagaaacctgagcatcaaggtagcagtttggaagaaaatccagaagctagagaagagtgcacttttaacctaggctgtaaatagttatgggagggcatagtgtgagcctgacatgtttacagcatcctcagagttgaaatcaaaaggaagccatctctatgtaattgcagcaccagcttaagagcccagcacctcattactgttatcaccaatgttcttgatgtcacagaggacaatattccgtgtgaaacactgcagacattcatttaggatgtgattcagaacactcagatcctgaagatagataacttttaggagaactttcgtctgtgtattccacttatattttccttttttagatatattcacgggtaacatagatttgtcatattaaaattaatataatgttactataacttataaaatgarttaattagtataattactaacaataatgttctaaaatacatgcctaatgacgaattaaagagctctttcagtaactctgaaataagtgatgaaaaccattgtcttaatttcctggctcccctcatagtccaaaatggctgtagcaattccagcaattgcatcaacacacaaaaattgtcagttcctcaaaaggagctgtgttttcttgtgtctctttttacaagtgataaaatcatggccaggtgaggcggctcacgcctctaatctcagcactttggtaggccgaggcgggcagatcacctgaggtcaggagtttgagaccagcctggccaacatggtaaaaccccgtctctactaaaaatataaaaaattagccaggcatggtggtgagcgcctgtgatcccagctactcaggaggctgaggcaagagaattgcttgaacccaggaggtagaggttttggtgagcagagatcacgccactgaactccagcctgagtgacagagcaagactccatctcaaaagaaaaaaaaaaaaaaagaacaaacaaaaaacaagtgataaaatctttctcagagtcccagcagacctctggtatctcattggctaaaactttatcacatgcctatgcccataccaattgctggcagggggaaaaaaaaatctacccagaaatgacttaaaccgatcaggcttgcctcctagagctactgatgaggcctatactctgagcacaagctatgtgagaggatactggagaaatggaagggcaggtgggcaattgaattctctgtggcaaacagcatctgccacagattcccaatcacatccactctgtttgaagataattaatttaactttttttttttcttgagataaggtctcattttttcacccatgctagagtgcagtggtacaatcatggctcaccacggcctcaacctcctgggctcaagtgatcctcccacctcagcacagacacgcaccaccaaccccaactaattttttttgtttttaattttttgtagagacagggcctcactgtgttgactaggcttgttttgaactcctgggcccaagtgatcctcctgccttggcctcccaaagtgctgggattgcagacatgagccactgcacctggcccaagtatccaattctttttttttttttttttttttgagatgaagtcttgctcttgtccccggctggagtgcaatgacacgatcttggctcactgcaacctccgcctcctgggttcaagtgattctcctgcctcagcctcccaagtagctgggattacaggctcctgccaccatgcccagctaatttttgtatttttagtagagactgggtttcaccatgttggacaggcctgtctcagttgaactcctgacctcaggtgatctgcccgccttggcctcccaaagtgctgggattacaggcatgagccaccgtgcccggcctaccaagtatgcaatttttaacaattactagtaattaggaaaatcaaataccaggtccgactgaaagctgaaataattatctttgaagattatgattaggaaaatagatctcgatgaagtatagctatgattgaatactattagacagctgatgaaaaaaatatggttctgacctcctggcttttggggctgaatttatcactataaatatgaaggactgaccagtaagtgaccagcaagtgaacagagggagagaggaggagggaagacctgcccctatggagcatactctgtgtctggcatcgggcagggcactttggatattctctcatgtcatcccaccgacattcagtgggatgagtatcatcccactgcctcagcctcccaaagtggttgcaggtgtgagccaccacgcccagctcaattctgatttttttactgtcataattcagctatgacaaccatcctcattaaaaaatattgtggccaggggtggtggctcgcgcctgtaattccagcactttgggaggctgaggcgggaggatcacgaggtcagcagttcgagaccagcctggccaacatggtgaaaccctgtctctactaaaaatacaaaaattagccaggcgtggtggcgtgcgcctgtaatcccagctactcgagaggttgaggtagtagaacagcttgaacctgggaggcagaggttgcagtgagccgagatcctgccactgcactccagcctgggacagagcaagactctgtctcaaaaaaaaaaaaagaaaaagatattgtgtaccttgtcaataaattcgttaaaaattcttccaagttggatgtcttggtcaaagggtatggatacctgaaaggcttatgatagctattgccaaaccagttgacactcctctcaacgatttttttaaagggcttccatttttccctgtcctcaccaatacagggttttatcacttaaaaaaatcaccaatttgagaaaaaataagtgttagaaaatatcttattattgtgttcgctttggcagcacatatactaaaactagaactatacagggaagattagaatggcccccgcgcaaggatgacatggaaattcatggagtgttccatatttttaaaaaatgtctaaaattttagggcaggtgcggtggctacacctgcaatatcaccactttgggaggccgaagcaggcggatcatgaggtcaggagtttgagaccaaccttgccaacatggtgaaaccccgtctccactaaaaatacaaaaattagccaggtgccgtggtgggcgcctgtaatcccagctactcaggaggctaaggcaggagaattgcttgaacccgggaggcrgagggtgcagtgagctgagatcgcaccactgcactccagcctagggacagagcaagactccatctcaaaaaaaaaaaaaaagttctttaaaattttaaatttgtctattcggctgggcacagtggctcatgactataatcccagcacattgggaggctgaggtgggcagatcacttgagcccaggagtttgagaccagcctgggcaacttggtgaaaccccatcactaccaaaaaaatacaaaaattagccttgtggtggtggcacgcgcctgtggtcccagctactcaggaggctgagatgagagaatcacttgagtccaggaagtcgaggctgcagtgagctggggtcgtaccactgcactccagcctgggtgacagaacaagaccccgtttcaaaaacaaaaaggaagaagaaaatagctattaattctgttttaataagtacaatacatggaacataattgaatcttgcagttaagttgtgattatgaacattagttttctgtgtactgctctgtagagtggtctaatgggttgtagtgtgaaggttatacataaaaaaaagcatcaggcctccaaaggaactctgtgtttatgagttagcagtgaggagacttggattctggtcctagctagcygtgtttccttaagcaagtgttatattctcagtaatttactttaaatacctcggaagggccagtgggaagcttatctgtgtgtgtgacttaacttgaatgtgtgccatggagagcgtccctccagtggccattgtggcaagcactgcagatgttgccttctaaatcagtaccagagggttcattagttagtataaggaatgtcgaaataatttttccttgatgaaatgaatggtatgcaagatatgaggccaacagatygtacaggcatctctctgcctttttatgaacaagttaagaggcaagcccagcaatgtaacatttctggagcggtgccctgggctcgatctccattttttccggaatcccccactcaaccaaggattttgttgcttgatctggctggaaggatcactgactgtcattataacatagaggccttgcccattaatattaaataatgtttaatggaaaggaaacttgcagtgcagagagattgcccaggcctgtgttgctgtaaaatgcatgccatttctactgcagtgcttgatacccctctgttgttaattgaattatgtccctgccaaattctaatgttgaagctgtagcccccartgtgactgtatttcccatctttctcctcctagccttcatcgaaatgcagacataatttggtctgtttctcaaatcggtggaagttttgtcatcttaattacctacccagctccattacaggtttaaaaacataatataagatatgtttcaaggggcttctcatcaggcccattaattgacactgccatgaaatcaacacagcctttaagtgcagtccataaccatggaaatgaagtttgcttcagataaaccaaaattctcagagaagacaaatgtgccatcagcagatccattaccaagaagtgtcctgtgtaatgacactttttcatgcatcaaactaagcataatgatgctttccctatctctgtccatgtaactgttgctctctgtgggaaaattatccactcatcttgtctgtacctgtagacagtgaaggaaggaggagagctgagcaatttctttggaattagctccccaaattatggaatgtttattctcagacatcttccggaaacagataaccatttggctccgggtgattttaacatcaattgacctgatggatttttttttttttttttgagacagggtctcactctgtcacccaggctggagtacagtggtgcgatctcagctcactgcagccgcagcctcaacctcacgggctcaggggatcctcccacctcagcctcacaagtagtggggactacagagcacaccacaatgcccagctcatttaaaaaaattttttgtagagacagggtctcactatgttgcccaagctgatctagaactcccaggctcaagcaatcctcccacctcaacctcccaaagtgttgggattacagatgtgagccactatgcccagcctttgacctgatctattttattttattttttttggtgggggggcgggcgggggatggagtttcactcttgttacccaggctggagtgcagtggcgcgatctcggctcactgcaacctccgtctctagtgttgaagcaattctcctgcctcagcctcccaagtagctcaagtgatccacccacctcggcctcccaaagtgctgggattacaagtgtgagccactgcacccggccgacctgatcgattttaaaagttccttctagcactatggttttgtgattttaatctctaaggaaaatgttctttgatgcccagaggttaattctaatttgatgtgatgccagactgcaaagttatagctaatgttggacacatagccttatgcaaattttcaaaaccccaaacttaatgtaactgttagtattgaaatcaattttaattcatatcactttgtatttaattataggtaatctttagatggtggaagatctctctaaggagtgagtatcgatcaacaaaacctggagaagcaaaagaaacccatgaagacttcctagagaattcacatcttcaaggtaaggaayggaacatattatatacccctgttaagttctcattagttagtggtagattttgttaaagaagtttcaaatatattttcacttgaaatattgatatgcagttatgtacttacatatacaatgttagattcttaaaaactagaaaactgttgtttttttctcttggaaaacatattagcatttggccgggcgcggtcgctcatgcctgtaatcccaacactttgggaggccgaggcgggtggatcatgatgtcaggagttcgagaccagcctggccaagatggtgaaaccctgtctctactaaaaatacaaaaattagccgggcatgttggcacatgcctgttatcctagctactcaggaggctgaggcaggagaatcacttgaacccaggaggcagaggttgcagtgagctgagatcagaccattgcactccagcctgggcaacaagaacaaaattctgtcttaaaaaaaaaaaagatcctaggttaacatgtggactccattaatgaagttaaaatcaagtaaatatagttttatgctataatatttatgaattgggcagtggcaaacaaccaagtggtttgggctttactggcaagggcttgagggaaaacttttatacggtgttttctgaaggaagacaaaatatttgattggttacagtggaaattccctggttagaggttagttggcagtttctgactggtaaagtctctggttagaggttagttggcggtttctgactgggtaaagagaaatttccttttcctatgctacaaccatctatatttaaaaaacattttttttattaaaaaaaaattttgtagagccagggtctcactatgttgctcaggctgttcttgaactcctggcctcaagtgatcctcctgcttcagcctcccaaagtgctggattacaggcatgagccactgcacctggcccaaccatctgttctgagttgggtttcagtttgcttgcataagaactcaggacactggagacgtctaagcccaattgcttcccaattaattattttaacacttctcaatatgaaaaattcaaacataaaaagcagacagaatggttttgttttttgttttytgtttttttttgagatggagttttgctcttrttgcccatgctggaatgcagtggcatgatttcagctcactgcaacctctacctcccaggttcaagtaattcttgtgcctcagcctcccgagtagctgggattackggtgtacaccaccacrccaggctaattttgtatttttagtagagatgaggtttcaccatgttggccaggctggtctcgaactcctgacctcaggtgatccacctgcctcagcctcccagagtgctggaattacaggcgtgagccactgcacccggccagaatggtttttaactaactcccatgtactcatgacccatcttcagcaatactcaaaatgtgacccagacctatagatgaaacccactgttcccactggattattgtgaagcaaatcccaattgttaatgtcgtttaatcttaatctactttagaatgtgtctctcaagggactttcttcgactaaactctttaataattactccttaaaaataaaaatttgccaggtgcagtggttcatacctgtaatccttgcactttgggaggccaatgtggaaggattagttgggcccaggagttcaagaccagccttggcaacagagtgagacctggtctccacaaaaacaaaacaaaacaaaacaaaaaccaaaaaaaaaatttttttttaaattagctaggtgtggtgacacgtgcctgtagtcccagctaatcaggaggctgaggtgggaggattgcttgagcccaggtggttgaggctccagtgaaccctgatcatgccactgcactccagcctgggcaacagagcaagaatgtctcaaaaataataataatagctgggcacggtggctcacgcctgtaatcccagcacttcggaaggccaaggtgggcagatcacctgaggttaggagttcaagaccagcctggccaagacagtgaaaccccatctctactaaaaatacaaaaaattagctgggcatgatggtggtrggtgcccgtaatcctagccactcaggaggctgaggcaggataattgcttgaacccaggaggtggaggttgcrgtgagccgagatcacgccgttgcactccagcctgggcaacaagagtgaaattccatctcaaaaaataataataataataatagtaatattttaaagctagaagacaccttagagattcttattatagttaacaatgttatttctattaatatcaagtactttcactctcattttattgttataacatccttgtgaaataaatattattgccatgaaattcagaaaggaggatcttacagctaaatactgacattgccaggactaagcattgaaactcaaaaaaatcaagcacgataatctcatttagaaggcaaactctgagtggatctttgataatcaacactctttaaaaaattccattatttaggccgagcacagtggctcatgcctgtaatgccagcactttgggaggcccaggtgggtrgatcacctgaggtcaggagtttgagaccagcctggccaacatggtgaaaccccgtctctactaaaaatataaaaattagccgggcgtgggggcaggcgcctgtaatccctgctgctcgggaggctgaggatcacttgaacctgggaggtggaggttgaagtgagcagagatcgtgccactgcattccagcctgggcaacagagtgatactctgtctcaaaaaaaaaaaaaaaatccattatttaacaataatagtatgcaataggccaggtgtggtggttcacacttgtcattctagcactttgggaggctgaagtgggaggatttcttgagcccaggagtttaagactagcctgggcaacatggcaagactccatataaatatatatagtgtgtgtgtatatatatatatatgtatgtgatagttttgttttatgtatgtgtgtgtatatatatatataaatgtgatagtttgttgttgttttttgttttgtttagagagggaaggttttgttttgttttgctttcttaaatagttaaaagttgggctgggtgcagtggctcatacctataatcccagcactttgggaggcagacgcaggtggatcacctgaggtcaggtgtttgagaccagcttggccaacatggtgaaaccctgtctctactaaaagtacaaaaattagccgggtgtggttgtgyaagcctgtaatcccagctacttgggaagctgaggcaggagaatcacttgaacccgggaggcggagttaaaaaaaaaaaaagtctgctggattgagtggttcactgtcttactatctgtatgcaatatcattaactcctttatggcaaatatttataaaattcattgttggcttaagaacaaccatgtcaaataatgaaaaagagaagaaaatgtgactgagattagaagaaaaaaaaaagaacaatcatattggcagaagactatttacttttgattgaatttcagtcagcccaggcatgcctaactttaactgtggaccagacatgtttctatgcagctcactataaagtaaacttccataaaacacatttcattttcaagttaacattcgttttttttgttttttgtttttttgagacagagtcttgctctgtcgcctagggtggacggcagtggcacgatctcagctcactgcaacctccacctcccaagtttaagcagttctcatgccacagagcccccgcccctgcccctgaatagctgggactacaggcacacaccaccacacctggctaatttttgtatttttagtagagatgaggtttcatcatgttggccaggctggtctcgaactcctggcctcaagtgatctggctgcctcggcctcccaaagtgccggggattatagatgtgagccacggcgccctgcctccattttattttctaaccactgtaggaccttccccagagctatgtgtctagttaatgctgcattgttccttgagaccatgtggttttctgattgtcttccacaaaaacctggagatggggatttgggccagagatgggagtcaaaagcctcccactgccttctgattgctggcttacttgcagacctcaccagtctcttgcctgctccaggcaccttccaagccctgcccttgataagagattggggggaggggtcaagctcctgataagatactgggggaggggattcacttcaggataactacttgaggggttctgatactggaagagaaaaggcaatatagcgaagattttatgagtctgacagcaggcctgcctccctgctggctgtgttcctgctggacagcaggagagttgagggattcagccaaggcatgtactaaccaggctttttaaatggtagtttacagagctgcagtctcggggctgccaggtggtttcccgccagcagcagcactgtgataccaaattaaatcagcccggcaagttcaaaggctcctgtgtctctaaggggaaaactccaaaccatggtgttggtagtctctgtacacccccttcttagagaatccttcaggaagtcctctgtcttcagaggaaggaggagggttcatggtagcacagactgggactcagtaagctggcgttgaaatctctgtcctgccaccagcccgctgtgtgatcacagctgattgctcctcccctctgtgagtcagtttcctcatccttaactggagataatggttactccatatagccacggtgagcattcaatggcctgatacaaagtcaggcgcagtggctcacgcctgtaatcccaactacttgggaggctgaagtgagaggatcactagaggccagaagtttgagaccagcctgggtaacacagtgagaccacccccccatctctaaaaaaaactttaacaaaatgaaaagcaagacaaaatacctgatatatgaacagattttttttttttgagacaggatctcactctgctgcctaggctggagtgcagtagcacgatcacgctcactgcaactttcacctgccaggcttaagcggatcacttgaagccaggagttcgagaccaacctggcaaacatggcaaaaccctgtttctacaaaaaatacaaaaattggctgggcgtggtggtgcctgcctgcccagttactcaggaggctgaggtggaaggatcacctgagcctgggaggtccaggctgtagtgcgctgtgattgtgccactatactccaacctgggtgacagaatgagaccctgtctcaaaaaaaaaaaaaagaaagaaagaaaaaggraaagaaaaaaaaaattcccagcatgtccttatggtttgctgttgtattagtctgttctcacattgctataaggaaatacctgagaatggataatttataaagaaaggaggtttaattggctcatggttttgcaggctgtacagaaagcatagcagcttgtttttggggaggccccaagaagcttccagtcatggtggaaggcaaagagggagcaggtgtcttacatggcaggagcaggaacaagagagtgacagggtgaggtgccacacacttgagttttttgttttgtttttgtttttttttttgagagacctagcctcactctgttgcccaggctggagtggagtggggccatcctggctcactgcaacttccacctcccaggctcaagtgatcttcccacctcagcctcctaagtagctgggactacaggcatgtgccaccatgcctggctaatttttttgtattttttgtagagatggggtttcactctgttgtccaggctgctttcaaactcctgagctcaagcaatctgcctgccttggcctcccgtagtgctgggattacatgcgtgggccactgtgcccagcctccttcctctatctgcaaagccaacaatggcaggtcttgtctttctcaygaggcatcactctcaccttgcctccgtggtcatgtctccttctctgactatgactctcctgccttcgtctttcccttataaggaactttgtgatgacattaggctcaccagataatccaggattatctcccatctcaagatccttaatttggctgggcacagtggctcacaccagtaatcctagcactttgggaggctgaggcgggtggattacttgaggttaggagtttgagaccagcctggccaacatggtgaaacctcgtctctactaaaaatacaaaatttagccaggcatggtggtgggcacctgtaatcccagctacttgggaggctgagggaggagaatcgcttgaaactgggaggcagaagtggcagtgacccaagacagagcaagagcttgtctcaaaaaaaaaaaaaaaaaaaaggatccttaatttaatcacatctgcacagttacttttgccgtgtgaggtcccatattcacagggtctggagattaggacatggacatctttggggacgggcattattatgtctaccacagtgatttatattactaaattgcaaaatcaaaaacgttgctgaatttttttaacagatttgcatttttattttatttatttttgagacaggatctcactctgttgcccaggctggagtgcagtagtgcaatcacagctcactgcagcctccatctcctgggctcaaacaatcctcctgccgggcgcggtggctcatgcgtgtaatcccagcactttgggaagccaaggtgggtggatcacctgtggccgggagttcgagaccagcctgaccaacatggagaaaccccgtctctactaaaaatacaaaattagccaagcgtggtggcttatgcttgtaatccaagctactcgggaggctgaggcaggagaatcgcttgaacctgggaggcagaagttgcagtgagccaagattacaccattgcactccagcctgggcaacaagagcaaaactccatctcaaaaaaaaaacaaaaacaaacaaaacaatcctcccacctcagcctcctgagtatctgggagtgcaggtgcacaccaccatgcccagccaatttaattatttttattttttagtagagatgaggtcttgctatgttgcccaggctggtctcaaactcctgagctcaagcaatcctacctgccttggcatcccaaagtgctgggattacaggtatgagccactcagcctggcccaggtttgcatttttaagaatcaaaactgtcatgtttattaatttaaacattactcttaacactaccaagtatacagaactgttagcatgtgaataagaatgttgcttaatacagactacttccattccaatcctggccctaaacccactaggtatgtgaccttaaccaaattatttaatctttttaggtctcagttccctcaactgctgataatgggaataataatggcatctatctcacaggatccttatgaggactaattgaatgaagtgcttagaatttgcctggcacataataagtactcaaaaaattccagctgttggagtttttaatatttaaaaagtgaaaattgtttctctcctccaagctcccttccccagagacgaccattctaaatagtttcatttgtatttgaattctttctgtttgaattgtatatatgtttataaaaataaaatcaggttgggcgcggtggctcacgcctgtaatcccagcactttgggaggccgaggcgggtggatcccgaggtcaagagatggagaccatcctggccaacatggtgaaaccctgtctctactaaaaatacaaaaatcagctgggcatggtggcacgtgcctgtagtcccagctactcaggaggttgaggcaggagaatcgcttgaaccctggaggtggaggttgcagtgagccgagatcatgccactgcactccagcctggcaacagagcaagactctatctcaaaaacaaacaaaaaaaatcaaatcaattacatctttaggttttattttttttttattttttgagtcggagtctcgctctgtcgcccgggctggagtgcagtggcgtgatctcggctcactgcaacgccgctcccgggttcacgtcattctcctgcctcagcctcccaagtagctgggactacaggcgcccgccagcaagcccggctaattttttatatttttagtagagacggggttttaccatgttagccatgatggtctcgatctcctgatcttgtgatccgcccgcctcagcctcccaaagtgctgggattacagccgtgagccaccgcgcccagcctaatctttaggtttttaacttgttttgctcttcatatattatgattatttttctgttagtgtacataaagtcccctgttcttttgcaaggatgtatggtattctgtgggtacaaatacacaatcctcaattgatgggcattttcggatggtttccaggttttgctgttctcactgaagcctttaggtacatgctgggacatctatatctgcacacttacatgagaatgtcagtaatatggattcctacagggggaattgctatatccaaagagatataccttataaattttgatagattttatctgaggggtgcattcttgaaaatcttgcagaattcagggttaacgtgaccaaggatggtctttctgtgaactggctcgcatgccactgccacaggatgcagcgcaaatggcatttgcaacacatttgaccttaataattatgccaactttataattatgctactcttgaaagaattttaagttgtgtgatttacattattttaacatttgcacctaaaatgagacttcattaatattttgatgtcacaatatttcaatttagagtaatttaaaatttacgtaaaataccagttactttcttatcctcacaaattgccctccaaaaaactgctgtgttaattatactccatccaataggaggtaggtgttttcttaccccttttgccaccatgccttgttccataatccattttctctaggtttcttttttagacttatacgtcagcctttaacttgggcctttattttctcattcctaactaacacctcttacaacactcctcccctccttgctgccctctctgatcagctgccctttgtcttcagccttgatctctagcttctgcataccttgggttgggttctgcaagtggatggtgaggtgggagagtgcaggaggtaggagcctgggaggctggctctgggctgcagagcagagaaggcaaatccaaataaaatcttacattttgtcatttattattaactgatgttttaagattaaaaattgaaataatgcacatagtaaaacaaaagttaaatgaatttgaaaagttttaggttaagcactgtggctcatgcctgtaatcccagcactttgggaggcaaaggtgggaggactgcctgagcccaggggttcaagaccagcctgggcaacatagtgagacactgtctatacaaaattaaaaaaattagctgggcatggtggcatatgcctgtagtcccagctacttgggagtctgaggtgggaggatggcttgagctaggaggtcaaagctgtagctagccatgattgtgccactatactccaggctgggggacaggatgagaccctgtctcraaacaaataaataaatacaataaaaatgaaaagttttagcatgaaaataagtctccctctgaccctgtgtttctagttccaggacaaccatcattaggagtttctgttatatccttataaaaatggtttatgcatacatacaagaatatgttatatattaacacaaaaaggactgggcaatgtagctcacacctgtaatctgaggactttgggaggccgaggctggaggatcacttgagcccaagcagttcacgaccagtctgggcaatgtgatgaaaccctgtctgtataaaaaatgcaaaaattaactgggtgtggattcacgttcacctgtggtcccatctgctggggaggctgaagtgggaggatcacttgtatacaagaggtcacggctgctgtgattgtgctactacactccagtatgggcaacagagtgagaccctatcttaaaataaataaataagtaaaataaaataaacataaaaattttttttttttttttttggagacagagtctccctctgtagcctaggctggagtgcagtggtgccatcttggctcaccacagcctctgcctcctgggttcaagcgattctcctgcctcagcctcccgagtagctgggactacaggcacccaccaccatgcccagctaatttttgtatttttagtagagacgaggtttcaccatgttggccaggctggtctggatctcctgacctcaggtgatccacccacctcagcctcccaaagtgctaggattataggtgtgagccaccacacccggccaaaaagaagaatcttatgcattgtatcctgtagcttgctctttaaaagttttcaaattcagaaatattttaaacctacagaaaagaacattacagagactctggctgggcacagtggctcacacctgtaatcccagcactttgggaggccaaggtgggcagatcatttgaggtcaggagttcaagaccagcctggccaacatggtgagacccatctctactaaaaatataaaaaaattagccaggcgtgttggcgcacaactgtaatcccagctacttgggaggctgagtcgtttgaacccaggagacagaggctgcagtgagtcaagattgtggccattgcactccagcctgggcaacagagcgagactccatctcaaaaaaaaaaaaaaaagaacgttacagagactcaataccactaacaaaagatgttaacatttgtcctatttacttcatttcatctaaattgtcacttttttgttgtaatctgttcataatatcctcttcttttgatgtctgaggatctgtagtgtgttctctttttcattccatgataatggtaatttacattttctctaatttttttcttaattaatcttgccaggggtttacttcattcattaacttttttcatagaactaacttttagctctgttgattttgtttttgtgagtttttaaaaagtgatttctgttcttacccttatttcctttctactactttccttaagtctggtttgttgttcttttttagcttcttgagatggaagtataaatcattatttatttattcattttattttattttttatttttgagatagggttttgttctgtcatccaggctggagtgcagtggtgtgatcatggctcactacagccttaacctcctgggcttaagtgatcctcctgcctcagcttctggagtagctgggactacaagtgtgcaccaccacacctggataattttgtagagacagggtctcactatggtgcgcaggctggtcttgggacttatctctaactcctggcctcaagcgattcctcccaccttggcctcccaaagtgctgggattatagacatgagccactgcaccttgcctaaatcattgtttagagccattttttctcctctaaattttctttaactgctgctttacctacatagacaagttttgataacttgcgtctttattctcattcattttcattcagttaaaacattttctaatttccattttgatttcttctttgacccttagattatttagaaacatattgtttaatttacaggtagttggagatttcttagttactttttttgttcttaatatttagctaaattacatgtggtcagagaatctactcaaaattataacgtatttttttagataaccatctcaaaagtatagaaaattatttcatataaatatttctaacatctattataaaygaaaactcctagaaagctagtaatagctttgtcctggatgtaaacacttttgcttttatttactgttccagtgtttctttctgcagatataaacaaattcataaatatgtttatattctggtacccgttttttacacaaatagcattctgctcctgctgttcaacactttaccttttcaccagtatatccaggaaatcgcttcatgtctttggagatattctttgttttgttttgttttgtttttgtttgtttgtttttttgtttttgagaccgagtttcactctagtttcccaggctggagtgcagtggcgcgatttcagctcactacaagctccgtctcatgggttcaagagattctcctgcctcagcctcctgagtagctgggattacaggcatgcatcaccatgcccagcaaattttgtattttcttagtagagatggggtttctccatgttgctcaggctggtctcgaactcctgacctcaggtgacctcagcctcccaaagtgctgggattataggcgtgagccaccatgctggcctgttttttttttttkttktttttttttttttaccgcatagtatttatgctttaatagagtatatatgctttatactaaagcatatactatatacatatcatatatatgctttatctgcatataatatttctttatatgtaggcatcaaaattctaatgataaaaattgggttgtttccaatcttttcgtatcacagataatgccaaaatgaataactgtgtgcacagatcatttcagtgtgagattgctggccaaaagataaatgcttactaagttataattttgagttaatggtttctggtatataaagaaatgatactgatcttttttcagtaggatttcttgactttcgtcaacttttgtatgttgacattcagatcattttgtggtaatggcagtttttctttctgatcatgatgtatttttatttttatttatttatttttttgagatggagtttagctcttgttgcctaggctggaatgcaatggcacaattttggctcactgcaacctctccctgccagcttcaagtgattctcctgcctcagcctcctgagtagctgggattacaggcatgtgccaccatgcctggctaattttgtatttttagtagagacagggtttctccatgttggtcaggctgatcttgaactccccacctcaggtgatctgcccgcctcagcctcccaaagtgctgggattacaggcgtgagccaccacgcccggccatgatatattttgtttgwtgtttgtttcagagtctcgctttctagccaaggctggagtgcagtggtgtgatctcagctcactgcaacctctgcctcccaggttcaagcagttctctgcctcagactccagagtagctgggattacaggcacccaccaccacgcctggctaattttttttttttttttttgkatttttagtagagacagggtttcaccatcttggccaggctggtcttgaacttctgacctcgtgatccacccgcctcggcctcccaaagtgttgggattacaggcgtgagccaccgcacccggctcatgatgtatttttatattttccttgttttgttctttctgtgacctctaaaacaatgctgaatagagatggtgatagtgggcattctggtcttatttctgacattagaggttatataccatcatgattggagggtgcattgtagagcaaactccctgggttcaatcctagttctgccgctttctcattgtgtgatcctgaacagccacttatcctttctgttcctcatttcctagtttctctctctctcttaagttctctccatattccagaactcctttttttcctctataagaggggaataataatagtacccatccaatagggtcattgtgagggttaaattatataatatatatgatatatcttatatatattgtataatatatataacacacacactttatatatatacatattagagcagtacctggcaaatattgaagatgataccaacccatatttgtaccattcattattattgttactgttattgggttttagtaacttctgtatatcaggttatcaggttaaggatgttcccttttattactagctttctaggagttttcatttataatagatgttagaaatatttatatgaaataatttctatacttttgagatggttatctaaaaaaatacgttaatatggcaaattctgtaagatatttaccaaagttataacatccttggatcattccaggattaatcctactggtcaaaatttgtttacttttttaatatgttggtgaactcaatttcctaatgttttgtttagaatttttaccacatatgttcctaagtaaagtttagcatacagttttccttttgcctaccatcattgctggtttgcacaacttcctaatttgagctggggagttcttctatttctattctttggaacaaattgtataccatatggattggtatataattctttgagagtttataaagctaatctgtaaagcagtatagacctgaaactttagttaaggtttccttttcttaattaatcagtgaattcattttatttactggtcacagtctcttgggttttctttcttttttttcccctcccccgccccgagttgggagtctcactctgtcacccaggctggagtgcagtggtgcaatctaggctcactgcaacctccacctcaaagcaattcttccacctcagcctccctagcagctgggattgcaggcaagcaccaccatgcctagctaatttttgtatttttaatagagatggggtttcaccatcttggccaggctggtctagaactcatgaccttaagtaatcggcccaccttggcctcccaaagtgctgggattacaggcatgagctactgtgcctggcctaatatcttctttgactccttaattattcagaaatgtgtttaaaatttccaaatgtttcccaggattatgaactgaatgtgtcccccctcaaattcatatgtcaaacccctgactcccagtgtactatatttggacatggaggcctctaaggaagtaattaaggttaaataaggtctttaagttggggccctaatctgatagaattggtgttcttgttagaagtcggaccagaggctcactccctgtctccttaagctcacaaagaagaagtcatgtgagcacacagtgaaatggcagccctgcacaagccaagagaagaagctgtagaatgaaagctaccttgctggttgagggtccaaagtcttctccttttgtactgcgtgtgaccctttcagttcaggctggatggcagtgtttttaccaacataattctcttaaaaatatcatgggttttccataattcttattggggtctactgcattagagaaaaccacacttatatatttctgtgagataagcacttctctaccttgggtttctgctcttgactcttgagtgacaacactgttaagcttcatgaaaaccctaaggtttgactgaatggtttttgacagagcatcttgtagccacctttccccatctccaatttcttctttataccatgtttttcttccattgtcctagatttgatctttgcctgagagtcacttcttaattttagcttgtttgacagctgaagaggcagagaatgttcaaaagcagtaaatcctgtgtcctttttaagagaccttcctttagcttgtctcttttctcttatcttttacttwaagcatcaagaagaaatcaggcagtatgttcctgctctgcttggacatttccttagctaaatrgcacaacccataagttgcatttttttctcatttaatcttttttttttttgaggtggagtcttactctgttgtccaggctggagtgcaatggtgcagtcttggctacggcaccctctgcctcccgggttcaagcaattatcatgcctcagccttgtaagtaactgggattacaggtgcccgcctccatgcccagctgatttttgtattttcagtagagatgatgtttcaccatgttgaccgggctggtctcgaactcctgaccccaagtgatctgcctgccttggcctcccaaagtgctgggattacaggcatgagcgaccacacctggccctcacttaatcttttgtcttcatctttaaaacctcagagtccattagacttctactaatggtttcttcttggctcttcaggctttcaccaaccctctcgtcacactcattcacatttttatggacttttcaatatcaaagccactcttacattttaggttccactgtggcagcacatctcttgcaggtacccaagtctttatcatctattgctgtgtaacagattatcccaaaacgtaatgacttaaaactataataattgtttattatctcaaacagttccagtggaccagaaatttgggagcaacttaactgagtggttctgattaggagacttgcatggggttgaatggcacctcagtcatctgaagaaggcttgattggggctggaggatcccattcaaggatggcttatacacatggctgagaaatcactggtggttgttggcaggaggtttcaatttcttgtctcatggacctctccatagtgctgctaagtgaggactaaactctgatttttttatcttgcccaaattcctatctgaggggtctggggagtcatgccctacaaatcatagtctcatcagatgggttttgtttaaccctatatatcataatttactttccaacctgactctggcataacattatgagacaaagaagaaaatcaacatattttaccccaaaacatgttgatttgccatattttgaaatggccctgcaaagctgttctttgtgggggaaaatttgtatctgtaaagaatctctattaacagagctagatctttttcttccagaccctcccaatcctaacgagagtaactaagatctgaataggaaacactggtcatttattgtctctaagggcagccactataagacttcaaaagaacttgtcaggacatggccgttggcttctcgcagagtgagtgatcgaagagcaaagcagaagcctttatgatgacctaccctttgaatatcatttctgcaatatcctctttgttaatagggcagccctattcagtgtgggatggaaatatgcgggggtgtaagtttaggaaaagatagtcactgaaactgtcttggagactgtctgccacataatccaacaggcaggcggtgattttatgtttcagaatggagtttgttttaatatactttttttaatttcaaaagaaatatatgttagttacatttaaaaataccaaaaaagcaagagtattttttcaaaatactctaaccacctacactttcaaaccatcacatttcatacctagctgtacatgtcctaaaacttttacactttatttatttatttatttatttttggcagggacggagtttggctctgtcactcaggctggagtgcagtggcacgatctcagctcactgcaacctccgccattctcccgcctcagcctcctgagtagctgggactacaggcgcccaccaccacgcccggctaattttttttttttctttttgttttgtatttttagtagggacagggattcactgtgttagccaggttggtctcgatctcctgacctcgtgatccaccctcctcagactcccaaagtgctgggattacaggcgtgagccactgcgcctggccaacttttacactttaaatactttattggtggagactttctaaagtatatttgagcatgctttgaacatgttttcttgtcattttaaagtattcaaaaattatcttcaattatgtcaagggctttaaataagcactgctttttcttcttcttctgctggtgggcagaggatcttcacaatacctactctttaatgctgagtttttgaaagggctattcctcaccccccaagaaggcccttgtactttagaggggctttgaatgggaagcacttggaattcagaagcaacttaaatccttaatgcctctattttctatttctgtattaatgccttaatgtaggctaacctgtttgggagagaaatcttatatagctactcttctaagctggcacgattgggcttttacataaacacagcccacaccttacatccattctgaaatcagagagcccaacttctaggatcacagttccgcctgcttctgcagggagcctattgcccttgacagctctgtcctacttgctccagaaggaatggttcaggttgaatagggaaggtggtcgccaaatattggacagtgaatctaagagagtgcactttttctcttctaagagccatttttgggaagactccatagtggagctttcagagtcagaaggggagaagagaaactgacaaagcccccagttttggggcccctgtgatctatatgcataccccaccatcaccctgttttcctctctcttaaaaggaggtagtcttggccgggcatggtggctaatgcctgtaatcccagcactttgggaggctgaggcgggtggatcaccaggtcaggagttcgagaccagcctgaccaacatggtgaaaccccatctctactaaaaatacaaaaattagccgggcatggtggtgggtgcctgtaatcccagctactcaggaggctgaggcaggagaattgcttgaacccagggggcggaggttgcagtgagctgagatcgtgccactgcactccagcctgggtgacagagcaagactctgtctcaaaaaaaaaagaggtagtctttttttccaatatttaaaaaaattacactggtaatatgggtttattgtacaaagatcagaaaatacagataggccaaaggaagaaaataaaagtcaccacatttaaccactgtttacatttaaacatctatccttccaaacaagttttcatttcttgtttattcagagaactggggggaaatccttttttcctacatcaaacatagttagataggccattgattggttgattctttatgaactatttcctaatttgaaaataagtgaacaggtacagaaaatattaggcaaaagttaaaatactatgaagcatccagcctgagcaacatagtgagaccctgtctctacaaaaaaaaatcataataatttttatgaaatattcatgtttttctctttgcctctttatattttttctctttctttccttcctttctttctttctttctttctctttctttctttcttttttttttttttggacagaatttcgctcttgttgcacaggttggagtgcaatggcatgatctcagctcaccgcaacctccgcctcccgggttcaagcaattgtcctgcctcagcctcccgagtagctgggattacaggcatgtgccaccacgcctggctaattttgtatttttattagagacagggtttctccatgttggtcaggcgggtctcgaactcccaacctcaggtgatccgcctgccttggctgcccaaagtgctgggattataggggtgagcctccgtgcccagccctgttcctattttttttttttcctatcaaatgaagttagggatgaaaggagatggtaaagaaggaagaaagtttggtgtagacacaatgtataaaaataacaggctgggtgtggtgtctcatgcctggaatcccagcactttgggaggccgaggtgggaggattgcttgagcccaggagttctagaccagcctgggcaacataataagactccatctctaaaaaaaaatttaaaaaaatagccaggcatggtggcacacaccaatagtcccagctacttgggaggctgaaatgggaggattgcttgagcctgggaggtcgaggctgcagtgagccgcgattgcaccactgcactccagcctgggcgaccccatctaaaaaaaaaaaaaataagttaaataagagatcaaatgtcagctaaaattaggagacaatgtgttttagactaatggacagtagcagggctggcagaaaagccacgtggaccagcatctttttcctccacatagctgcctgcttggaggggccatgagtacaatggtaatgccaagaccaattacgttagtggtatagactggagtttggtgctgatgagatcaaggggatgcagaaatcactgtgttaaacagtgagtgtccctcaaagattctgatctcagggcagggacagaaattggaaacagatgcctcaaaaatgcattcagttagtcccaaaggcagctcggtgaaagtaggaatgacttagcatcatctaacgtcactcccaggggaaaaatgccctgaagcttgtatttcactgattgttattataatttttatgtgactgtatatgataaccatgttggcttctttgaattacaggtcaaactgccttaatatttggtgcaagaatattagactatgtcatcaatttktgcaaaggtaaatttgacttccttgaacggctctcagacgatttgctcctgactatcatttcttatctggatcttgaagatattgccaggctttgtcaaacatcacacagatttgcaaaggtaacggtcaattattttatgtctatatagaattttccatgtgctttctaaaaaaaatttttaacatagcaatcatttgttgagtactaactttgtgatggacactgtcttaggtgcacaagcagcagagatgaaatgacattcctcccctcaaagaacttacagtattatagtagagattcatgtaaatgcaaataattataatacagcgtgatcagttcaacaagggatgtgtatgcaaggtacaaagagagtgcaaagtgattttctctgcctggcttcacaaaagcaggttactttatctagcttttgagggtgaagttggtgaagacaggtgatctgggttagggggcattccaagtcaaggaacaaccaagcagaagcatagtggcgtaagagaatagggcactttgggaggccgaggtgggtggatcacctgaggtcaggagtttgagaccagcctggccaacatggggaaaccccatctctactaaaaatacaaaaattagctgggcgtggtggcaggtgtttgtaatcccagctactcaggaggctgaggcaggagaatcacttgaacccgggaggtggaggttgcagtgagccaagatctcgccactgaactccagcctgggtgacagagcgagactctgactcaaaaaaaaaaaaaaaagagagagagaatagggcaaggaggacaacctgacatccgcgtttccatttcttctagtaatagcctttgctgcatttcctgtctcccaatatgtgtgtttcagtgggctgtccattgcagtgtcctgttttcttccttgcccgaagctgacaagatgcattgtctcactgcttgaaatcctcagcagaatgacccaagagcaggaagcacagttagtgctgatttcagccattgtcaaggcttcagtgtgacctttgtcagttgtactccctggatcctggaagataccttggtccctaacccttctgttgttccttcaactccagaacccccaatgctaccccacaatcacacacatactacttttccattaaatctctttttggcttaagtaaatcagaatgggaatctgttgcttgcaactgaggaaccctgactagctcggtatttagctgtaatgtgttggggcaatgtccatttataaaagaacatacaacattttccaagatgattcaaatcataatcttattatctaaaaagccaacattttttcccaataatgcaataaaatgtctttatttttaaaattaattttaattcaggcacagtggctcatgactgtaattccagcactttgggaggctgaggagggaggattggttgagcctaggaatttgagatcaacttgggcaaaatagggagattccatctctacagtacatttttaaaaaattagctgagtgttatggccgggcgcggtggctcatgcctgtaatcccagcactttgggaggctgaggcggttggatcacctgaggttgggagtttgagaccagcctgaccagcatggagaaaacctgtctctactaaaaatacaaaattagccaagcgtggtagcacatgcctgtaatcccagctactaggggggctgaggcaggagaatcgcttgaacccgggaggcggaggttgtggtgagccaagatcgtgccattgcactccagcctgggcaacaagagcgaaactcagtctcagaaaaaaaaaaaaaaagaatttctgagtgtcatggcatgcccctgtagtcccagttactctggaggctgaataggaggatcacttgagcccaggacgttgaggttacagtgagttgtgttcataccactgtaccccagcctggacaacagaacaaaaccctgtctcaaaaaacataattttttttttttttttttttgagaccgagtctctgtctgtcgcccaggctgaagtgcagtggcgcgatctcggcttactacaagctctgcctcccaggttcacgccattctcctgcctcagcctcccgagtagctgggactacaggtgcccgccaccacacccggctaattttttgtatttttagtagagacggggtttcaccgtgttagccaggatggtctcgatctcctgacgttgtgatctgcccgcctcagcctcccaaagtgctgggattacaagcgtgagccaccgcgcctggccaaaaataattttaagtaatgtaattttttttttttttttttttgagacagagtctttctctgtcgcccaggccagagtgcaatggcatgatctccgctgactgcaacctccgcctattgggttcaagtgattcttgtgcctcagcttcccgagtaactgggattacaggcacccaccatcatgcccagctaatttttatatttttagtacagacggggtttccccgtgttggccaggctgatctcaaactcctgacctcaggtgatccacccacctcggcctcccaaagtgctgggattacaggtgtgagccaccgcgcccggccttaagtaatataatctgtattatagtacttaatatattccttttgagagtgtgtgtgtgtgtatatatatatgtatatatatatatatatgtatgtgtatatatacacacacacacatatttaatttttaaaagagaggtgggatttcattgtgttgcccaggttgctcttgaactcctgggctcaaatgatcctcccacctcagcctcccaaagtgctgagattacaggtgtgagccaccttcctgtccaaatatatatatgtatatatatgtattttttaacttatattttgggttcaggcatacatgtgaaggtttgttacacaggtaaactcatgtcacagggtttttttgtacagattatttaatcacccaggttaattattaaacccaatacccaatagttatgttttctgctcctcctcttcctcccaccctccaccctcaagtagacaccagtatctattgtttccttctttgtattcataagttctcatcatttagctccccaaaatatattttttacttgattttcctacctaaaaatggaaagctgaaaacaagtactattgtatatatttttgccattaaataagtatcctaaagttgaaattttgtgcttggtgctgataagaagctgattattagggcctggcacggtggctcacacctgtaatcccagcactttgggaggccgaggygggtggatcacctgaggtcaggagtttgagaccagcctggccaacatagggaaaccacatctcaactaaaaatacaaaaattagctgggcctggtggcacaggcctgtaatcccaggtagttgggaggctgaggcaggattgctgcttgaactcaggatgtggaggttgcagtgagccaagatcacaccactgcactgcagcctrgacaacagagtgagactgtctcaaaaaaaaaaaaaaaaaaaaaaagaagcagcagcagctgattattcatactttaaatgaaaagagaattctacgtaaataaaatatgcaagtggggatctagcaaaagtttctgcgctgttgcagggcctggatttgattttctatcaaatccttccatttactttcagtaaatttctgctcctgcaagtaaatggaaggatttgataggaaacagcagcaagtgagtggcttctggtagttatttctcacgctgagcggctgccttctctccaagttttactcacttccactattactttcactcttagtgtcctgctattatttcagtgcagtcttgaaaacattctccataatttagccagtgctctgaagtaggtcttctctaggttgctgatttcagccctgagcatctttacagagcagaattattagaagatggaacatgactcagggctgctgcttttattctccccgcataacattaaccacttttctttttttttttttttttttttgagtcagagtctcgctcggtcacccaggctggagttcagtggtgagatctcagctcatgcaacctccacctcctgggttcaagggattctcctgcctcagcctcctgagtagctgggtgggactacaggtgcttgccaccatgcctggctaatttttgcattttcagtagagactgggtttcaccatgttggccaggttggtcttgaactcctggcctcaagtgatccacctacctcagcctcccaaagtgttgagattacaggcgtgagccactgcacccagccaaccactttttttcttatttgcacacagggaaagaaggaaaaccacttatttctgttgtcaatctaagttttatctctgttccatttacctgttacacacttcatttataagttattttctttttcttttttctttttttttcttttgagacagagtctcgctctgttgcccaggctggagtgcaatggcaccatctcggctcactgcaacctctgcctcctgggttcaagcaattctgctgcctcagcctcccgagtagctgggattacaggcacccaccactgtgcctggctaatttttgtatttttagtagacacggggtttcgccatgttgtccaggctggttttggactcctgacctcaggtgatccacctgcctcggcctcccaaagtgctgggattgcaggcatgagccaccatgyccaaccttataagttattttcatttaactactttattaatgaaaaaaaggcttccttttcaaattccgggggacaagtttattaccaaattatttgtgtccagtccagctccttcctctttacctcagggagggagttgctcctctcctgctcaagatcagtgctacctgacacgtggttccagggcctactcctgggaatttcacttatttcctttctcttctgtttgttattgttactattattgtttttttaagagacaaagtcactccatcacccaggctggagtgcagtggcatgatctctgctaactgcaatctccgcctcccaggttcaagcgattctcatgcgtcagcctcctgagtagctggaattacaagtgcaagccaccacacctggctaattttattttattttattttatttctgtatttttggtagagacggggttttaccacgttggccaggctggtctcgaactcctgacctcaagtgatcagcctgcctcagcttcccaaagtgctgggattacaggcatgagccattgctcggcctattgttattttttttttaacttttaattacccagcttcccccatgttgacatcttacataaccatggtacatttataaaaactaggcaattaatattggtacaacactattaactaaaatacagatgttattagaatttcattagttttttcaataatgtccttttgctgttttatgtccaatctagcttactacactgcatttagtaattaaatctttctctgttttttccccccygtacgttaattttttttttttcctttttgagacagggtcttgctttgttacacagtctggagtgcaatggcatgattacagctcactgcaacctccaccccctgggctcaagtgatccttccacctcagcctcctgggtagctgggactacaggcctgcgccaccatacccagctaatttttgtattttttgtagagacagggttttgccatcttgcgctggttggtcttgaattttggggctgaagcaatcctcctgcttcagcctcccaaagtgttrggattacaggcgtgcgccaccatgcccggcattaatttttttctcaaatcagtttcatccttcaaaaaacaaaaactatccttatccaatctctcttcttcaaaaatggtttacatagcagttaatgctcagcaaaccagcagcattagtgactttataacccatgatgaaatgagaataataaggatgatataaagtttttgataaagctaaacttgttttatttaaatgaccgtctttcagtggatgttagatctttcctattttggggagggttgaaatattccttcttggctgggcacagtggctcacacctttgggaggccgaggcggatggatcacgaggtcaggagatcaaaaccatcctggccaacatgatgaaacccccgtctctaccaaaaatacaaaaaattagccaggtgtggtggcatgcgcctatagtcccagctactcaggttgaggcaagagaatcgcttgaacccaggaggcggagattgcagtgacccaagatcgggccaccgcactttaccccaggctacagagcaagactccgtcttaaaaaaaaaaaaaaaaaaaaaaagttcttttttttatgaagtggtggcaataatacatgatcactttaaaaattgttcttatttgacaaaatgtgaaagtcagcagcaaccttatttttgttctttattatcattttattttgttctgccttttaaaaaattcactggtcttaggataacccaaaattctgagaggtgttagtctaatgtcagcctacagctcctctttcattttcccctcggtccatgcctgcaaaatatctctggcacattcacaacaaccttgtgtttgttgtatcaaaagggcctgtttcaggtgttcttcttctttttttttttttgacacggagtcttgctgtgttgcccaggctggagtacagtggtgtgatctcaactcactgcaacctccacctcccaggttcaactgattctcctgcctcagcctcccaagtagctgggactacaagcatgtgccaccacacccggctaatttttagtatttttagtagagacagggtttcgccatgttggccaggctagtcttgaactcttgaactcaggtaatcgcctgccttggcttcccaaagtgctgagattacaggcatgagccacccatgcccaaccaagtcttctgcttcttgactcatctctgcttccaggactctggtgggttttctcctgggaaccccttcattgcttcagtgattgcttgtccatgtgagctcagggtggccattttacattgtactctggtcatgccattgtcctgctcactggcctttaatggcttcctgtcattttcagaatgaggtccacagtcgtagccagcacagccacggggccctcgccctgcctcctgccaccctctgccccagccaggtcagctccttgcagctctctgtgtgctgtgctctactgtgccttttgcctttgcttaacactgctctcttttccaggaatattctcctcctgactcaaccaccacctggatctcccaaatgccccttgattggcttttgtgcttgcttgccccacccccttgacttgtctctctgccaagctcaagggcaaggattgtgtcacctaacttcatatacccaccttaacagagtgtctagcccagagttacctcccagaaaacggtggttgaatgcttccatatcaattttgtttatatttttgaaaaagaaagttgacatccattgcaatggtcagattggaaatgtttaaaaattatgtatccttgtatataaactaaaaagttattgcccctcccagtcctgaccctcattcctctgattctcatctctagtggcaaccatattaactgtgttttgcatgtccttccggagatattctacacatgtagaaccatatgtgtgtgggatgtgcaagtacatataccggtacacacacccttctaaaaagcatgtagtaacatattatatattgttctccatctgtttttttttctacttcacaacatattttagacacttttaaaatatcagtactggccacgcatggtggctcacacctgtaatcccagcactttgggaggccgaggcaggtggatcacttgaggtgaggagtttgagaacagtctgaccaacatggtgaaacctcgtctctactaaaaatacaaaattagctgggcatggtggcacacacctgtaatcccagctacttgggaggctgaggcaggagaatcgcttgaacccagaaggcagagtttgcagtgagccgagattgacccattgcactccagtcttggcaataagagtggaactccatctcaaaaataaaataaaacatcagtacctatcaatcttcctccatttaaaaaaattgccataggatatcagcgcatggacagattatttatttatttatttatttattttcctgagacagggtcatcttgctgtgtcacccaggcaggagtgtggtggcataaacacagctcactgcagccttcacctcctgggctcaagcaatcctcccacctcagcctctcaaatgtctgggactacaggtgcacaccacgacacccggctaatttttgtgttttttgtagagactgagtcttgctatcttgccttagctggtctcgaatcttgggctcaagcagtcctcctgcctcggccttccaaagtgttgggattacaggtgtgagccaccacacacagtgaagataatttatttaaccagattttttgtttaccctctgtatttataaatgatgctccatactttatatacaatttgcattgcatgtttatctgtagaaaaaattgctaagtgtaactatttaaaatactcaaagaaatatattgaaatatgcatgatataggtagtatactgggactataatatgcgcctccatgcatatggaaaaaaggaaataagtatgtaccttgggtcacagactataacattcattcattcattcatttattcattcattcatttatttgagatggagtctcactctgttactcaggtcggagtgcagtggcacaatcttcgttcattgcagcctccgcctcccagattccagtgattctcctgcctcagcctcctgagtagctgggattacaggtgycctcctccatacctggctaatttttgtatttttagtagagatggggtttcaccattttggccaggctgatcttaaactcctgacctcaagtgatctgcctacctcggcctcccaaagtactgagattacagatgtgagccaccacgcccagcccataagaacatttattgagcacctactgtatgtctagcattccactaagttttctaattacattttttatttagttctcatagaaatctttagatgtagatactattattatcctcattctattttattttattttagttttttttttttttttttgaggcagactcttgctctgttgcctaggctggcacaatcttggctcactgtaacctctgcctcctgggttcaagcaattctcctgcctcagcctcccaagtagctgagactataggcgcatgccaccatgcccagctaattttcgtatttttagtagaggcggggtttcgccatgttggtcaggctggtctctaacttcttacatcaggtgatctgcctgccttggcctcccaaagtgctgggattacaggcgtgagccactgcgccctgccatcctattcataaggaagctaaaactcagcaagtctaactgatgtgcccgaggtcatatggccagggagtttccctcaggcacccgactgctggaccgagtgatatatggatacacttcagggctctgtgcagtcagtatgtaattactgagcccctgctgtgggccggacacagtggtaggttctggggacttgaaggtgaaaagatgcacgtgtccctgcctttaaggagcttacattcttgagcagagcaaaggaagaatatggctgggaatgaagtgggaggggctggggagtagcaggcagatctgcaggcacatggtcaaggtgttgttttcatggagcctgttaagagtgcggtgtgcagggtcacctctacgagacagaaaggctcccacggccagacctgackccgtagtatcgcttctgccttagaagcataaagacacattcccaagagccagactgtgtagggactctgtgaaaggcaccccagcccagggagtccatggtgctattccacagttgaggatggaagtatccagttatacttaatgccaccagcaatcaggatcatccagctttctgcctttgctctgattctatgttgaccaaggcctggagcctgcagcctggagctgtggatgagcaaccagcatactggaaagtagagctccacacctgtcagggtggggccagtctcggactgagacaagttcaccaaggtgtgctgccatttgggcacctgcctggggtgcctagtggcttgcccctgatagcaccaggccttgatgctatccatttcctccaaaatgcagtagataagtctggagaaaccaccagtgcagctagatgagaaggctgaggcccaggccgggaaagagatggtcatgacaggcatataaacacattcatcctgattgtgactcaggaatcaccgggagaaccacttaggaagaaaaccactcctctgtcctttgttggctgtggagagagagattttttcctcatgtctacaaaccctctatgatcataattcccatgtctggccaagcaggtgaagcccctggggcayaggtggaaacacagatgccaggcccatcccctgagcatctggcttggtagatctgaggtggaaccagcacttgtgctcttaatgtgttttcttgtgtttacagcaacctgattctaagggtttggtccaacaattttctttttttttttgttacagagtctcgctctgttgcccaggctggagtgcagtgaagcaatcttggcttactgcaatctacctcccaggttcaagcgattctccctcagcctcccaagtagctgggactacaggcgcatgccaccatacctggctaatttttgtattttagtagagacagagtttcaccatgttggccaggctgttctcgaattcctgatgtcaaataatccacccttcggcctcccaaagttctgggattacaggagcctgccaccacccctggctaatttttgtatttttagtagagacagggtttcaccatgtcggtctggctggtctcaaactcctgacctcaagtgatctacccacctcggcctcgcagagtgctgggattacaggcatgagccactgtgctcatcctggcccaagaatttgaccaatcgatattaaggttgtacagatcaaatgtctcaggggactctagaaggctggaagcttgcgggaggagatcycctagcatcactgcgcaggcagtgtggtgtgtttaaataagcaggaggctggagagctgggttctgttctgttcttcgctcagccactccccagcatgaacctggaacagcatccttctcccttctcttctctcagccctggttttcctatttgcaaagggagaggttttaaatagataagccctaagattctcttcaacttgacaatttatgtatgcaaaattcatgcaccaccaccggggggcgctaaatccatggttagctgggctttggatctgagtagccaraactatagaacctttcgttttgcaacctggcaactactaagcaaaagatcgtcagggtttgggagtcatagatgggggtattttgtacacgaacttataatataaaacaaaactgtaaatattttcagtataaaatttgatgagtcataaatgaagttatactagtggaaattttagctcttttgagaattatttcctttccccccaaatcttgtagtttycacccataatctctattacaagacacattgatatcctgaaatgtactgtgctagtaatgggatagtaatccacattggtgctggagttcagatcttttaaaggaaggtcaaatgatctgtttttcatattaagacatttttaaagttttcctttgtttatatttagaataggttgtaatctgagtagaggaactaaaccttgaaggactgttgaaggagagataagataatgagtgacccttctaacatcaaaatgctttaaggtctgtagatatcatatgattcagtgttgctgtttagcaataaccattatgtgactataatagctgttgtgttgatgtttgcgcagaaaggatcttaagcaattatgccttattgtactattcatttctatttgtaattcattctcttcccttattggagtacttttagaagatcatgaagtatggaaggaaggagtggtgactgctttctgttcagaagtgaacgtagtggtgtcaggaggtagaggtcacacttacacatttcttcctccccaggaggaagtcaggacacaggggggcacagcacaacagggctggccagggctggtgctgtttgggataggaggtaggatgggcagggggaagctgggtatgggccagggaggctgccctggtgctccattatgaggggacagcaatcatgcctatgtttgtgtgaacccaagatttagctcccacttacaagtaagaatgtgcgctatttggtttcccatttctgtgttactttgcttaggataacagccttcagcagcatccacactgctgcaaggacatggtttcattctttttttatggtgtgcagtggcaaaagttaatagaagaatagaacatcttctactttcaagaccaagaagtgctcacaccttgcaggaattggagaaggtttggatcacatcaccaggggtagcatcttgatgagctgaagtgctggctaaagacagacagaagatggggtgatggtagagggagaaagttataaatacaacttccggccgggcacggtggctcacgcctgtaatcccagcactctgggaggctgaggcaggcagattacaaggtcaggacttcgagaccagcctgatcaacgtggcgaaaacctgtctctataaaaaaaaatacgaaaattagccaggcatggtggtgtgcacctgtagtactagctacttggaaggctgaagcagcagaatcacttgaacccagtaggcggaggttgcagtgagccgagatcgcacccctgcactccagcctgggcaacagagtgagactctgtctaaaaaaaataaatagatagataaaaaaatagataaggctgggcacagtggctcacgcctgtaatcccagcactttgggaggccaaggtgggcagatcacctgaggtcgggagctcaagaccagcctgaccaacatggagaaaccctgtctctactaaaaatacaaaattagctcagtgtggtggcgcatgcctgtaatcccagctacttgggaggctgaggcaggagaatcacttgaacccaggaggcagagattgcagtaagccgagattgcgccattgcactccagcctgggcaacaagagcaaaactccatctcaaaaataaaaataaaaataaataaatacatacatagataaatagagatgaattggaattaactagaggcaacaaacttcatccagatgttgacagtgactgatgggacttggccgcagtggggtgggggtgaaggtggagaataacacattttcccttgcacgagggagtgttgtgttgcctggtgttggtaggaggatgttctttctactgccgtcactgggaagtttaagtgtgtgcagaagggtatgtcctttagatatatgtgcacttacatatttgtgtctggctgttttcctcaaagaggaggtttctcaaggcaggacctgtgtctggcacaggtagtgtttctccagtgtcccacaggcagcaagagtttgataatgagttaacacatgtgtgctgtaacccacctctgacttttcccacccacagctgtgcatgtctgataaactgtgggaacagatagtccagtcgacctgcgacaccatcactcctgacgtgagggccctggcggaggacacaggctggagacagctgttcttcaccaacaagctccagctccagcggcagctccgcaagaggaaacaaaaatatggaaacctgagagaaaagcaaccttaggcacacattttcctaccagcagggagctcaggcatggctgtgtttctcttcagtgtccaaatctcttctgtctccttttcttaagaactaagaggttttgttgatgcgtggagccatttgaaactcgtaggggatttgcacacaaatgcagcagagtctggctccccagtgccttgctagagtcaccgtcattctgaggtcaaatcatggcccgaggacaagggctgtaagacagggagccccataggccatcatcatccttatcccacacccattataaaagaggtttctattgtatataaacaaacaataaatgattattagcaggtttttattagacatctattttatctaggcattagaaagggtaatggggcttttgaattttttcctggcattgtgtcgtctgcgtccagccatgaagctggtggctgagtgtccccaccaggaactgtgaagggcacgtaccacgggaggcactcagggtgggtgcagctgccttcccaactttgttctgctaagtccatattcagggccctatccttgtgagcccaggatgccagggtccatccccgcatgtagacagcttccgacctggtgctggagcatgactggagaagtgcaggcatcctgcttgcggaccttgctcaaagtacaacttcccaggactacttcacattgttaaataaacctataaacatttcttttcttttcttttttttttttttttttgtatttyctttttagtagaggtggagtttcgccatgtaggccaggctggtcttgaactcctgacctcaagtgatctacctgctctggcttccaaagtgctgggattacaggcatgagccactatgtctggctaaaacctataaacatttcttagagaaatgctgttccccaaaggaatgtgaacagctaccacttttaacaaggatatttaagaaaacagactatgagttaactaagtaaaaatgtaaatatggtttgcatgctgttaacatggcagaggggtaaaaagaatacagtcctggggagaaaggtcacttcactgagaaggcttacttaaaaatgtttttctccctgcactttcatgattattaagtacccctagaaaatgaactcatagcagcaaataatctaatgactccttttaggttacagagcaaagtagctttctacttccacatcacattataatatagccttataatttcttctttcctgcaaccttcactttcctacctaggaaaactcacctccggtgccagagaaacttcccaggatgcactagggccctgtgaacaatacagaagttgtggactctggctctttgtcccacctaagtccttccagaagggctctacagcatggcttagtgacattaaaaaaaaaaactgaacccatgttaatatcaaacaagattttaatcttcattcacacacccttaaaacccagtcacggggctccccggtgccagtttgagaccgtcaacctagccctctctgcttctcattgctggaggtacacacagtcaaaagttttccgtgactgtgaaatccagtgcaatctgcttcccagcagatgaggagcctgacgtggttatgtctggatttagtccaagaacagagcaaagctttaattgtcaagagacccaggcctcattctccacttaggagagtttgctagggcaggtacaggtaaaggtaaccagcaggcagctgagagcaagaaggcacgtgctctgcagagctctagctgccttggctctccctgagctcccagacttcactcatggcctaattttcaatgacagaacgtaggttttatcgtgaggatgcagacacaaccacaattacgtatgtcaacataacttcataaatatgtaactgtaacttattggtaacatcagtgcaagatgattaaagcttcatgtgtagtattttatcaacaaacagattctgaaagcttatggacatgcgcaatagttgattcagcttcaatcaataagaacataaatatggcaatttgaaaacactatgtatatacctactcacatatatattatacttacgatatatacttatatgtagtatataataatattacatataaaaatgttataaaaataaatgctaaagtaaataaaaaaagagccaytaatatgttaactattgttaaataatagctaaaataatacagattattaaattattttaatacttacttgccataataatctgagtgccktattacttgattacaattgtttttgccaaaataggaacaatatcatcaagtgaacatcctgtgtctccccagcatcctcagtggttgaaacactttgtccctccctcccccatctcattttccatgtgaggttccatgtgacgatcccataacatggtaataggcagcgatggtcttgactttctgcttctattaacagctttcatttctatttctgctttcatgtggatggataaatctgctttatgtcttaacatttcagagtgaaatgccacacaatttttttttttttttttttttgaggcagagttttgctcttttcacccaggctggagtgcartggtgcaatctcagttcatggaaccctccacctcctgggttcaagtgattctcctgcctcagtttcccgagtagctgggattataggagcctgccacaatgccctgctaatttttgtatttttagtaaaaacagggtttcaccatgttggccaggctggtctcgaactcttgacctcacgtgacctgcccgcctcagcctcccaaagtgctggaattacaggtgtgagccacgctgcccagccttacagcattttataatcttgtcctttttcatcttttcaatcaactgtgtttctactctgttctcatttaccattgtaattatacaatactgaaaatttccaatggtttatatatttagtggtataagaacaatctattaacaatagaaaatacatatttttaatttataactaaataataaacatattttacttaatgtcaagttctactactacttttttcccaaacaggttggcatatgtatgcattaagcctcagcaatatagaatccaaaattttttcattctttttttttttgagacagaatcttgctgctgtcgcccaggctggagtgcaatggtacaatctcggctcactgcaatctctgcctcctgggttcaagcaattctcctgcctcagcctcccaagtagctgggattacagacatgtgccaccataccgggctaatttttgtatttttaatagagacagagtttcaccatgttggccaggctggtctcaaactccttacctcgtcatccacccaccttggcctcccaaagtgctgggattacaggcatgagccaccgtgcccggcctaaaatgttttcttctactgwgtaggccccagaactaaggctgaggtgatcatgtggggagggactgcaagcaggggtaaggacaatgcaccaggtaccacttgtcattgttttgtgagctgcttgtgtatataatggttatcagtctttatttattaccccaaactgactcctgaaataccgaagaataatataaaacaaccttactaaaaacagaaaagttcatcacagttttttgctctgagttttagtataatgacctctatcttcagtttgtattaatatactgtgagagcgtatccaagcttttcaattgtgagtagttggtttcaacttgaaatggatgtctttgatgtcatgttaaaaacatcaagtgataaaaaatatcttgagacaaatgacaatggaaacacaatatcaaaagcaatctaagagggaagtttatagcaataaatgcctatattaaaaaagaagaaagaccccaggccaggtgcagtggctcattcctctaatcatggcactttgggaagctgaaacgggaggatcctttgagcccaggagttcaagaccagcctgggcaatataaggagaccctgtctctacaaaaaataaaaagatcagcccagcatggtggcacaggcctgtggtcccagctacttgggaggctgaggtgagaggatcgcttgagcccagaggtcgaagctctagtgagctgtgatcacacccctgcactccaggctgggcaacagagtaagactgtttcaaaaaaaaaaaaaaaggaaaaagaaataccctaaataaatagcctaacattacatctcaaggagccagtagaagaacaaactaaatccaaagttagcagaaggaaggaaataaagattcgaacagaaaaaatcaaatagagaacagaaaaaccataggaaaaactcaataaaaccaagagttagttcttcgaaaaaataaacaaaatcagcaaacccctagctaaactaaggaaaaaagaagactcaaataaaatcagagatgaaagtggagccattccaacagatgcctcagaaataaaaggaatcataagggactattatgaataattatatgccaacaaattgtataacctagaagaaatggataagttcctagaaaagtataacccaccaagattgaattgatgagaaatagaaagcttgaacagaataacaagtgaagagattgaagaagcaattaaaaaccttccagtgaagaaaatctcaggaccagatggctttcgtggttgatttctacaaacatacaaagaagaattgtcaccaatacttcttaaagacttccgaataatagagctagagggaatacttccaaacatattttatgagaccagcatcatcttgataccaaagccagacaaaaacacaagacaagaaaagaaaacttcaggccagcatctctgatgagcattgatgcgaaaatccttcataaaatattagaaaactgaattcaacaacacaaaaagattgtacatcaagacaaagtgagatttatctctggcatgcaaagcaggtttgacatacacaaatcaatcagtgtgatacattatcttaacagaatgaaagagaaaatacataattatcttaattgacaaacatttgacaaagttcagtatcctttcttaatgaaaacttaactatgtatagaaggaaagttcctcaacataataaaggcagtttacaaagacctcacagctaacaacataaccaacaaggaaaaactgaaaactttttccactaagatccagtacaaggcagggatgctcacattcaccacttctattcaacatagtactgcaagtgcttgctagcaagagcaatcagacaagaaaaagaaagaaaaacatccaagttgaaaaggaagaagtaaaattatctctatttgcagatgacatgattctataggtagaaaaccccaaagatttgacaaaaaactgtaactaataaatgaagtcagtaaagttgcaggatacaaaatcaacatacaaaaaaatcagtagcatatctatacacaattctttttctagctgaaaaagaattcaagaaaccagtcacatttacgacagcatcacaaactaaaatatctggccaggtgcggtggctcatgcctgtaattccagtactttgggaggccgaggtgggtggatcacccgaggtcaggagttcaagaccaacatggtgaaaccctatctctgctaaaaatacaaaaaaattgcagggtgtggtggcaggcgcctgtaatcccagctactcaggaggctgaggcaggagaattgcttgaacccaggaggcagaggttgcagtgagtcaagattgtaccactgcacaccagcctgggtgacagagcaagactgtcaaaaaaaaaaaaaaagaaaaaacaaacttaaaatatctgggaacaaatttagtcaaggacatgaaggattgatacactgaaaactataaaactgatgaaagaaatcaaagaagacacaaataaatacatatattcatggatgggaaaatttaatattgttcaaatgtctgtattacctaaagaaatatgcagatttaatacagtgcctatcaaaattcccaaggacattcttcacagaaatagaaaaaaaaaaaaaaaaaagcctgggtagtataacaagaccctgtctcttaaagaaaaaaaagttaaaaattagctgggtgtggtggtgcatgcctgcagtcccacataccatggagctgaggcaggaggattgtttgagcctaagagttcaaggttgcagtgagctatgatcatgctactgcactccagcctgggcaacagagcaaggtcttgtctctaagtaaaataataaagaaaaaaatcctgaaattaatatagaaccacaaaatacttagaatagccaaagcaatactgagagaaaatgtttgaggcctcacacttcctgatttaaaattatattatagagctatactaatcaaaacactatagtactggcagaaaaacggaaacatagaccaatggaacaaaattgaaagcccagaaataagtccaaacacataggatcaattaattctcaacaagggcaccaagaggacaaaatggggataggataatgtcttcaataaatggtgctgggaaaactagattgccactgcaaaagaatgaaatttgacccttaccttacaccatacataaaactcaactcaaaatggataaaagacctaaatgtaagacctgaaaccataaaacttctaggcgaaaactcctcctcctgggctcagtccttgacataggccttggcaatgattttttggatatcataccaaaaaaccaggctacgaaagcaaaaataaataaatgggatgataccaaactaaaaaacctttgcagagcaaaggaaacaatcaacaaaatgaaaaggcagcttacagactagaaaacaatatttgcaaaccacatatctgataaggagttaatatccaaaatgtataaagaactcttacaactcaataacaaaaaaacaaataaccctattaataaatgggcaaaagatctaaacagacatttctccaaagaagacataaaaatgcccaacagtggccgggcatggtggcttatgcctataatcccagcactttgggagaccaaggcaggaggatcatgtaagcccaggagtttgagaccagcctcggcaatatggcaagaccctgtctcaactttaaattttttttaaaaaatggccagcaggtatataaaaaggtgatcaacatcactaatcagcagagaaatgcaaattaaaaccaggtcgagataccacctcacacccataaaggtggctcttgtcgaaaaaacaagtgataaataacaaatgttggcaggggtacggagaaaaggaaaccctagtacactgttggtgagaatgtagattggtacarctattatggaaaacagtatggaggttcctaaagaaatttaaaatagagctaccatgtgaccagcagtccgtcttctgggtgtatatccaaaggagatgaatcactgcctcgtaatgatgtctgcaatcccatgttcattgcaacattactcacaataagcaatgtggaaacaacctaaatatccactgatggacaaatggataaagtaaatgtggtagatgtatacaatggaatattatttggccttagaaaagaaagagatcctagcatttgcaacaacacagatggacctggaggttattatactaagtgaaataagccagaaacgaagagaaaaacatggtctgatcttacttatatgtgaaatawatatcgtttttaattatatatataaatatatattcacatatatctgtgtgtgtttatgtgtgtgtgtgtgtatatatgtgtgtgtgtgtatatatgtgtgtgtgtgtgtatgtgtgtgtgtgtrtatatatatatataatttttttttgagacaaagtctcgctctgtcacccaggctggagtgcagtggcacaatctcggtttactgcaacctttgcctgccaagctcaagtsatcctcccacctcagcctcctgtcctgagtagttgagactagggcgccaccatgctcagttaactttttagttttttgtagagatagggtctcattacattgcccaggctggtctcaaactcctgggctcaagtgatcctcccacctcagcctcttaaagtgctaggattataggcatgagccacgatgcctagccctggaatatatataaatataagagcactcatatatactgagatagagaatgaaacagtggttaccacaggcaaaggctagggagagaggaaatgaggaaatacagttcaaagcatataaaataggaaatatataggataaaaagtttagagatctgatgtacaacatgaggactaatgttaataaaattgcattgtattggggatttttgttaaataagtagattttagctgcacttgcactaataaaaaggaattatgtgagatgatattgttaatcagtttcaccatagtaacgtttttactgtctatatatatcccataacatcatgctatactgtcagatacacacaataaaatttatattttaaaaaaccaaaaacatcaagtgaacaaagtgccaccacattgaagaaaaatggcacctgcagttaaaaccctaacaatatacattgtcattttacaaaataaaattaatagcttcacttctacttcattttaaaataagatcatctgcactctgaggcagcattcgtctgcccttgcaacgtgtaactgtcagagtggggyactacagaggactacctgcattatattccctcaaaaacggttttccactcaggaaagttattttcaattgggaaatmtgttctgcccattcaaaaagtcttacagccactgatccatggccacagactgcactggaataacctcagaaataataatattagcagcttctatctattgtctactatgtgccaagaaataaacagatagtaaacaactgaattcttaacagcaatccttaaaagtaagtgatattatttctgtcatttctctcaggggtctacaaattatggcgtggacctaatctgaccagcctcctgatttataaataaagctttattggaacagtatttatgtgttatctgtggtcgcttccatactacaatggcagcattaggtagtagtcgtgacacagactgcattgcctgcaaaatctaattattctgagaggacaagttaattttttcaaagtttcataaaactgagacaaatctctacctactaagtctgtgttcttaaccacaaatgccacagcacctctcctttcagagccaaaactacatctcaccaatagaacttgaaaaggtgatgggatttgtgcaggtcacatttgaaattataaggagagggccttgagcataatatgagaccattcaagactggttgcccagagaatatgccaagcttttgatgaacaaaattattgcctatttttaataaagtatctttttgttgttgttgtttttgagacagggtctcactctatcgcccaggctgaagtgctgtggcacaaacacagctcactgcagcctcaacctcaagagatcctctcacctcagcctccagagaagctgggaccacaggcacacatcactacacccaaataatttttgcattttgtgtagagatgaggtcttgccatgttgcccaggctggtctcaaactcctgggctcaagtgatcctcccacctcagcctgccaaattgttgggattacaggcatgagctacagcacctagcctaaagtgtcttaaggcatttaaataatgagcaaggggtaaattcttcgagcccctcatacactcttatggaaagctaccaggatgagtaaagggggtgagtaaatacagcttactggttctttcccaaacccagtgctctcttcctaccactttcctctacttgaccacttggaaatctgcctctgtcaagaaacccttacctccttctatttcacctggcaattcaagaggaggtgggattggctctcaccttgctctccagtgctaattggagaccctcaacccaactctctcctcacagtccaactgtagcacctttcctgcattgcagtggtctccgctctccaccatggctcaattcccttttcatagatgacaactgcttccccgctccagtctttgcaattcaacatcagcattccctccccaactcactgttctctgaatattttgacgctggagacctccccccatccacacataccacactccagcctggccaacctggaatgcttatccttccacggccttcacatctgagctttctggtgtggagccattgcttctggagggaagcctccttaccttcttgaggagttgcctcatttccaaaactcacttcttctaagcttccatgaatctgtacatgtgaccggtttgctctctgccctaacctgcgtcccttactgcctgttcatccagcagcccctccctgactgtacttgactacctgccctctctgaattccaggattagtgaaacgctcaacgcgtgaaacgctcttgccctgtaacctgcaggatgtccacccgacgggcgatttatgtcctcttccctatggtcagacggcagagcatcactggggcacaccagatgtgctgccttggcccccgaccgacctagcctggcttcctttggcttccacgcattgccttaacaggccttgtattatctatttcctgggcttctcacagtggatcttcaagtcttatctcccacttcgcagagattaatcttttcagtgtgaacgtcacagcttctcttctctcctgcatgaaacctccctgtcctgggcccaccttgtctttcttctaccttcagagggaggagttgacttatttacagtgctcacctatccattgttagggattctggtctttctcatctccttgttctctatatcttccatctctcctcttcacagattctctttccttctcttttttgaatacttatgtaaatagagacagggtcttgctatgttgcccaggctggtctcaaactctggtttcaactgatcctcctgccttggcctcccacactgggattacaggaatgagctaccgcacctggcacccttttcttttcttaagaacataggaatccgacaggctgtaatcccagcacattgggaggccgaggtgggtggatcccttcagcccaggagtttgagatgagcctgaaaaatatagtgaaaagtgagaccttgtttctacaaaaaaaagaatataggtctctccttgaaagaagcttcattctaatgaccttctcagtgccctgttatttctctccttctgagccaccaaacagctataacaattactctcccctcgctgcttccccttgttctctactattcccgcaattccttagcctctcttggtcatcttctaaagctactctcttagctactactgagagtttctaatctagtatccctttctcagctcccgttgttaattcatttaaaaatactgttttaggcagggtgcagtggctcatgcctgtaatcccagcactttgggaagctgaggtgagtggatcatctgaggtcaagaattcgagaccagcctgaccaatctggtgaaaccctgtctctactaaaaatacaaaaattagccgggcctggtggcgtgcacctgtagtcccagctgctcctgacttcaagtgatccgcccgcctcggcctcccaaagtgctgggattacaggcatcagccactgcacctggcttagctctactctttttttatattgaactccttgatcttttcagctttcagatgtatacatgtgtatgtgtattagttatacgttgtgcccacatatatgtatatgtctatacttgtgtttggatattgtctacacggtaccaagttaacataacaataaacgagtaatcaaaaatcaaataaataagctcaaatatttttcaagttcacttgacttgagtgaatcttttggtaaatatgagtagtttaatattgttggtttaataaaaacaaatatcttctgacttatcagcaaaatatgcatgtatttaatgttcaggtgattgctttatgatacttagataacatatgataatattaatagcaaaatggttaataggaaatttaagttgagaagatggctagaggctgaaacaggagaattgcttgaaccgggaggcggaggttgcagtgagctgagactgcgccattgcactccagcctgggcgacagagcgagatgctgtctcgaaaataaataaaaactaataaataaataaataaaaatactgtttatgtattagttactctgtgccaggcactgagctaagccctggagacacttgcataactagaacacggccctgcccacaagcaagttcagtcagtaaatgttccccatttttcctaacatccaaggttcttcgctagccagctttacttcctacctctctactctttttcttccacctttgaaggattcttctcctgtttccacctctgaaagtcctgcagctgttcctttactgaccagcagagtaggtcctaaagggctgctggtgaatccaaggccatccaaggaatgctgccctggagagagctcagtgactcttcctcctttcacgcacccttgggaaatggggcacacttccagaggactttctccaggtggtgtttcagtgtctgccttgtgcctggaggcactgcgctccacgcttgggaatgccatggaagcagacagacctagtcctgttctcatggggcttccttggttgggggtagtaggggaggggctaaaaggagtaggaaggtgacacctcttccttggagattctgatatgctcctctgagtagagtttattctcagcaccatcctgttcttttttttttttttttttttttttttttttgagatggagtctcattctgtcacccaggctagagtacagtggtgcgatcttggctcactgaaacctctgccacccgggttcaagcaattctcccgcctcagcctccccagtagctgggactacaggcgtccgccactgcgcctggctaatttttgtagttttagtaaagatggggtttcatcatcttggccaggctggtcttgaactccttacctcatgatccacccgcctcagcctcccaaagtgctgggattacaggcgtgagagccaccatacccggcctttttttttgagacagtcttactctgtggcccaggctgaaatgtggtggttcgatttcagctctctgcaacctccgcctcccgggttcaagcaattctcctccctcagcctcctgggtagctgggattacaggcatgtgccaccactcccagctaatttttgtatttttagtagagacagggtttcaccatgttggccaggctggtctcgaactcctgacctcaggtgatcctcccacctcggcctcccaaagtactaggattataggtatgagccaccatgcctggccaccatcctgttcttttgattaatatttatgagactcatgacttgacaatcaatccgacctcccactttgcagagattaagcttatcagcgtgaacttctcttggcttatctgtcaaggttttgtataaacaaccttcccctacctgtgcagcctggcatcatccctattcttggttacttcaggctattctttgaacctgagctcctcctgtgctttccgggtctgtgttttcacccatgttgttctccccttgccccgtcatcatgccagccccctaaccaagtcatgcccagcctccagggccacttcacacttcagccatctctccttctgattcctctagcacaaagtgtgctgctgggatcttgggagtcctcaaaaccccttcagtcatctgtgaggtcagaactattttcataataatactaggacattatttacctttttcattcattcactcattctttttttttttttttttttttttttttttagacaggatctcactctgtcacccaggctggagtgcaatggcgcaatcttggtgcactacaacttctaccacccaggctcaagcaatcctcccacctcaccctcccaactagctgggaccacaggtacgtgccaccatgcctggctaatttttatattttagtagagatggggtttcaccatgttgcccaggctggtctcaagctcctgggctcaagcaatcctcccgcctcagcctcccaaagtgctgggattatagggaagagccaccaggcctggccgcttttgtattcattctttcacaagtaagcagtggaattttccagaggctatgtgaactgtgatgttactctgatgactagtggaacatatgcttgtctatttttgtgttttctagacttttctaaggtaataggtttagggtatgaatatgttgaattttcagaggctaacctagtttgttttcagtacttctaccgtgctcttgctagttatctttgttatacctgctatcttttttttttttgagactgagtctcgctgtgttgcccaggctggtttccaatgattctcctgcctcaggctcccaagtagctggaattacaggcacgcgccaccacgcccagctaatttttgtatttttagtagagacggggtttcaccatgttggccaagctggtcttgaacttctgacctcgtgatctgcccgcctcagcctcccaaagtgctgggattacaggcgtgagccaccgcgcccagcctatacctgctatcttttatgcaaccttattctcatccagtaaattggtatcctgaggtttacctgtgtggaaatacaagaggtagatatactttgttgtcttactttgcaataatatttaaaaatacttttgttttattttgttttttagagggagtcccactctgtcacccaggctggagtgcagtggtgtgatctcaactcactgcaacctccacttcccaggttcaagcaattctcctgtctcagcctcccaagtagctgggactacaggtgcgtgccaccacacccagctactttttgtatttttagtagagatggggtttc

SEQ ID NO: 98006 - DNA, 28459 bp, Homo sapiens
ttgagaaggagtctctctctgtcgcccaggctggagtgcagtggcacgatcttggctcactgcaacctctgcctcctgggttcaagcaattctcctgcctcagtctcccgagtagctacaactacaggcacacgccaccaagtccggctaattttttgtattttagtagatacagggtttcaccttgttgcccaggctgttctcgaactcctgacctcaggatccacccatctcagcctcttaaagtgctgggattacaggcgtgagccactgcacctggcccataatgaattcttaatattatgtagctattcatgttaagacttcctggtcacctccttcaacaactgggaaacatcagttttggaacccatagtcatatctaataaaggcacattctcttgccttgtcttagaaataaaataaaacaataatcaatacaaagaattgctgtctttggtctccatacttttccatttttacaacaaacttcttatgcaaacctcacaatatcagcgtaagagtcaattttcatactttgacccaacactctaccttataggtagtcaatgaatatttttctgaatgaacaaacattttaattcattaattagttaattaagtagttctaaacctaagattattctggggtgcggaaggaactaacatgaaaactttagagatataagcagccatatcagtctttcccttttttttgaacttgcatcattggctaattaagcactttttttttttttttttttttagtgtgtgtgactcactttattgcaatattcattttattgtggagtggtctgaaattgactctgcaatatatttgaggtatgcctgcatacaacagcatttctattttttcttttctttctttttttctttttttttgagacagagtctcactctgtcactccggctggagcgcagtggtgtcatcttggctccctgcaacctccacgtctagggttcgagcaattctcctgcgtcagcctcctgaatagctgagactacaggtgtgtactaccatgttcagcgaattttggggtttgtgggttttttgtttttttttttttgagacggaatctcggtctgttgcccaggctggagtgcagtagcgtgatctcagctcactgcaacctccacttcccgggttcaagcgaccctcctgcctcagcctcctgagtagctgggactacaggcgcgagccaccatgcccagctaatttttgtattttttagtagagacagggtttcaccatgttgaccagaatggtctggatctcttgacctcatgatccgcctgcctcggcctcccaaagggctgggattacaggcgtgagccaccgcacctggccatttttgtatttttagtagagatagggtttcaccacgttggccaggctggtcttgaactcctcatctcaagcgatcctctcacctcagcctcccaaagtgctcagcttacaggtgtgagcaactgcgcccagcctaaacacatcattcttaaactacctgacctttcagaactaacagttgaagctaggaattctctattttgccactctgtctacaatcctccattatctacataatattgcagctcttccattatattgtggaatggctgtgaagtagcacaaggctcaatgtcaagtgtcctctaatactccatcgcacgactaaaccctatgtcacttagcaacatttccctgccctgctctcccagctcttgttgggaagcctgttctgagacggtggaacttggcaggggtgaaggaaaatccagtgactgatgctttatgtccaggaattttcaaagcctgtagatggcttttggttttgggtggtggtttttgtttttctttcttactttttttctttactaaaggattagaatttataaataatagagtgtactgcacaatggaagatgcagaacacaaacacgtttaactagaatagtattctttagcactggtggtaccacacctttattgctaaagacctgtgttgggaaatggggacactccccttcttacacttcaggttacagccctgtccagttaagcaatacaccacttcacactggagaccttaatttaaatgagttacaactaacttttatgtagggcagcaaggtgcatgaaaaggaaaacaaatgagtacaaaggataaaagaatcactcctttcttttctttctttctttttttttttgaaacggagtctcattctgtcgccaaggctggagtgcagtggtacgatcttggctcactgcaacctctgcctcccgggttcaaacgattctcctgcctcagcctcccaagtaactgggattataggcacctgccattatgcccagctaatttttgtatttttgtagagatgggatttcaccatgttggccaggctggtcttgaactcctgacctcaggtgatccaccagcctcggcctcccaaagtgctaggattacaggagtgagccaccgcacccggccaaatgtttgtaattcttacattctctggaaaaaaattcgttaattgagtttatattgaaatgtagcaactcctagtttcataaattttatgtatgtaatatttgaaggatcctgattttttgctttcttattacatagtgctaaatacacagtatatatgagattttgctgagttgaaaactacaattgtggatttcaaataaataatgctaaactagttatgtggaaaatgagaaggttaggtttatttataaatatctacttgggtagattatcttcacattctctaattgcatggcttaaagttctctctctctcttttttttttttttttttttttttgagagaattgtccaggctgttcttgaactcctggccttgttggatcctctggccttggcctccccaagtgctaggattacaagcatgagctaccatgcctggcctatgccagctttttaagaaccttgagatcaaagaaataaatgagaaatttctgaaaatttccacatgtacttaaaactctgtaactatatactatatattaaatctaccaaaaaattgatggttaggaacctgcaaccaggatttaatagccttgttttataaaagtataccaaaacaattagaaaaacatagttaatagcttttaaacaaaatttgcttacaaattatagtttgatacaattataaagtaataaatggcataaagttacatagattatgtatcacttggctgaccatctggtgccttccaaaggctgccaaaactgctgcaagccaggctgaggcttgaagaacccctgaattcctgcatctagaaggatgcaggtgtctcttgtctaggacatttcaaggaaatgtcttctccctatttccctgctcccgaccagtttatacagattacagggaatccgtaggatctggaggctgagagaaaggtgcaaaaaggtagagtgacaaaaatggacttttaaaaactgttccatcaggtattctttggttacaagtaaaagaaaggtatcctaacccaacttaaaaggggatgatgagccaggcgcagtgatgcatgcctgtaatcccaacactttgagaggccaaggagggtggatcacttgagtccaggagttggagaccagccctggcaacatagcgagaccccaactccaaaaataattaaaaattagtcaagcatcgtggcacatgcctgtagccccagctactccggaggctgcggtaggaggattaattgagcctgggaggttgaggttgcactgagccatgcttacaccactgcactccagcctgggcaacagagcaagaccttgtctcaaaaaataaataaaaattaattaattaaaaggggatgatcagaaatccagaggggaagatcacagatcccaagtagaggtcacagatgtcaaagttgtcagaccactactctctccacctttctctgggattgtacagttgctgcatctgttgacacatccaggctatggcttatctctgatgactggatttcctcatttatgagcatgcatacatcaaaaaaaatggctgccactcctcacactacctgactctccagctctggtgtcctccactgagctagttactcaaagtcgaagtctctgggttcaaattagcaagcaaaagaattggattggtgctcgtataaatgcacatatactaaaattggaccaatacagagaagataagcatagtcactacgcaaggatgacacccagatttgtgagtcatcccatgttaagggggggaaaagcatctgaatggattaggtgttctctgatcccatcagctgtggctagggagacaaggtctaatggtaagtagcatagctgcccctgccaaggactctgtggcagggaagattttctgagatggggaagtgggtaggaagaagacaattagtatctcaaattcctagacaccaaataggctgaaatggactttctaagttggactttttcagtctctatctctcaagttggaggttcaggctctggagggaagaagggtcagatcatatcagctaattttccttattccaaaaaaggcaggatttgtgtgtggcacatatagtttggtttattaaaaatttgagtggtctggccaggtacagtggctcacgtctgtaatcctagcactttgggaggccaaggcaggtggatcatttgaggtcaggagttcaagaccagcctggccaatatggagaaaccccatctctactaaaaatacaaaaattagttgggtgtagtggcgggcacctgtaatcccagctactcgggaggctgaggcaggataatcacttgaacctgggaggcggaggttgcggggagcacagattgttgccactgcacttcagcctgggcaacaaagagagactctgtctcaaaaaaataaataaataaccaactaaaacctatgtccagataacagaatagcttttgttcttcagctccacataaaaatatcactatagccgggcacagtgactcatgcctgtaatcccaacactttgggaggccaagggggcggatcacctgaggttgggagttctagaccagcctgaccaatatgaataaagcccgtctctactaaaaatacaaaattagctgggcgtggtggtgcatgcctataatcccagctactcgggaggttgaggcaggagaatcgcttgaacctggggaggtggagattgtggagagccgagattgtgccattgcactccagcctgggcaacaagtgaaactctgtctcaaaaaaaaagttatatatatatagatggtatatatatataatatggtatatatatatagatggtatatatatatatggtatatatataggtggtatatatatagatggtatatatatatagatggtatatatatatacagatggcatatatatatatacagatggcatatatatagatggtatatatatagatggtgtgtatatatatatatagatggtatatatatatagatggtgtgtatatatatatatatagatggtatatatatatagatggtatatatatacatatatatcactatagattgattgattgaattagagacagggtctcgctctgtcacccaggctggaatgcagtagactgatcatagcttactatagcctagaacttctgaactcaagctgtccttccccctcagcttcccaagtagctgggactacaggcgcttgccaccaggccccaataacttattatttttttttctttttggtagagacatggttttgctatgttgcccaggctggtctcaaactcctggactcgagtgatcctcccatcttggcctcccaacgtgctgggattacaactgtgagccaccatgcccagaccacataaaaatatccctagaggagtgcgtcccagccccgcgcctgccaggccgtctgtttcgtcccatcccatcctgccgcagcgcgcgccagccatgagctccacgcagttcaacaaggacccctcgtacgggctgtcagccgagatcaagaaccggctcctgtgcaaatatgacccccagaaggaggtagagctccgcagctggatcgagggactcaccagcctctccatcggccccgacttccagaagggcctgaaggacgggattagyttatggacactcatgaacaagctacagccgggctcagtcctcaagatcaaccgttccatgcagaactggcaccaactagaaaacctctccaatttcatcaaggccatggtcagctacggcatgaacaccgtggacctgttcgatgccaacgacctgtttgagagtgggaacatgacgcagctgcaggtgtctcttctcgccctggtgagtaaggccaggactaaggggctgcagagcggggtggacatcggccttaagtactcggagaagcaggagccgaacttcgacgacgccaccatgaaggctggccagtgcaccatcgggctgcagatgggcaccaacaaatgcaccagccagtcgggcatgaccgcgtacagcacaaggaggcatctctacgaccccaagaaccacatcctgccccccatggacaacttaaccatcagcctccagatgggtacaaacaagtgtgccagccaggtgggcatgacggctccgggacccggttgacaccaagctgggaaccgacaagtgtgacaactcctccatgtcgctgcagatgggctacacgcagggcgccaagcaaagcggccaggtctttggcctgggccggcagatayatgaccccaagttctgcccagaaggcacagtggccgacagggctccctcgggcgcgcaggctcgggggaggtccctgaatatcccccttactaccaggaggaggctggctactgaggctcccagcacgctctctccccatatcatctccccgtctgagtttctgggtttttctgtgttttcatctttttttttcttaacctgttcagtgctgccaatcaacccagggtctgtgagtggcggtgtgggatcagggaggtctttcttcccccttgccttggtccttcgcaggactgagccaccaggctgtggggtaaggggtcaaagccgtatccccatacgtgtagggtaaaggtccctgctggcacgtccaggctgtgggccgagcagtgctggggagaagagacctgggcttggagggacccagtccccgaaggtttccggttcccttgtctcttccccattgtgtcagccaatcagtttgtggtttctgtacccgcaaaagtttcaggaagtattaacaaaagaaaaatacttttttttttccccgaggaatggggcggggacagtggagagggtgctgggaaatgagtgccctgggaaagggggcctggccacaatgctaaatatctcaggctcccaagtggctgcatttccctagaaccaacagacctcagaccctcagacctgccctggggcccggtgaggaaagtgaggcccgtagaaggaagtggaattctgcgttgttggggctaagcctgactccttctccatgctaaccaccccctccactgtggcctcagtaggttttgttgttgttgatgttgttgttgttgttgcccaggctggagtgcagtggtgcgatcttggctcactgcacctccacctccctggctcaagtgattctcctgcttcagcctcccaagtagctgggactataggtgctccaccacgcctggctaatttttgtatttttattagagatggggtttcaccatgttggccaggctggtctcaaactcccggcctcaggtgatccgcccaccttggcctccccaagtgctggaattacaggcatgagccaccatgcccagcccctcagtaggttttaaggagcctccagccctccttctccccttctgggcctgaccagttatactgctccgtctcccctggccacacgccccaccgagtactgcacagggacccccacccaggggccctaccccatgagataatgtgaaatacgactgtggaccaaacgcagtaaaacctctgttggtaagaagaaaaagatatatatatatcctgagaaataatatatttatactcatagtttattgttccaattattccagcttttatctttctcaaataagaagagtgcagaataagccataaacagaagttaaacaattctttaatattttcattctattgccctaattataataccattctatgtgattaaaaaaaaacacacacatactgggcaaggtgactcatgcctgtaatccctgcactttgggaggccaaggtgggaggatcacctgaggtcaggagttcgcgaccaacctgcccaacatggtgaaaccccgtctctactaaaaatacaaaaatgagccaggcttggtggcatgtgcccgtaagtcccagctatttgggaggctgaggtagtagaatcccttgaacacgggaggtggaggttgcagtgagccaagatcatgccactgcactccatcctgggtgacagagcgagactccatctcagaaaaaaaacaaaaacaaaacaaaacacccacccacacacacacacacacacacacacacacacacacacagagagagagaacaatcacattttacttctgatttttaaatttgtggtgatcccttgcttttattaattggctggtcgggtacagtggctcaggcctgtaatctcagcactttgggaggtcaaggcgggtggatcacttgaggtcaggagttcatgcaacatggtgaaacccagtctctacacaaaacacaaaaattagccagatgggctgggcacgctggctcactcctgtaatcccagcactttgggaggccaaggtgggcggatcacgaggtcaggagatcgagaccatcctggctaacatggtgaaaccttgtctctactataaacacaaaaaattagccgggcgtagtggcgggcgcctgtagtcccagctactcgggaggctgaggcaggagaatggcatgaacccgggaggcagagcttgcagtgarccgagatcatgccactgcactccagcctgggtgacagagtgagactccgtctcaaaaaaaaaaaaaaaaattagccagatgtagtggcgtgtgcctgtggtcccagctactcaggaggctgaggtgggaggatcacttgaacccaggaggcagaggttgcactgagccgagatcatgccactgcactccagcctgggcaacagagtgagactccatctcaaaaaataaaataataaaataaaatacgataaaataggccaggcacggtggctcatgcctgtaatcccagcactttggggggccaaagtggatggatcacctgaggtgaggagctcgagaccagcctggccaacatagtgaaaccccatctttactaaaaatacaaaaactaaccaggcgtggtggtacatgcctgtgatcccagctactcaggaggctgaggcaggagaattgcttgaacctgggaggctgaggttgcagtgagccaagattgcgccactgcactccagccacttgctcttgcaacagagcaagactccatcacacacacaaaaaaaagattaaataaaacaaaatgaaaaataaagtaataatttttactcaaaatgttaaaggtgttgctccattgtctttaatcttccaatgttgctgttgagaagttcaatgcattctgattctttgttctttgattgtgacctattaaagatttaaaatctttttttttttttttttcgagatggagtctcactttgttaccccggctggagtgcagtagcgtgatcttggctcactgcaacctccacctcccaggttcaagtgattctcccaggagtagctgaractacaggcaggtgccaccatrcttcgctaatttttttattatattgtagagatagagtctcattatgttgcccagtctccaatttttaaaaaatctcagcaatcctagctttaatttcctagcattcttttttgttctctgaattctccttattcatagtattctggttttgtgtgattgttctgttttttttttttttttaatggatagagtgctttctcttatttgtatggggtataatgatggtcttttatccttggaagtttccttctacttcctgcattatttctgtttcctctggtttccttttttgcctatttacttattttttttttttttgagacagagttttgctttgttgcccagattggagtgcagtgttgagatctgagctcactgcaacctctacctcctgggttcaagcaattcttatgcctcagcctcccaagtagctgggattaccagctcgcatcaccacgcctggctaatttttgtatttttagtagagatggtgaggtttcaccaagttggccagcctggtcttgaacacctggcctcaagtgatctrcctgcctcggcctcccaaactgctcggattacaggcgtgagccactgcactcggcctatttactttgatttatctttctctctctttaatgttgaaggctctcctcaaatatctgacattagtatttaagcttgaagcattacaaactgattgcagactcttggcttgtggacttgtggtcctcacgataggaaaaccaagttcagttttttgtttgtttgtttttgtttgtttttgtttgtttgtttttagacatagtctcactctgtcacccaggctggagtgcagtggcgtgatctcggctcactgcaagctctgcctcccgtgttcacgccattctcctgcctcagcctcccaagtagctgggactacaggcacccaccaccacgcccggctaatttttttgtatttttagtagagacggggtttcactatgttagccaggatgatctcgatctcctgatctcgtgatccgcccgcctcggcctcccaaagtgctgggattacaggcatgagccaccacgcctggcccccaagttcgtttttttaagttggaatgagtctcgattgtagatacatgtcttttacttagggctacttcacttctacaaagtagaagcttcctaactctgggaaacataaacctgattctgcttgctttttttttttttttttagacagagtctcgctctgtctcccaggcaggagtgaagaggcacaatctcagctcattacaacctccacctcctgggctcaagcaattctcctgtctcagcctcctgagtatctgggatcacaggcgtctgccaccacacctggctaatttttgtatttttagtagagacggggtttcaccatattggccaggctggtcttgaacgcctgacctcaggtgatccatccgcctcggccttccaaagtgctgggattacaggcatgagccaccgcgcccggcctgattctgctttctataattacacattagactttgagaaggtagggtgtgtagggctgatttctccaagaatttataaattacatattctaaagaacttatttcccatarcacttgacttaaaaacttaccatgaaacaaatggcatcacctggagcttaagaagttcattgaaggcctggtgagagacaatagccaagaacaaataaagagggcagaagtccaggaatgtatttcacatagccaaccaaaaaaacatgaaggccaaaaacaaagcaaaaccagttaccactaatctttttttttttgagacggagtttcgctcttgttgcccaggctggagtgcaatggtgtgatctctgctcactgcaacctttgcctcctgggttcaagtgattctcctgcctcagccccccaagtaggtgggattacaggtgtgcgccaccatgtccagctaattttgtatttttattagagacgggccaggctggtcttgaactcctgatctcaggtgatccgcccgccttggcctcccaaagtgctgggattacagatgtgagccaccacacccagcctgagttaccactaattttaagaagataaacattataaatgacaaaaaaattaagagtaaataaagcttttgtaaatatacaaaaggaacctgcacacttctcaaaagtcctttttaaaaaaatctctgcaggaagaactaattcctcagtgcatcattaaagtgaaccagttaatgttgatgaagctacaaataatggctcagttgtaatacagtggtgaagcatctaattcccccaaaagaccaataaattataaatgttttatacaaaaaaatcttactatgagcagtaaactcagtaattgaatttgtataaatatttgtcctcagaaaacatgggcttttaaatttcaatctgacagatgttttgagatagtgattggtggaaccccaatcatggggtcrgaccccaacaatagtgattaatgggaccccttaactttctaactttgtctaccagtggcctagaaagactagggaagtgttgggagtttctgtgacttcattttgtaaactctgactagcatcacccctagacacagcaagaggggcccctgcccttaacctggcttgtcacaaataaatgccaaaatgcgtttataaaataacacacagatacctttgttacttggaatccagcatacaggctggcattgtatgacttacaaacttaaacatccactcctggaaataacacctattagaccccagggaaacacttcacatcacttgctctatgtctacaaaacaaaaggcaaccgaatacaaatgccataaagctttatggtttctgcagctgttgaagtaggagaaagaccttgctttggaatgtggggaggattccaaacagcagaaacagataaaagacaaaataattagcttgtcaaataagttcttcctctcagtgtgaatgcaatagcttttggcttaatagagtatcttttcctagtgtcaagcattttcttgcttttcttaggacaccagagatgcccacaaattaggatgaaatttcagatgggtagctgaggaacattttgcaaaactgagcaattttatattattcttaaatgtttgtatagatgtaacaaagtatgatactgattcttcacatttgtagcaaaagggacatggaatgttaaaattgcagatagttttttttgtttgtttattttcttgagtctcactctgtcacccagtctgaagcacagtggcgtgatcttggctcactgcaacctccacctcccaggttcaagcaattctcctgcctcagcctcccgagtagctcggattataggcgtgtgccaccatgcctggctaatttttggattttttagcagacacagggtttcaccatgttggccagtctggtcttgaactcctgacctcaggtgatctatccacctcagcctcccaaagtgctgggatcacaggcgtgagccactgagcctggcccaaattgcagatagtttaattctattaaaatgtttaataagctttcattaaattttctttttttctttctttctttttttttgtttgagatagagtctcactctgttgcccaggctagagtgcagtggtgcaatctcggctcactgcaacctctacctcctgggttcaaacaattcctctgcctcagcctcctgaatagctgggattacaggttcctgccaccatgcccagctaatttttgaattttcagtagagatgaggtttcaccatgttggccaggctggtctcgaactcctgacctcaggtgatctgcccgcctcggcctcccaaagtgctgggattacaggtgtgacccaccatgcctggccttcattaaattttcaaaaaattaaattaaaaaacttcagccttatctacataattttaattttaagttttattaattttagttmatttattgattgttttaaagttttaatagataatcaaggttacaggaaatacagcttttggaaatatctgaaaataatttcctgattattttacaatttccataaaataatggaaatgtaatataaaatggaaatgtaaaggttttttaacatgcaccttaattcatattttatacactgtagggatcaaaagagggctttccccttggccctctgaaggttcactgaaaatcactgtcatgaggcagtttaatggaagagcaggcatacaaatttatttaacaagtacacaacgagcacaagaggaaaatcacaagtcatcgcccacccccattgtgattcagaagcttacagaccacgctagcaaaacaggttgtggaagtagggaaaataattctattactagggagaatgaatggattagggaacagggattaaactgtacatgatcctgtgaaaagctatgttcaggtgtagttacattcctggccttccagggaggagaaaaaaattaattttttttgatggtctggatcttaggaagataaaggaactcctgtttttcagagggtgggggaagggaggggtgtaagtcagagagactttgagacttcctcagttcaccaagccatatatggtggtatcggtttctgagctccaacaacactttctttttttttttttgagacagagtttcactcttgttgcccaggctggagtgcaatggcgcaatcttggctcactgcaacctccgcctccccggttcaagctagtctcctgcctcagcctcccgagtagctgggattacakgcgcccaacatcgtgcccagctaattttttgtatttttagtagagacggggtttcaccgtgttagccaggatggtctcgatctcctgacctcgtgatccacccgcctcggcctcccaaagtgctgggattacaggcgtgagccaccgggcctggcccaacaacactttctaaacaattactttttctttctttttttctttttttttttagagactctctcgctctcttgcctaggctggagtacagtggctcaatcatagctcactgtaacctcaaattcctgggttccgagcaatcctcctgcctcagcttcccaaatagctgggactacaagcatgagccactgtgctagcccaattagttttttaatcatttaaataacagaataagtatagttgagattataacataaaaagtaaatacaggccaggtgtggtggctcacacctgtaatcccagcactttgggaggctgagaggggggatcacttgaggtcaggagttagagaccagcctggtcaacatggcaaaaccccatctctactaaaaatacaaaaattagccaggcatgttggcaggtgcctgcagtcccagctactccagaagctgaagctccagaatcgcttgaaccagggaagtggaggttgcagtgagccaagatcgtgctactgcactccagcctgggcaacagagtgagactctcactcaaaacaaaacaaaacaaaaaagtaaatacgaaagcagaattcaaaagcagttaaaaaaatttcaaaagaaaaaataaatttaaaaacattcatagaggctgtctggttaaatattttaaaactgaaataatgaaagtgttcatgaaccacataaaatctgcaaacagcacattacaaattctttgtttactgaatatttaattactgatgaaaatgagtaattactaatggaaaattacattggcatattttgctaggacaatggtcaaccacattgcttataaatggccttgtccatttccattaagttcattgttcatcttttcttatttatttattgtttgtagagatgggtctggctacgttgaccaggctggtctggaactcctggcctcaagtcaccctcctgcctccgccttccaaactgctggagttacaggtgtgagccaccacacctggcctgtattttcttatttattttattattattattattatttttgagacagagtctcaccctgtcacccaggctggagtacagtggtgcgatctcggctcactgcaagttctgcctcccgggttcatgccattcttctgcctcagcctcccaagtagcggggactacaggcgctcaccaccacacctggctaatttttttgtatttttattagagacagggtttcaacctttttagctagagtggtcttgatctcctgacctcatgatctgcctgccttggactccaaacgtgctgggattacaggcgtgagccaccgggcccggacgtcttttcttatttttaatcttatatctgctgttaaatatttaattcatcctgggaaacattatcactaaatgtgttatattctgagccttttattctctcttattagtttcacttccttctgttacttgtctttcacctatgtctgataaactgaaatacagtactgaacattgaggagagtcttatcaaataaaattatattttcacttctggtatatctcctctatccatattagttacaccaaagaagacaaacagcttttgggacagattatacatagttacttttgtttcacagttaaacttaaattaatgtaattcaaggccaggcgcggtggctcacacctgtaatcccagcactttgggaggccaaggtggacagatcacctgaggtcaggagttcaagaccagcctgaccaacatggagaaaccctgactctactaaaaaaaaaatacaaaattagccaggtgtggtggcgtatgcctgcaatcccagctactcgggaggctgaagcagcagaatcgcttgaacccgggaggcggaggttgtggtgagccagattgcgccattgcactccagcctgggcaataagagcgaaactcgttctcaaaaaaaaaaaaaaatttaatgtaattcaatgtaatctgaggcattacagtgttgtttctttcttcattactttagcttctttttttttgagacggagtctctctctgtagcccaggctggagtacagtggcgctatctcggctcactgcaagctccgcctcccggggtcccgccattctcctgcctcagcctcccaagtagctgggactacaggagcccgccaccgcgcccggctaatttttttgtattttttagtagagacggggtttcaccgtgttagccaggatgatctcgatctcctgacctcgtgatccgcccgcctcggcctcccaaagtgctgggattacaggcgtgagccaccgcgcccagcccattactttagcttctatttcttctgtattttgcagtaacagtactgtatctttacatggtgttttacagtttcttttttttttttttcttttttggacacagagtttcactcttgttgcccaggctggagtgcaatggtgtgatctcagctcaccccaacctccgcctaccagattcaagctattctcctgcctcagcctcccgagaagctgggattataggcgtgctccaccacgctcggctgactttgtatttttagcagagacgggggttctcctttttgttcaggctggtctcaaactcccgacctcaggtgatccaccagtcttggcctcccaaagtgctgggattacaggcgtgagccaccacacctggcctacagtttctaaaacatttttctcacttataatctctgaagtcccacaacagccttgggcagtaaaacttgcattgacattagagaaaatcatgttttctttttctttcttcttttttaaatagagatggggggtctcgctatgttacccaggctggtcttgaactcctgggcttaaagcaatcctcccgcctcagcctcccaaagggatgggattacaggcattagccactgtgcctggccaagaaaaccatgtttttaacaccatcaatgtgacagatttgtgaaaccagaggcatgctggtaaacgtttaacaaccggtaagtgtttaacaatcacccagctgagggtatggagaaccctgattgtagtttgccaatttcactgatgtaaatgctcacaacatggctgctttcaaaccaccactgtgatgtcaactgactccccaaatttctgagagtgtaacgattagttctcagaaacagtaggaagccagttccagcacactacttggtcactttaaattgaatctaaggccaggtgtggtggctcacacttgtaatgccagcactctgggaggttgaggtgggcagatcatcagtccaggagttcaagaccagcctggggaacatggtgaaatctggtcgctactaaaaatacaaaaattagccaggcatggtggcacttgcctgtagtcccagctacgtgggaggctgaggtgggaggatcacttgagcccggggaagttgaggcaacagtgagttaagatggagccactgcaccccagcctgggtgacagagtgagaccctgcctcaaaacaaaaacaataacaaaacaaaaacaacaaaaaaagtttccatatcttgtttttataaggaaagtggtttttgttcctttctttttttcctcttcttccaggctagactgtggacagattaagccagcttcaataatgagaataaagactttactctatggtcaaaatgggttagaaggaacctggttccctgaatgatctcatggaacagagctgcctactcaccctagactacctgtctacctctgtactgttatgtgagagagaaataaaccttaatctttgagttattgtatttggggatctctttgctatagtagcttagtgacttctcagaagaggcaacatttaagctaagatctaaatgacaagaatgaataagccataccaagagggagagaaagagcatttcagataaatgaaaatgacctaaagggagacaggtcagtacggatggagtacagaaagtgaatggtagagatgaggttggaggataattaattcaggaccaaatcaaataagggtttgaaggccagggtaagaaattttgatttcaattgtaatgggaaacccctggagaattttaataagtgtcataattgggcttattttttaaaaacatcattccatcttgggctatggagacatttaaaaaattaaaacaaaaaaaatcactctagctgctctgtgttaaaccaagtgaggtggcaaagtgaagacaaacactactatagttagaaagctactgcaatagttcaggggagctaattttgtgctctgaactagggtggtggtagaaatgaagacagagagaacaaattcttgaaatgttttagaaatatcaacaaggctaatgatgagttggatgtaggacaatgcaggaaagagtggaatcattgatgattttgagtttaagcaactgctgtataacgaggtgatttgttgtgtaaagggtggaccataaagaggtaagaagagataagagtggagacaaagaggtcagtggaaagcttgagttgaagacagctgagtttttgtaatttgttttgcttttgtggggaggaggcagattttgctgtgaaaagtaacagctcttttctaataatgttagcttctatatgcttgttaggcattcaagtagtcaggcaagtgtctcaaaggtttgaaattcaagggagatgtctgggttggagatataaatttgaaagtcattaatactatgggcaggtcataaagccatggactggatgaggtaggtcacctagggagaaaatgtatgtagaaaagaggacacaggcatagccaagagcactgcagcattgggaagaaaatttccaaggaaaaccaaaaaagagagatgtcacgaaagcctggagacttttttctagaaggaaggcatagttaattgtgtcagaagccattgaaagattgagtaaatggggattgagaccattcactggtctcaatggctttggcaaccactggctttggcaaaaagtgggccttgagaattgccatttcagtcaagtgctaggaataaatacccatttggagaatttgaaggagagatgaggaggtagggaccacacatayagacatgtctttacatcttttagggagttttgctgttaagggaagcagagaaattcggtgataactgaaggtagaagtggggtcaagtaaggatttttttaaaatttgagtaagatcttaataggaatgattactaaagagaataaagggaagatgtacaatcagaggtatcttaagaaggcctagtgaatgggagtcctttaagtgttttatgtgcaaagtgctatagccaatgaggcatttttaaaaaactggaaatctgggggaaagatggtcactcttgatagaaatggggctgagaagggaaatcattttagaaataatggtaaatgtattttggacatattgagttcaggaaaatatttaagcaaagattaaccaacttagtacaagggatttttatttttattatttctatgatctgaagagaaaccagagtatacaaggaattttgagcttcaagataacaagaaaaatgatatattttacaaaggaccaatccagttggtagactatttaaattatcctatatcaaattaataaggatttactttgccaagattcttggcacttttatattaacttaaattgcactgggaaaaaagcataatagtagttgagaagcaactaattataagcaattataagccaaattatgtttataccacaattagtgtttgaggtggtttagtaggcagattcttcagtaagaaccatcaaataattgaacagcttgtaaaacacagaaatacttcttttatctttattccaagtagagtaaccacattcttttatcattataaaataagcaacatttattatcttttgtcccaatccgcagtttgagttggatgcttataaaacatggcaagagggctgggtgcggtggcctcccagcactttgggaggccgaagtgggcagatcacctgaggtcaggagttcaagacaagcctggcaaacatggtgaaacctcgtctctactaaaatacaaaaattggccgggtgtgttggcatgcacctgtaatcccagctactcgggaggctraggcaggagaatcgcttgaacccaggaggcagaggttgcagtgagccgagatcacgccactgaactccagcctgggcaacagagcgagactccgtctcagacaaacaaaacaaagcaagagtagtttatgtacctagctcacaacatagcttctttcaacaggtttcacggagacacgtgaaccacgttcttgtaagacaagagctattctacagggtatctagagtgcaaaccsaaaccatgtctttttcagtggatttttcatgttgacatcatcttatttcactttggggaaagtttttttctaaggatgatagcgaaaagtccttttgtcttgtgacaatagcaatttttatgtcagcttgggtttttttcctcccatattcccaagtaaaagtaataactttgttaccagttttgccatctgaggttaaactgtttgaccatggcttgacgactattttatacttaacacttataaaatattagactgatagttatttaagttaccaccagtgatagctctggaatccctgttttattaatttccaggtaaatccttcttaagcacatgggaagayagcactgtaaattttggggggtaaggagaacctccatcaattaatacatcagcttgataaaattcaaagaaaaacatgatcaaataagttcagattatatttaacacattcagtttctagaagtagttttgctgaataaattcccaccagttgagctaatggagcaacggagctgccagtgcttcccggaggctgctgtgctcagccaattcggaggcatggcgagccacacggtgggaggtgggtaaagccggggccctccaaggctgggcgccacgttgcttttctcttctgaaataggaagacaatgcttctggctattgtataaaccagccgaggactgctttcattcgcacatcagccaaggcgtgagcagaattaaagcgccttctaattcgacccctggcaacgtgcgcgtcacggacaaatgtttagttttaacgcctggctgcgttcgccttgggaaaacacacttttaagaatggccaagtacctcagcagtcgcggtgaactgcacaagatcaaaaccaccacgccaacccagcgctggccaccgtccccgctgaaccccgccaacacccctaaggacccacccatgttttctgctaatcattttttttttctaaacagctctgcacagcctttcctcattccgttcccgctctccccacccactctgcrttcgatccgaggtttctagtccccagctggacatcacagcaccaactcccactcaggagccggccagagcccgagccgcagcgcagtgggcagctccccgcgctctccgccaggccctcggccagccagccgccactcggccgcgagtgattgacaggcggcagcagctataggccgtggaggtgggacgatgcgtcacttcctggtcttttggggggagccgggatatataagggcggtgctcacgcagcgctctcgcttacacagtatggccggcgacattagctagcgctcgctctactctctctaacgggaaagcagcggaatacaagagactgaactgtatctgcctctatttccaaaagactcacgttcaactttcgctcacacaaagccgggaaaattttattagtcctttttttaaaaaaagttaatataaaattatagcaaaaaaaaaaaggaacctgaactttagtaacacagctggaacaatccgcagcggcggcggcagcggcgggagaagaggtttaatttagttgattttctgtggttgttggttgttcgctagtctcacggtgatggaagctgcacattttttcgaagggaccgagaagctgctggaggtttggttctcccggcagcagcccgacgcaaaccaaggatctggggatcttcgcactatcccaaggtgggtccccggggcgctcgctgacatccgggcctgggggctgtcgccgccgccgaggcaccagccacgggtggagcccgagttccctcagctttcagttgggggcaagtctgcggcctggggtcgcttcggcggccttggaaggtgcgcggtttgggggagagcggccatgtccacgcgggccggagccggcttctcccgccgtggttgccgcgcctggcattgccctgggggaggggaggaggccggcgcggccgcgtgctcaggtaacgtcccgcgctgggcggcgggcggcgcggcccggggtggttttgcggcccgcgcctcccgacatttccctccgtagtagttggcggcaggggccccaggtgggggtcgggggcgcctgcgcgggttgcctccggcaggtgtggctcggcgggcttagtcaggcgctaattcgggcgtgcccgcttcggggaatggagggcgggagcggcgcttgttcttgcctcgggcgcggataggaggggccctcccggccttgtctgaggggctggcgaagaggcctcccacccgcggcggccgcgggcagcatgtggcgttcgggcggcggggattgggcgggagcagttatgtcgcagtggcggggccccaccgctcccctaacatgctctgcgccagagccttttcggggcggctgggcagacggcgcagtccccggggccgccctcgacacggccgctgaggccgctgggggctgctccccaatctcttgaccttgggttgtgtaacctgctacggagccggcggagcggggcgggagaggtgcgggtggagggaggcccgcctgccccaggacataatgcctctaatgccttaagcttgagcaaaggaatctggggcccactcccactgcgggccgtcacgcgagagatacttgggctgaccgcgccgaagaggcgttttagttggtattgctgtggaaatccatgcttatataaaagcccagagatcccgtggatgcttaggccttgttcctggcggcggtcgcaccggtggccaccaatggccttcctaggccctgccaccggatccctggctcctctgcgcacgagtgcggctagggtggcggtgcagcggagtaactggcgtggccagcttcattgagaggcggcgaccaatgggctcctgggccgcactcagagcctggccccagggtgtggaccaatgggcgttttaggagtgttagctgttcttggagctgtcccttgacaaaaagcaactggaaaagggaatccaggcagacacgtgctaccgagactttaaggcacgacgggaaacccggtttctagcagtgtatcttgaacgattccattgtagaaaaaaatactagtcatagctaaaatgtcacacgtctcatttttttcaagcttcgtgtgacacttaaaatgtctatagcgcttactacgtgccaggctcacgtgagattataggaagcggactttggtcatggagaagcttagtatttccttcatttcacagatgagaaagatggtatttgtgatagacgtttggtaaaacgattgtgatcaggataattaacctagaaaatcttggcaagaacctagaaaatcttgggtaagaacagtcctagaaaacgaataacagaagttgtcactttggctttttaaatgtttgagcccttaaataatagtaagtacatgttcttaataaagggaagaagattttgttctccccaagttcttggcggtttggctgtttagagcttcctgagtcaaagtggagagaggaggaagaggctttttacaaagcagcctgctttctttaaatgtttaagaaccctttttactttgtactttaatcagcccaaattgttttactgctccagtgtggcttttaaaatcatggccaaagttaaactttgaaggacaaaatattcccttgtgtagatgatttagtgccatccattttgtggacatgtaacattcattgaacaactattggtagtacactgccacattgtaactgttgtagataaagcaagttaagcaagaactgaaaaatatgttgatttaactaaggtcccgtgataaccttcgttggaacatttttcagtgaccactcaagtggttaggttatttaccaggatgtttaaaaaagcctgaaatagtaggtgttccttgaatcacctaaaatcaacagcctagcaaagagagtatcatggacggagtccggtcggtggggacatggggccagccccagagaccccagggaaggataatcggtcatctagaagaataaagcgtgacatgttttactcaaatgacgtgattaagtgcatagcctctggaataacaagatttgaattcaaacagcatttaatagctgtgtgagctgtttcctcatctgtaaaatggagacaataatggtacatagctcatggaagttgtgaagaataaataagttaatatgttatatgtagtacgtaaactgttatctttaacactttaaagacaggatccctctatagcccaggctggagtgcagtggcaggatcatggctcactgcagccttgacctcctgggctctattaagatgtgaataaactaaaagtaggttaaaagatgaacagatggaattaaacaaatctgtttataaagcataataaacatagggacataaaaacgattaagagaatgaaaggcttaaatgtccaaagagagcattagtattgatgctaaagacaaggataacaagataaggatatgagggagaaaaaaatcctggaaaaatagctttccaaaactaatgcaagaagaaatggagaacccaaaacagtcctagaacacctaaataacttgaatcagtcaatcatctaggcccagatgatttcactggagtgttctgtataattcaagggagaaaatatccaacttttttcacgcattcttctgggaaacaacatacttccctcggttttctcatcccaaagtctgaaatatttttttctcctacacgatatttacctttcatatttagatctgcaatccatctggaattgattttgtgtgtggtgtgagggaatacactttaaacaaacttggctcatcagtccaagctttaatgcttggaatcttttctgaatgtacacctttttactaaacactgcttccctcttgtagaccatttaagatattttatcttaagtgaacaaattatgtaatactgagaaatttaacaaagaaaaatcttttatgatatagcttgggttaaacaatactgttggagaaaagcagcagtccaggtatatccagatgaataaaggacaattaagggagaggcggtttcttaggggtaacctgcagttttctctgatttttcagattttacggatgttgaataaaaatcagtgaccatttaaaaaatggtttagttgttggatcaaagtgctgtaacaaacaaaagctttttataagacatggcagctttagggagggtgagagtagtaagaaggaaatctgttagaaaatagaaaattttgctgagaaaagaatgatttttcaggactggaaatcctattactgtgctttactcagattttataaactaaaacataatttttagtaaaggattggggcagttgtaaagatagtcatacctcagcttaactttccccaaactcatgacttatttgactacatcattatgcagcattattgcaatatcaataatttacattgaaggaatttacaacccgttgccaaaaaaccttttagtgtaatgtttcagagtagaaatgcttcctactaaagaataaagcttctcgttacattcctcccagcagtttcaaaaaggtttcatggctgggcttggtggctcatgtctaatcccagcactctgagagaccaaggagtttgagagcccagtctgggcaacatagtgaaatcctgactctacaaaaaaaattgaaaaattatctgtgcgtgctggtccatcctggtgcgtgtctgcatcccagccactcgggaagctgaggtgggaggatttttttgagccattgggggatcgaggctgcagcgaaatgagattgcaccagtgcgctccatctggtggcagagtgaaaccctctcaacaacaacgaaaatatttcaactgttgtttacaaaccatgtatctttaagaagcacatgttgaaagtagcagaaaactgagaggagtatcccgatttggggtaaaaatttgagatagagaaacaataatgtgatgataataggttcatatctttgaacaaaagggaggaggcttatttctcaggttatctgaattcactgccgcaggaaggcaccctcagaatctaacttctggtcagtctagctttactcaagaatgatctggttttaggatgccttttacctaaagactgcttactacctggggtagaggcaccctgatgaatgtactgtaatgagagcctctaaaacagacctaaaaatatgaggtaagagcagaattgagaagctgcagtgactttggataaattacctgaactctgaaaccagctggttttacattaggaagtaatgagtaatctaatgacctggaagcttttcaaataaaaatttgcaggcatcatcctcagaaagtgtctgacctaactgggtatgggaatagcatctatgtattgagttttcaggtgattagagcataaccctgcactaatgggatccttctgtatttaagttcttggtcttttttttttttggacagtctcagtcacccaggttcgagtgcagtggtgccatctcagctcactgcaacctccgcctcccaggttcaaatgattctcctgcctcagcctccctaatagtgggtactacaggtatgcaccacgatgcctggctaatttttgtatttttagtaaaagacagggtttcgccatgttggctaggctggtcttgaactcctgacttcaagtgattgagccatcgcccctggtccctttgtgcattttttaatcactttttgttgagttgtgtgtaggtgtgtcttttactttggatattgaccccttatgaggtgacttgcaagtattttattctgtaggttgtcttttcactcgtttcttttgatgtatagaaatgtttacattttaggttttcaagttccatttgtctgtttttgattttattgtatgtcatatccaagaaatcattgccaaatgtaatgccctgaagcatttaccctatgtattcttctaggagttttattcgctgttaatgtttaggttgttgatccattttgagttaatttttgtttatgatgtaaggtaaaagtccaacttaattttgtttgcatgtggacatccattttttcccagcactatttgtggaagcgatgtttttccctgttatgtaggcttgggactcttgttcaagatagttgagctcagtcatttacttctttttttgagacacgct

SEQ ID NO: 98007 - DNA, 39177 bp, Homo sapiens
aggaactgcttgttcatatcctttgtccactttgagttaaatgcttatcctattgatttgtaggcagccatttatattctggatattataatatctgacgtataaatgaattaaataaataaatggagacaataagccaatattaaaaaaaagctacattactactctgtatcttataccaaagaaaattcagatggattaaagataatgaaatcataaaagcataattcattcttatggaagtctgtcagtttcttgttaatttaataaagttatatttttatgttgatgaaaaagctattcaaataggcaaaacagtagatacagactatactagaaagctagtataagagtactgtgacaaatgctaggtgcagtggctcacgcctgtaatcccagcactttgggaggcctgaggtcaggagttcgagaccagcctggccaacatggcgaaaccccctctctactaaaaatacaaaaattagccgggcgtggtggcaggtgcctgtaatcccagctacttgggaggctgaggcaggagaatcgcttgaactccggaggtagaggttgcagtgagttgagatcacatcactgcactccagccggggtgacaagagcaagactccgtctcaaaaaaaaaaaaaaaaaaaaaagagtactgtgacaaatctgtcagtgaaagcaactgaaagtaactatctttggaaatcataaacatggtaaatctattattaagtgaacaaagtaagttacaaagtgatatttacaattccatttttataaaaaacacattaaacattagctacattagaaggctatattaaataatatttacaaaggtcactctaggtggctggcgtttgtaataggaaaattaaatagaattttaaaaaatgcattgcttttgaagatattccttctaaacagacataaagctggttaagcttctggaaagaagggactgtaagttattcatttttgtatccttcaagtgtagagtgccctatacataatagtcacccaacagacctttgttgaaggaacgaaatgggaaacgtgggatttacaaacatcaatctctatgtcagctgcttaaaataatcaaatccaaaatatttgcaggagaatcatattgttccccaagtaacatttcattcataacattaatttacaattaggaaatgttatgcttttaacaaacaagaaagaaatgcaaggttcttaatgtgtatgagagccttgcatttcttgagaggtagtatagcgccacagtccagtatagctcttaaccactatgctatattaccttgtatggatctagggatccaggaaaatacaaatcgaaacaatgtgttgtccaaactggcaaaaataaaaaagattgacctagtcaacgtggaaaactgagtactatcaacactgttggcaggagatcataatggtgctctttttgtagtgataaactcttctcacaaaaacagatactctgaaagaggtagggtgagatggggtgaaggtgatacaagaataaaatcttataagattttgtttttgaaacaactgatggcaaatacaaagcttctactgaattcactcagaccatgcctaatttatgcatacagtattcacttttatgcagtatctttaaattttttttttttagagttgggggtctcgctatgttggccaggttggtcttgaactcctggccttgagcaatcctcccacctaggcctcccaaagtgctgggattacaggtgtgagtcaccatgcccagccaagtcctcatgtttctatctactatgggcatatgggcaagcttccatgtgaacaaaaggggcacatatttgtagggaccttaaacacacatattatgttagtcacagaccattctattgtaaactatactaaatcatattataaagctataataattcaatcaaatgtgtataggtacaagaagagacaaatagatcaatgaaacagaaataatccaaaaaaaaacctatgtcttatgaaaatttagtatatgacaaggatggcatttcaaaacagtgaggaaaagatggactaactacttagtaaatagtactggaactattggctatccaaacagcagaagtacttagatgtctaccacataccaaatgtgtaaatacgttccaggtggattaaagagctaaacattgaaaagagaagaaaagataggatatttagttaatcttgggataagaaagatctttttaaacaagatacaaaatgcaaaagccagatggcaaatattaataaatttgaggccaggcacggtggctcatgcctgtaatcccagcactttgggaggcagaggcaggcagatcatgaggtcaggtgtttgagaacagcttggccaacatggtgaaaccccatctctattaaaaatacaaaaattagctgggcatggtggcatgcacctgtaatcccagctactcaggaggctgaggcaggagaattgcttgaacctgggaggcggaggttgcagtgagccaagattgcgccactgcattccaacttgggcaacagaccaagactccgtctcaaacaaatgaaataaaataaatttgaaatgacaatttaaaaattctgttcaacaaaaaaggagacaatacattgaaagaaaatatttgcaaaatacataataggcaaaggattgatattacaatatgtaaagaacatctacaaataagaaaaataaacaatagtaaaatgggcaaaaacaaaattaacaaacaatttacagaagaaaaagaaatggccaaatagaagagatgtgcaacttctctaataataacaagaataacactggctaaagcataatgctcactgtggatcaggtgcttttctaaatgctttagatatcaactcatttactcttacagccccatgagataggtactattattttccccatcttacagataagaaaattgaggtgaggttaaagcagttgctcagggacacacaactaggagcgcagggctggaattccaatgcaggcagtatagagacatagtccagtatagctcttaaccactatgctacattaccttttcatggatctagggatccagaagaataccaattaaaacaatgtatcatttgttatccaaactggcaaataaaaaagactgacctagtcaacgtggaaaactgagtactatcaacactgctggtgggagaacataatggtgctctttttgcagtgataaactattcttacagaaacagatactctgaaagaaagttcagaaaatctatttacccaataaaaggtggacaatagtcagtttcttactaaaacattaattttactttttcctgaaggtagtagcatatcttaacattcctgcttttcttttctctcttactccacaaatgcccagtaaaggctaccagaggatgagcacgccactgctctcatgctaactttttgatgtggctgcttcccttgtgcttcaggatttaatcagctcaggtcaagcttttcccaaaagcctgtttctggatgcactaacatcactgaatcggttgattcgcttttccttccagtgggctgacacagattctgctttctgaaactcttttccgtatttgtctcttatcctctttctcaacaggttcaagagctaagactgaaggtgagaagctcaaacttttctgctttgttcaaaagccattaaaaaggcctttcttcttttcagcaatacggtatttccaatcagatgaaaacgttgcttctgaaatctctcaattctccagtttccggtttactgtctacaaagcatgttaagtagcaatattattacattgttagatgttaatagtataaattatttgagggaaaaataaaatccatgtcatagcttttccagcacttcagtcatccctatatacctatttgatccattatggagagaaacacagaaaggcacatggagctataaaagaggctgctactaaaccaaaacatgaaagtactgaaagtttatcacagatggtagtatgcaaaggtgatacagcctttagtttttttaaaaagcatagatcaatttccattcgaaaaatctcacttgtacatccaaaacttcctttttgcactgtggtctaaaatgtattaccaacttggtttctgattatagcaaagcaattaaatttgcaagcgtgacatggacattgtgaaaacgcaacagaataccaagaaaacagtgctttactaaacctccaagggaggagccctgaagtggtgactaccttttcactgagggagcaatttaagaacgttcgtactatagattacagataggatgcatgaagagattaaagttggcaggagaatggaaaatttgaatatccaagtttgcattttttcatctgcatcatatggtgacagactaacacactccacgaaaacacaaagcttccttacggagaggatgcaaaaggggcaccacaacaggcccgaggcaatgatttctctaccccactctatcctaccgtggccccagcgacatcacaccattgctggacagctccaccacagctaggcataaccgcaccgacaggagcgagcaaagacacctcggctaggagtcccagcgcgaggcaccccacacctaagcctatggtcctcatcttgctggaaagaaaactgaggcgctgagggggaagcagtgaccaatgcctgagaaggccaagagtgttaagacgaggtcgatcttggacttctctttccccacctcccccaactactccagtcctggaagaagccacaagtttggaagagaagttgtggaaaccagacgggggtggggtgcggtgcggtgcggtgggggacctgagagagttttaaaagcactggtatttgtcccacacaaggtcgcccgctccaagtcactgttccccgctccccgggtaggcttatagccaaagaggcttctaggcttcgagatcagcccaccgcgccccctcagcccttctccgcgggccgcagccccatcccggcctctgggtcccggccggggatcggaacccagccggcttctccgacagcgtttccgacgcccggcacctctcgcagccccgtcccccaggctcccccgtctccacccgccaccccccggcgctcccgtcaacgtccccttcctccctcaggacgccccttggggcgcctctcgcgccgggtcccgccgggtgctcggcacgctgttcctttcctctcccctcccgcggcccttcttctgtggggcccacctggcgcggcccccgcccccggccagtctcctcagtgagcggccgcctcccaagtcctcccggccccgccccgctcccggacggatacagtttgaagcccctcaggatctccctggcccgctcgtccttggctgacatgatgcggcggtcgccgcccgcggctttctcactctggtcggcggagcctcgcagacggtgcccaggagccgaggatggagccgcagcccggcttggagacctcgggctagcagccgcagcggccagaccaggaccggcctctctctcccctcagctcccgcttctgatcccttctccttccccctagcctcgcagtgccctcctggaaccaatggaaagccagccttggcgattggcatctcaaccagccagtaggagcgcgcagcggcttcgcagggggactgttaacgtcaatgggaagggccctccccgggaagtcccataggacacaatattcatctggtgttgttgcctagagtttgtcccagcggagggttggcttcggatctgcagaggctttagggacctgctccagccactgagcacactagccgtctgagacggcagctgagttgcactgtgcgacgcgacagagactacatttcccagcattccagcggcgcactcgggggaccacagatcccagcgcaccacaaagaggcccggggactacaaatcccagcatcccctgcactcggttcctctgtaacttagactccagtgtgccgcgcagtgtgcgcaaattcacaaacccgcccgctgagttggtcgtttcggaatcccgagacttgaaacccaacgggaagacccttctcamcctcaaaagaagatgacagcccgcagagagttaacttctgtttacatggaactcagacatctgcaaatcatggtaaggctgcaaacaacaaacaaaaacactgattaaaccgtgaaagagaacaaaatgacttcttcaaatcgtgcttgtttgttggtctgaggcgccttttacatgtatttcagggttttttgctgtattcctggtttgcaccgggagagctatggattgtatactcagaatatcaaaacataaagggactttgctaatctatcccctgttgttacgtatgaggaaattgaggcccagagaggcgaagggattggccacagatcacagcaagttcgggcagagttagaattcagccctaagtcggctgacttgcagtctggactctttgcaccacactaaggaggtgatatttttagcagcatggcaatgtgaattattctccttgaacggttttcctatccactgttgaaacacccagaattaggtagcatttatttggtggatttcttgcgagtgagggagtgtgatatttatttattttcagcctaggtaggatttggtgttttgttttttgccactcaaggtgacatttaatgtgatttcaggaagtaggtaaaattacagtgtgagccacggtttccttggaaacctcctctgtccttctcttggccttccttcctctgcctgtccccactttcacccatctgggaactcacccaattttttcttccatgtaattcaacaaatatcttttcagcctgttatttgtcaggcactgagtgggtaaaaggtgaaggacatggtcactgccaccaggaagatgaacatatatttagggaaataaggagactccactgagattcaagatggagtgtgataaaatggcataaagaaatgacatcagaatgctaaggaggccctgatgaaaaggttcattgcagctggcaaaactttaatggacaaggtggcatttgaacttgaattttttttccatgttaaaaaagttttttttttgttaatgaggtgtaacatacagtatgggaacaattttcacataggtatacacccctgtcgccactacccaaatcaagatatagaacatttctagcacacttagtgctccctcccaatcagtattacatccttacatattgagataatcactcttctgactgtatcaccatagatcagttttctctgttcttgaattccagttaaatataataatacagtatgtacagtatgtgtctggcttttttactttatcagtatttttgtgaaattcatccatgttgtgtgtagccttttaattgctgaatagtattctgttgtatgtttataccacaatttatcttttccactgttggcgggcatttgggttgttattttttggactattattagcaaagycgtagtgagcattcttacatgtttctttttgtagacacttgcacacatttctaggagaggaattgctagtgtgtagggagggtatgcacatgatcagtgatagtagacattgccagtttttcaaaatgattgtaccaatttacgcctttgccagcaatatgagagagttctaggtgcctcttatccttgtcaacacaagagttttgttgtcagtcttcttaattgtagccgttctggctgaatgtggtatctcattaaggtatttatttgcatttttcctgatgttgagcacctttcaatgtgcttgttggctagttgaacgtcctctttcgtgaagtgcctgttcttttcccaacttttaaaaattgggctgtcttcttattgatttgtagttctttacagtctggatatggagttctttgatatatgctttgcagatatcttttccaaggcatggcttgtcttttcactctcttactggtgtcttttgaaacaaattatatttttgagggatggggtctctgctgtgttgcccaggctggaatgcagtggctattcacaggcaccagcattgcccactgcaacctcgaactcctgggatcaagtgatcctcctgcctctgcctcgcaagtagctatagtaagactataggtgtactccactgcatctgacaagcagaaattcttaattttaacacagtgcaatagttccgtgytttttattatggttagtgttttttgcattggatttcagaaatctttgcttttagagttggcaggttttttacaggctgatagaagagcattccaaaaaagagcaagcttgagcataggtgtggtgtctgagagggagggtgtaagttgtgccgggcatgggagtttggactgagaagggggagggggtggggtgcgacaaagctggagttaggagggaggcacactttgaagggctttcagtgcagccactgcctgggcgtggtggctcacgcctgtaatctcagcactctgggagccaaggtgggaggatcacttgagatcagggaagaccagcttgagcaacatagtgagaccccatctttaaaaaaaaaaaaaggaataaatttgccgggtgtggtggcacgcacctctagtcctagctacttgggaggtggaggtggtaggatcccttgagcccagaagttcaaggctgaggtgagctatgatagtgccactgcactccagccgcggtgacagagtaagactctgtctcttaagggaaaaaaaaaccaaaatactaaatccaaattgcagccatggagtctggacattgttctagaggaagtagaggcattgctggaatttctatgaagtcacactaaactcacttgtcttcctctcactctcatatttgtccctcctcttccatagccctgttcacttaacactagctctagacagctctggcctcccagcgcagaatcctgggtgttatgctccctccctctccttatattcaactggtcaccaagtcttatagattctatagtctaaatgtctccaacagtgtcccttctttttcatccccaattgccactacctttgtttttgtttgtatttttgagatgcagtctcagtctgttgcccaggctggaatgcagtggcgcaatttcggctcactgcaacctccacctcctgggttcaagcgattctcatgcctcagcctccagagtakytgagattagtagtgcatcaccatgcccagctaatttttgtatttttagtagagacagagttttgccatgtggcccaggccggtctcgaactcctgacctcaggtgatctgcccaccttggcctcccaaagtgctgggattacaggcgtgagccaccgcgcccggcaacacaatctcttatctagaataaatcggtcacctcaccggaggttttccctgcctccaattctctccacatccaatccactcctatagcacctagcatgatcactctaacaaggcaattattcatacctctccttagcttaaaaagcctaagtaattccccagtacctggcatgtggattccaagacctttgatgacctgactccagctctgtacccctcatttctcactcttgaaaaccctggggtcaaaccactctgggtttctttttgacatcagtatatgctgcacagtgcgagcctctgtgacaatgggcactaccccccttttttcccctttttgtctgtttttttcttccccaacctcttctgtgcttccaaagtgttgtcatatcttccccatagcatttaacacattggagcttttgagggtaagagctttgttttatcttcatataacttttcaggacataataggtgctaaagaaatgtttttgaataaatgaatgagttggttgatgctaggctcctttgcatttgtcctgtctcatttctgcattctaacgcacgataggcaaatagggctgtttttctctctcattttcaagacctgaaagactgtggtgtatacaggaatcagtttaagtgttcaattatgtggcatttcttagccatcttcccaggggagttggtaagcaccagatgcaactctatcaatgacattttggtcatagaaccattgttggcttaacccatctcttgcttattttaaaacattttctgaatagaggtcaagaacatcgtcttcggcctcagatagcctgggtttgacaaagatagcaagctttgtcactttctgacttttggacttagttaactcacctgaaaaatgggaacaataatacaagccacagttatgagaattcaacgagataatgcatgtacagcacctggcacatggtaaaacgctcaataagtggtagttagtaggcttaatgtatctcggtgcccaggggtagcgcagtagccatggggagctcctgagagagaaagcacagcctaaggggaggatttggggcccgggatggcgatggcgacggttgggctgcagtaccgtctaggccgcattcctctccttgggcccctagccaccccctccccgcctggttcccgggctgcagactcttccccgccccctcgctcccacttccccaccggaggtcgaaggctgtaaacgcggcgggtggaaccttgtgtgggcggaacgcgagtgcagcggtgggaggcttccgggggagctgcacgggcgacgggtcggcggagacagaaaagcgccggacgccggggtgatcatggacgcttgacaacctgcgggcaggcgccgggaggccgagccagcgactaagaggaccgagaggtggcgtggacaggtaggagctagcgagagggtgggccgagcggggccggcgctccaggctcggccagacgatccggcttagagcccgccgccaaggaagcccgcggccgtgcccgccccgcccccgccttggggagcgcgtcccgcggctcctcactccacgcctgcggccctgcttggagcataccgcccaccgtgaggtctgctgcagcttgcgaccctcagcttcagtgctgtggctgctttcgctctcccatccccaaaggctgctcgtttgcccctctccagtccatccaaatagcgccctcccctgacgggaatttatctccgctctgtgcctagcctctggccctcccactccagaagaaagcgactgtctccgtctctttacattctctgcgcccacaggctttgctccttaagccgagattttttgaagggacagaagtttctctccatttccctaccccctctccacccccacctcctaacattgggactctttgcagagatccccatctgtctcttcacacgggtcctcttggaagggccttttcgctccttccctctttaccgtcaccgaccctcctttcttccctactcctttccttcttcctcgtatcctctccccttctcttttccctttcccttccgtcctcaaactcgttgttccccagcacttcattgtttttcctgtgtctggccggaccttcttaggtaaccctaagtgaggcgacatacttgtttctctaatactgtgaaagggcaactaatctgtgtgcctgccaacacaaaacttagttcctcttgcaccaaactattcttcaaattgttctttgctgcactctactataccgtttttcgttcattttgtcacgctgctctaatatgtatcattcttggaggagaaatcttacctggaactcctgtacactcagcgtgtaattagattacacaattgagggaccctcctgtacttaatgtcttcggagcgctgatacaatattttcactgttttcccaaatctttttatcgttttcttgaggtttttttttttttacacattctgaagtcacgtttggttaaaatgtcgtatcaggaggaggccgaatacagggatttttccccatggtcttacacagcatgtatgttcttagtttgaatatatcgctacttttctttcaaaatgatgtctccctttatctgtgcttacttgacttgattaaatgagacatctttcttgtctggttttttgttttccttatctgtctggctgtagattggattctgatgacacagtgggagctgtaactgattgcttttgcttacatccggtgcctctgtgtataggcagtatcctccatttcttaaccagaatgtataaacgaggtggatataaaacagctgctgagaaactcatgtgtttttctttaggtcctggtcaggtttaaggacttagaaggtgttgcctctggaggagggacaggtggaagtgaaatgacttttacaaagtgtgtttcaaacaccagaatttaggacaagatccttttaactccaggttgaactccacccatctcataaggtggtcattgcatctggactcaggaactgttttttttttttttttttttgagacagtctcgctctgttgcccaggctggagtgcagtggcacaatcttggctcactgcaacctccacctcctgggttcaagcaattcttgtgccacagcctcccaagtaactgggactacaggtatctgccaccagcctagctaatttttgtatttttagtagagatggggttttgccatgttgcccatactggtctcgaactcctcacctcaggtgatccacccgcctcagcctcccaaagtgctgggattacaggcatgagccactgcacttgtcctgttttttctttatcaacactataaaaktaaagtattctggtgtttgattcagcactgaataggcacagactttgcaaaggagaaggaagaatgactgacacaattttcttttggacagatttcaaggccagagaatggcaggggaacagaaaccctcaagtaatctcctggagcagtttattttactagccaaaggtaccagtggctcagcyctcactgctctcataagccaggtcttagaggctcccggagtgtatgtctttggagaacttctggagctggccaacgtgcaggaggtaagaacggtttgcaaacaatttctctttattctaagactctgtaattctccaggtttccaaagaatttcagtgctgaagtattgtgaacctgtgaggtaccctattgtgagacagatgggaattggtggggcagagggagagattgagagaatatccttggctccttttatccagtatttttatcttaccttgggtaaaattagattgttgctaataataacctaaaagatagtaaaaaagtcaaattgatcctgataaattagaaaagtagtgctgtaagcatgggctgtttaataggagtagattcatgcattcttaaggaccagaaacctccagtgcaatatcgataaggaagattggtcagggacacacagcagaaacatactgctattgaacataagatggacatgaataggagtgtattgttcttgaggaaaagggcagtgttgtgctaaatgtgttagatgtgttagatatgacatgaaaagctaggacatagttcattttacttgtttgcttgcttgttattaaaaccttggatatccagttttggtcattgtgcctcaaaaatgagaagatccattgaacagaaggaacaaagagatgtaaagcaatctatacttctcaacctctactttccaatttgaacatttttatttatttatatttattcacttattgagaaaagtctgtaagcatctttattgttttgtggggtggaggctggtgctcaggagcttttggcggattggtggggcaggtccccttcctcttcatcctcacaggcttctggctatgcagactggtgctggctctgtggaagctgccatgcatagatctgggtgatggtacttcttgtggagcatgtgctggatgctgttgagagtggccccggagttcttggtggtggcgatttgcatataggaggtggtttgcttttgttgggcagtttatcaccttcatgaccaccacaacacctttgctgttggctccacacccacagtcagttttaacaggagtttcagtgaatcagttagttgtaaccaaaggagttgccggccttcagtttattggattcggtgctgtgtgtctgcctattcctcttgatggggaaactggagcagttccctacagtccagccatttcaggtgcccaattatgtctcctctacctgtgatgttcagagatgagaagagccacttttactttttcactgtaaatttttatttaatgtcagccttgcttgccgaactataaactctgtgaggaggtctgtagtgctcaccattgtttctttagagctgaatacgtagcctgacacacagtaggctttcaataaaaatttaattyaccagaagtggaaaatgagttttatgaagaaaatttcagaaaactgagttcatttttcaacacaagagatgaccaaggggtaatatgttccttcaggttcatgaacagcctgcatgaatatgccaagtagttgttttgtaactgtggaagattggctaagaggagatggatggaaagtaaagtcagaaagaccttattgatttaggccagtgggagaagtgttggagtatctgctctggagaaaatgctcttttccggctagttttgttaattatgtttctgaaaaggggggctagattggatggtctttaccaggtttcttccccttctgattcagggacttcaggaggtttgtggtaacctgagaaagtagcctgaggtawtatggtgctggagttctccatagggtgcttagcagaccacctttatctccccatacattgcgtttttccatatgtgagctgagaataagctggttgcctttcagtgatctgaaattatagatgcatttcttggaagctttattttttttaatggctaaaattgagtagtatcgctattgctgtctgtagactaccacttgctattcctgtttagagtttactgggcttggtaagttggaagggtaacaggagcacgtttgtgattttttttttttttttttgagacggagtctcgctctgtcgcccaggccggactgcggactgcagtggcgcaatctcggctcactgcaagctccgcttcccgggttcacgccattctcctgcctcagcctcccaagtagctgggactacaggcgcccgccaccgcgcccggctaattttttgtatttttagtagagacggggtttcaccttgttagccaggatggtctcgatctcctgacctcatgatccacccgcctcggcctcccaaagtgctgggattacaggcgtgagccaccgcgcccggcccacgtttgtgatttaaacaacaacaacaacaacaacaaccagttaacgtaattgacagcagagaagttccaggcagaacagtggctctttcgtttttcttctacacatggctttttgccatcagcatcagtgaagagtaagtaattttaatgaacattttgatttggggcagactgataccctggttttctgtcccagcctggctttctgtcataccttatgatgtgctggtctctcccagggttcatagtccacgtgtagtcctgaaacttggaaccaaccctgagctttgttcactttgggttggtggtggctcatgccatacctaccaagctggtatgtagatagggctgctccagtctttgttttaatgcaaacagaatcttgagaagatttgaactccttccaatgcttaatgctttgtatgtgtgtgtgagagaaaagcagttcgttgggcatgctgtatagaaagtaaaacattcctgagagagagaaattaaattyggggctttaataatcttgtttattttttcccgaagaaccagagttggtagagaccccaggggccaagtaatcaaatagtacagaataaacagccatggcatctttgacacatgctcacccgtcctctgtttgaacactacagtgattggtagacagtttggtctgtggtgaactttttttttccycttcagcttgcggaaggagctaatgctgcttatttgcagttgttgaacctgtttgcctatgggacatacccagattacataggtgagttggtgaagatccttcaaaagacttgtgttaattatgttgctcagtttggaagaccatcaaggtttgagatataaagcatggggtagtggggagacttcttgacctggctgcctcccattttgctgtgcccggtgggtgacctcacaaagggaatgttccttctcaccttttatattctagtgggtcaaatggggcctgtgtgtgctcatccacaaatgtagcccttgtttgttttccagatgagattcttgaggactggtgtttgtagggctcttggagtgctgtgaagtgcagaatacccacctgtagaatgtttcaacattttaaatattatcaaaataataccagcatattgaagaaaatttggaaaatagactttttaaaagtcactcataggctgggcgcggtggctcatgcctgtaatcccagcactttgggaggccgaggcaggcagatcacttgaggtgaggagttttacaccagcctggccaacatggtgaaaccctgtctctactaaaaatacaaaaattagctcggcgtggtggtgggcgcctgtaatcccagccactccggaggctgaggcagcagaattgcttgaacctgggagatagagactgtagtaagctgagattgcaccgctgtactccagcctgggcaacagagcgagactctgtcaaacaaacaaataaataaataaatgtcactcatatgttgctcagacatttggatgctggacttttttgtgccccttatgtttgtgttttgtattacataggtacaactatgtatacagttttatgtcttgcttgtttcttcccacttacaaacatttatccatattttaagtctttttaatatttttaatatttcataatctacttagctcattttctgttgcagggcatttgggtcattttaaattataatctgaagtattaggttgaggtatttgtatgtccaaacactaacttaccttctacccaaagcatttttttctggctttcctacccttttttaatggtatgactgtagcctgatactcagggccttcgctgcgatatccctgacttcttctttctccctggtcacttctactttgtgctgctgtcagactggacagtttgccagttcctggtacaccacatttttttctgaccttccctttgttccagggaatgtgttctgtttttctgtccttgcttactaaagaggcagcattgcacagactctgttagcagactgcctgtagccagtctggctccacttctactagttgtgtgttcgttgacaaatgaagtaaccttatgcagctcaatttcctcgtctgtaaagtgggagtaacaatacaagcccattattccttacctacactcctcgaagttagatgtttcagaatttagaatttttgggactttaaaaaggtaatatgatgcgcatgcctttttatgtaacactcccagaggaatgtggaaacaagtgggataaaaagcctgtctccgtacaggttagaaattcccaccaggtgaatttcagcaccatgcttaagaaaaaatcagtttggatatagttttttggaatccagaattatcgttaaggaattgaggacacttggagtcttgcgggttgttgtgaagatgaactggatgtgtgtatgtacgtgtggatctatgcaatccacaagatgtaaagcttgctatttatgttagctgctgcagctgctgcccttgctgttattatcatttatggttattattgaaattttgcctctttctcaaggctcaactcaaactccatctcttccatgaattctttctttttatcttctgtactttccaaatgatactgttctctttccctctcccctcccctttcatctctttctcttacccctgtctcctccccatccctctcctcctctcttctagtagcttgtacctttcttctggtagttctgccttggatttgtagctatggaaacatctgattgtaagaccgaggacaagtccagggccatgaagttgcacacctccaggtggttggtggccctggagttgtgccatgcagcagccctggcaaagcccatcttgttcatccttgattcttctcagtacagagcattgcacacaacagatgctcgatgaagatatgtttaatttaattgaatgtcacaaggggcacaaatagtactccattaagataattgccacatcattttgcttgtttgctttttaggagactaaactctgtgtttgtagaaactgagtcttttcttctttggaagtacatagtcttccaaagaagacaggaatatttgtcaaatgaataagtgcaaagtcatgatagtgattcagtagtagatttggtttggggagttggtgagcttattccataaaagaaatcctaattttattttgtgtcttgatttttgtggtgggtgggactgagcagccaacaaggagagcctgccagaactgagcacagctcagcagaacaagctgaagcatcttaccatcgtgagcttggcatcaagaatgaaggtacggtactgagccttctcttgtcttcctccttaccccaagtcagctgtctcattgacatcaatgaaggaagtcccagctgcacataggagagtcacatcataaatgcataaaatttgcttgacagaggaaaagataaaatggtgtagaaaagtactccccattccatacaggaaaagtatgcccagaagtgattgactcagcaggtcttagtcctggcatgctgtggtgccgcatgtggcatgatcattttgccatattaaggggagactgctgttaaagatatacatttttcaaatagcaaggcatctcaaggcaagttaacagcttmatctgttgctcagtacacagtgaactatgcccatgctggaggaaaaacttgctatgtyggacttgctagattttttkttgttgttgttgttgagacggagtctcactctgtcgcccaggctggaatgcagtggtgtgatctcagctcactgcaacctctgcctcccagattcgagcgattcccctactcagccccaagtagctgggattacaggcgtggaccaccccgcccggctaattttttttttttttttttgagacagagtgttgctctgttgcctgcgctggagtgcagtggcgcaacctgggcttactgcaacctccacctcctgggttcaagtgattctcctgcctcagcctcccgagtagctggaattacaggcacctgccaccatgcccataatttttatattttttagtacagtcagggtttcatcacgttggccaggctggtcttgaactcctgacctcaggtgatccacctgcctcggcctcccaaagtgctgggattacaggcatgagccaccgtgcccggcctttttaacttaaaaaattttttaaattgagacaagggtctcaccatgttgcctaggctggtctcaaccccctgacttcaagcgatcctcccatctcagcctcccaaagtgttgggattacaggtgtgagccactgcacttggtttttttgttcttggattgcaatttcagttgctgaaatcattttatctgatctaatggcacatttctgattctcagcctagcatttcaggtgggaggcctattttgttgtgaaatgaggacctgaccttttttcttgtactgattgtggacttctcaagtgtagtaaagaatgttggtacagcccaataaagaactattgttggggaattcatattggttgtgtctgagaaaacagatacaaacttcagggtgacatctgagctggcagtacccattggccacctataggtagatatgctggcctgcaagttttttttgtttgtttttgcactctgctgggcaagtagccagctctttccagtgactgggatctgttggagatttatggtgatctagcaaagtctgaaagcttccagaaggtggcagagtggcatatactcagtagttccctttctctccactggtacaagtttttaggatctctacaagtatgctgcagcatgtgaaatctgaaggctgggtgaagccaaggaggcagagaaccaggaggttgctttcttagatgttgggtcttctaggtctcatggttcatttatccacctcttgttgccctagctattaataattaccactagcctgcgtttcccgagcctagaggcagctgttggctatgggagtaatacctgcattttcgctaatgcttgccagatggtttttataatgatcacatggccttatctacagtgtatcccctactccgtgttgctgaaagacctggagatgcggaatctccgggaactagaagaccttatcattgaggctgtctacactgacatcatccagggcaagctggaccagcgaaaccagctgctggaagtggatttctgcattggccgtgacatccgaaagaaggatatcaataatattgtcaagaccctgcatgaatggtgaggctaaaaggaggagggggatatctagcatgtcttttgtgcctctycttgcaaaaatgtgattccctggtgtcagctgagggtttggggtgggcctgtagctacctgggagctggggcttagtgagccggagagtggagctacatttgtgatcacagctgtgtgataacaggagtcatttcaggcctcctggtgccttggttgtaaaatagttctttccttaaatgcaactgggagctatttaaaagtgggctataaaatgcccagggttagcaggtggagcctatgtgtcctagctgtgtgaggctagtcctgccctttccaaactcacgctcaaagtttgaccaaactcaggaaggctagtgtttgtaagattctttctttgtttttattattttttctatccctgttgaagttaacatgtttataagattcttcggataaaagaacttacgttcaaaatcagtaacatattgggctaatgtttgtaaaacaccgtgagggacatggaagacaaggagtgggtcattttaacttggaatacagactcatacaaagaatatctgataactatactctggtatataaaaagcattgggacatttgtgttttctctgttttaatggaatttgatatttgtaagagctgtctcacattctacgaggattcactgtggagtgatttaaattatttggggcttataaagccagatggactgattggagaagttttagctcagttttgaaggaaggccagggttagagtatacctggaggtgaggagagtgtgttcccaggcaggcacgtggcatgttggaagccatgaagcagacccggtgagctttgtacacaggttcgggagggagagagaatctctgctcatccccgagagaagcatatccagagaggagcagtgccactttgactccttggggcctgatgtcccctgagtttccctcacttcagctacttttacaccccaggacatgtgttgctcacccctcaccccaagttctgtcccaaatatagccccaaacaccttctctatacaacatctgccacaagtggaagttttcaatagcttacaaaacttagaataaataagaaataaacttagaaataccccaacacaaaaatggtctggcacacaaaatctagtttctgaacctgccaaagttggctgtcctattctgtttttgagatggctgacacagctttttatgtccatagtctggtttcctgtttttaagcccccaatatgtttgacatagaggtgccagactaactggttaccatgggatgtttactagtagaaactcttacaactcatgtttaggcactggaggtagattgaaacaaaattcataggctgagggctaccacatatatggcaaaatgctcacactgttggatcttaagtggagggtatggggatattcattgtagtctttcaactttttcatttttaaaaaaattaatagtggggaaaataggaggaggggtatggcaattaggaagtaacttaaacttctgagaaaaggcggaatcttcaaaacaggatgcttttaggaaatctttttttgtttgttgttttttgagacagttttgctcttgttgcccaggctggagtgcaatagtgcgatctcagctcaccgcaacctctgcctcccaggttcaagcgattctcctgcctcagcctccctagtagctgggattacaggcgtgtgccaccaggcctggctaattttgtatttgtagtagagacggggtttctccatgttggtcaggctggtctcgaattcccgacctcaggtgatccgcctgcctcggcctcccaaggtgctgggattacaggcatgagccactgcgcctggcctagaacatcttttttttctgttgagaaaaggattactcagtgccatctataaaatctattctaccttcttttttttttttttttttttgcggcagagtttcgctctgtcacccaggctggagtgcaattgcgtggtctcagctcactgcaacctccgcctcccgggttcaagtgattctcctgcctcagcctcccaagtagctgggattacaggcacccgccaccacacctggctaatttttgtatttttagtagagatggggtttcactgtgttggccaggctggtctcgaactcctgacctggtgatccacccacctcggcctctcaaagagctgggattacaggtgggagccactgcacccggcctgtcctaccttctttaatcgtatgtgctacaaaaccatcttccatgagatacaaagttgaaaattaaagctgtattctaagaaactagccccagactaccatatttgtctcctaatgtcctgcattatgtatttagaagtgcttgtctttgggaaggagtgaacgggcaagagatgtggcagagggagtattaaaggaggtccctgtaagatactggggagagctgttggggaagaatatttctgagcctggaagagacttcccaggccattctgcagctcagggctggttttctccattgtaggtgtgatggctgtgaagcagttctactgggcatcgagcagcaagttctgagagccaaccagtacaaagagaaccacaaccgaactcagcagcaggtagaagcagaggtaaggaaggaaaggaacatktgtttctctctccakgcatacctgtttattcgtttgcagtgtttatgtttttgttttgcgaatcttggtgtagatgaaacaagcagtcaccaacaagtgggcctgggctaggtgctgggttacagggatgagtgtgacacggctcctgctcttggtgttctgtctcttttttctgattcctggtcagcatagggtgatcaatcaggcttggagaacagagaatgttgtagtttcagtacacatgtactttgcagctatagagcaaaagaaaatgagtttggggatggatcttaaaaatggatagaaggatggtggtaagttaccaggtggagtggagggaggggtacagctgggcaggggcatgtggggcttcaaggccctgggagtgttctgcttcttaagttgcgtggtgggcacatagtttcattttattctttctctgtgaactgtacatatatattataaatgtgtaaaatgcatgacatgtttcatacggaaagaagaaagggataaaatttggcagatgagctgcaagtgaagtaaagaggatgtaagtgtggttttagtgacacctggttgttgaggaaacttttagcttcttggacagatgtaggccccagcctttgcgttatgggcatttgtgtacctgtaacctgacacatgaagtgacctcacttcacaatttatttggagccctgcactgattttccttagcattggaagttcttttctagtgtgaatggagtttgaagtattaatgatgcttaatgaattttgaaaatcaggtgtctaagagtggcggagtgggacccgtaattccagctaagaagcataagagatgagtagatggtgcctttcaaagggggatttgtgaaatttggagtgattctctatactgttatatgcactccttgaaaataaaacctgtgtcctatttgtaagacgagcgtcttgtctcatgcctaacccatagtaggtactcaaatgttgaactgaatatttctggcacaccataaaagtgtgtcagtggactgctgaactctgcttttcatgaacttgagctaatttttttgaatacacacacacaccaccctatatacatatactctgtggatgttcaattcatagaccatgtttaatcygactagccaaggaagtatgaggctgggtgcagtggttcacacctgtaatcccaacactttgagagaccgaggaggaagtattgcgtgagtccaggagttcgagaccagcctgggcaaggaagtgttaactatatttaacattagtccaaagcaaagacaattaggaaaataagcttgctgcttttctaataagctgtgcaacaaccctcttgatgatggtggccttttctctgacttgggattgaggtctgaacaaagtaggaagggctaaccgctttctcctttctgtttattcttccctataaatcaaactctgtacaaaatgaggttgggaggctaaccacactacctaatctttggtatcaaggtcattaacaaagatgaatgatacttgttttagaattttgaactgttcaagtttattttcattataaatagcatcagacaaaagaaaggcgggtgtgcacagagctattgtagacacttggctaaagtttgaggcacaccgtgtagttacacaacagtgtagactctttaaattttggttatttaaacacagagggtgggtgtgtgcacgagcagagcctggtgctgccagcaggtggcggtaaggatttaagtttgagaaaaagaaatctgagcaaaaggccaaggccacctccaccaccaattaaaacagtccattgacgtaataatcttttagaaaatctgaaccagaccaatatggtctgttccctgagcatggccaaagcttaggaccttgtcattttttccatttagcaaatgcatgatctggctgctaagtgttgaaggctgcttgccacctacttgaggcacacagaagatactcaccaaatagctactgacttgaaaggaaaagaaatctacaaagaatcagggtgattctgtcgtattctgtttgtatttatgcctctgttacccttggcctaacttttaaaagccaattttgtcaactgattggtgatcttttctttatttgtccttaaattagattgcttgttttcagagggaaaaacgtgatgtccccctcctgaatcttataacaacagctttcttctggtgagttgtagctttaagagccctccttcttaatgaagtcagccctatcacagactgccgaagaatattctctccatttaggcttttgtggaaataacccatattagttcctagttccagcatacctgggggaccattatgagctgtttcattatttctgaggaagcactgtggtggggaggtaatacttagagcattacaaagcactttcacatttaaatttgattttggaaagtattttctttttgagacagagtctctgtcacccaggctggagtgcatggagtgcagtggtgcaaacacagctcgctgcaccctcaacctcctgggctcaagcagtctttccacctcggcctcccaagttgctaggactataggactacaggtgtatgctaccacacctggctgattttttttcttttctttttttttttttttttagggagaactgggttttgctgtattattcaggctggtcttgagcgcctaacctcaagctatcctcccacctctggctccctctttgttgggattacaggcgtgagccaccatgcccaacctacttttctttttttcttttttgagatggaaattcactctgttgcctaggctggagtgcagtggcatgatcttggctcactactgcaacctccgcctcctgggttcaagcaattctcatgcttcagcctcctgagtagctgggattacaggtgcccgccaccacgcccagctaatttttgtatttttagtagagacggggtttcgcaatgttggccaggttgttctccacctccggacctcaagtgatccgcctgcctcggtctcccaaagtgctgagattacaggcctgagccaccgcgcccggcctcatttttctttatatttggatgtgcctatgtctgatgttaggtggaatgttaatttataactattgctacatttacaaagtaggctgtgttccagtcatggaggtcgtaaagtgtaactggacaaagtaagctctgttttccattatgtagaaaatctcctaggagttagtgacaatcttgagatttatacaatgcaccaaaagtatgcttcctggtacctcttggaaagggactctccatcacccagttctctttttctttgtagcacttttccagttgtgcactgtgtttcctctcgtctgcctttgctttgcccctcaactgaaggaaggtttcctgccccagaaagctctttctccttttgcctaaatatttaaggtctctgatggagctaggctgcatttttgctagcagtgcaatcttacttgaaaatttctgaggttcatgttttgaggagcctgtaagccaggccactggaggaagaaagtcataaggaactctaccaaatttaggtaaaagaagacaagtctgtggtgatgatatttgttgtcagttgaagggtgactgtggaagaggaattggaattcttaagaaagtctacgagaccagaatgggtttaattggttgacctacctgggtggccaatttggagtcctagaaggagctgtctgcggttacaactgcccagctactggaagaagctagttgaattttaagatccccttccactaggagagtctgtcagtgcttcagaagtctcgtttgtgagttgtgtgttgtaaatgcagtggtaaagctgacttgagcaaagtgtctctgtaatggatcccaktgtgagggccatggccctgccccakcccaggccaggcstttgtggaggataaaaggctcatttcctaggcttagagacacttgcccaagaagccctcttttcctctgcaggatgtttacattttgcctcaaagtggtaacgactgtagaggacttagatttgtcagcagtcttattggaggagtgaggtgtgtgcatctgaaacacaaaggagatgcagtggtgtgggaggccatcgaagagggagaggcactgccaggcaagtacagattgaagggtggcagatcagtgtgggctgcagcagtcagggcagtttgtatggaccaggtgctcaactctccaggcaggatcagaggggcaacctggggaggagcggtaacccccggggtgcatgaacaacagaagggcatagggggaatgactgcttccaagtgtggtgtgggggacgagtgtggctgagatggcttgagtgcagggcatgtgttgaggagtgggaaggaaggtacctgatcttggtatttcagaactagagaaaaaaccaagtttttccctgggccaagtcttatttctttttattgcatgtcagggttactgagcccctaaaaaagctgaatgagagcagtttctacaggagaaaatggcttgaggaagtaaataggcatctgaataacaggggaaagtgtccatgcttctgtctacttatttgttcaaaagcttttgacaggatcttgaatctcaaaggcttttaaatagaattgagtcaccatgagagagggaggctgcgttatggtagggagtggcagtacagaaatgaagcagagggtcagcccttctgtgactgcagaaggatgatgcgcgggctccctcaggaccagagtgagaaccatgagtttgtggctctgtgaaggagaagcattggaagtgttgagctttgaaaagaaaaagagtaaaacagcaaagccttgggagtcagttgaactggtcagttgctgagaggctggcagcggagcgttgccgttggtggatgtgccacaggcagagtttgctccttggctggcaggtcagggactcatcactcagcccagccatagatactctgagtccaaagccggcccaaatcaccttgggccactctaaagagagaaataaatgccggttgtcactttctgataggctgataatgactttatgctacaaaaacataggtgaagcggattgaaaatataaccattatttggggattgattaatgccttttccttactcatgcaggggttatgagactgtcagtaaatctaagacatgttaaataatgtagaaaactatttgtagtataagctgatttttttttttttttttgagacagagtctggctctgtagcccaggcaggagtgcagtggcgcgatcttggctcactgcaagctctgcctcccgggttcacgccattctcctgcctcagcgtcccgagtagctgggactacaggtgcccgccacgtcacccggctaactttttatatttttagtagagatggggtttcaccgcgttagccaggatggtctcgatctcctgacctcgtgatctgcctgcctcagcctcccaaagtgctgggattacaggcgtgagccactgtgcctggcctaagctgattgtttagtaaaaattattacacaaataacttgaggaaataaggctaaatagtgcttatcagacaagatgaaattaggaattttttttggttttgtttttttaatttttaataaagctattttgccaaatgggaaaggtaattatttgcttggaaagataccccattttggaaatacagtccttgaaacaaaaacttgtttgttttctaatgtcttatttgattaaaattttgtcagcttttggggagactttaaaacacattccctcaggtaatgttaaattgcaggatcttctttggaagttagaggtaactgacatgcaaataaataaactaaagtcatgtcrttacctcttattatgattttagttcattttcttctggatatttagaaaatatatcaaattggagaagccttagaatgttattttataaagcagtgttccctgagaagtcaaatttcttaatttttcctccaatgtcatcaaaatatgccttagctgggcatgatagtatgtgtctgtagtcccagctacttaggaggctgaggcaggcaaattggttcatgccagaagtttgagaccagcctgggcaacatagcaagatcccatttctattttttaaaaaaagtcttaaaacaaataatatttcttttatcagagaaagagtgataagccattggcttgctccagatcattcactcaccaccttgccaggtgactcactgaatgaggtacaccaaagtggcagtgagccgctgggagggcgagatgcctcagggttctggggttcccagattgtgttttgttgtctggcaggacactggataaacccagagttgaattcccctccctgtttattatatatatatatatatttttttttaaattttatatatatatatatatatatttatatatttccaggcactgggtcttgctgtgtcacccaggctggaatcagtggtgtaatcatagttcactgcagcctcaaactcctggacttaagtgatcctcctgcctcagcctcctgaatagctaggactataggcatgtgccaccacaccaggcacatgtttttttcttttatgtctttttgttgagataaggtcttacttgaatgtcatctaggctggagtgcagtggtgcagacatggctcactgtagcctctacctcttgggcttaagcgatcctcctgcctcagccacttgagtagctgggactacaggtgcatgccaccatacctggctaaaatttttttttttttttttaagaaagacagggtcccactatgttgcccaggctggtcttgaacacctgctcttgagcaattctctttgctcagcctcccaaagtgctagaagtataggtgtgagccaccatgcccagcctgccctctgtaatgactgttccagcccacagtcctctgtcattctctcttcagaaaggctacagcgttgattgaggttacagaagtttagggcatggcttttccccctgtctcaaaatagtgacaacaaaaaacaatttatgatctagttaaggtggattctgcagatgatggctctcctccaggaacccaatttttgtctcaccctcatagcattgttttgtctttgcatttggactgtctcttaccctcaagctcataatattctgactgttgagaacttttgaccctgacaactccttttcactatgtagaaaactggctgggtgtggtggctcatgcctgtaatcccagcactttgggaggccaaggtaggagggtcagttgaccctgggagtttgaaaacagcctggacaacgtggtgaaaccttgtctctacaaataagtttttaaaaattagccaggcatggtggcaagcgcctgtggtccaagctgctcaggaggctgaggtgggaggatcacttaagcctgggcagttgaggctgcagtgagctgtgattgtgccactatactccatcctgtacaacagagtaagactctgtctccaaaaaaaaaaaaaaaaaagactaaaaaagctattacttatttgactgcactgttcttccctaccaccaccatcctcttcctgctgtttcttcctctcaacgaactgaggagcaaaggtttggaatagtcacttttcagcaggcaatatagcagtactgattcaaatgtaaaatgtaaatcgactttgatctggaaagctcacttctaggagtatcttccatagatgttcacagaagtatgcaaaggtaaacataaagggctgttcagagtagcactgaaacccaaactaggaaccaattcaaaaaactggaaaactggagaaccttcctaatagaatagggttcaagtgtcacagaggatatctgttctgacgtggtaaaatgttcaagagctgcttaagtatttacgagtctgtattttgttaagtgaaagaaagctatactgcacacggtagtgtcatagcattttgccagtacttctattacattttcttcatttctcacttagttggctgaagttcatcctctactggtttattcaagaaggttcatggagctgtattcccaaagtttttatgaaaatatttgtggttttataaatgaataacagcagagtgtagaattcttgggtccctctttctgaggacattttaatcacgatttatttcactgttggtgatgtgcctckttgccaaatgttccccttccatttgtttcaaccaggagagcattagtcccacatttttgcttgactcatttccacaaatctgctgtgagtagcccaggctcgtttctgctcatctggatttctgaagagaatttcaggttttcttgcagaggattttagcttcctgtctgaagtgaagacatagtgagagcaagttttggtgagcacatacaggctgagcactccaattctatatctccccaccaggttaccaacatcaagaagacactcaaagccaccgcatcctcctcggctcaggagatggagcagcagctggctgaacgggagtgtccccctcacgctgagcagaggcagcccaccaagaagatgtccaaagtgaaaggtctrgtctccagccgccactagggccggctggggcagctggcactcaccaggcctgggtcaggtggggaggggacaccaagggcccatttcctcccctctctacctgcagtgagttccagacctgcccgtcccctcaccagcgcctccccaccctgttggtactgttccagaaaaactgttactccccctcacccactccctccttccccagttgttcccttcagactcaggggctccaccaatgccatcccaaaacagggtcagacactgcccagcttccctccaggaggttcttgtctctgtgtaagggcttgtctccctcccagtttttcttttgctccacgtcattttgtcaggctggttataagccggaggcagctttaaccagcccccagggatgattgtgaaggaggcccctccccttgtgaggagggggcactcctctccagcccctggtaccacagtcctcacgatggtgcagtgatttctagccaggcgtcaagatgcgctgctttccctctcctgcctcatcccttgttggcagctccagttcaggccgtggagggacgtgatgctgggctgtgtttactaaacccaygggttttcagcctcttaagcccagctccgatctccaattagttgagagcgctgggttgactaacctctggtatctgagcacagacagagggtgctgtgggtctgctgggtggcagaaatggttccttccggcttggcgttctctcctggccactcttcctgctgcctctgactactcagycttgttttcggtgtgtaggccccagctgcccactggaactgccggctaatgcttgctctcccaagatctttaactcctcctggctgcacctgggtagggatggtggcatcgatgcccctctgtctgctgaaggacctgttgctgcttctgtcttttcacccctccttggctgatgacccagagccctctgatgatggcattctcctggcaagagaaaaagacttaactagacttctgaacttgaacagtttcaggttatattttaatttttttttttttgtacaggttctgattctaatacatttcaacatgcttttgtcccccctcgtgtcaatatttgttatagactaatcgccggggatttttcacctggttggagggtgggggtggggtggtgtgtgtgtgtgtgtgtgtgtgtgtgtgtgtgtgtgtgtgtgtgtgtgtktgtaggtcctggactgattaaagttcattgaggaaaaagcacattttacaacaaaaaaataaaagtgtagatttaatgtatgtgactggggtttggggttgcatacctggtggatcttgaggggctgggattagggtggttcaggaaaatgtgatgctgtttccccatgtttagccatggtcaaaaaatggatttctcctttttctaaaatgtccagcaactgcctactgttgatcaaatgttgaagtattcttgtttcccttttaagccaatccatgtgcccacataacattatgcccaagtggagagttcactttaatttccaaagtatgtttcatgcagccccctgtcagctgctctgtggaaaaggggttctgttatgaaataaatgttgcactccctgcatcccatatcctcattggaaattcattactcaggtgtccaagcattccttgttgaggaagcctgtacccacatcgattttaccgccaaatccttttgggtaatatctaggtggaacaaatcttagggaaattttggggaaagtatatttctgaagaagcctaagagtgctgggcgcagtgactcatgcctgtaatcccaacactttgggaggctgaggtgggaggatcatttgagcccgggagtttgaggccagtccacacaacatagtgagatcccatctctgctacaaataaaaccctaagagaagctgaacacctttcaaccttacaggttttcccagctattctttctagacctcaaacagtcactctcagcaagttttctttcattcttgtttttcccactggcaagtagactaggaaacatggtttgacttgtatgaagtctgtgaccattctttatttgattgccccaaggccctaagggtcctctccatgattcaccttccttaaaaataatgatggcgacaataataacttgtctctaaagtgctttacaaagtgtgtttgcatacaataagtcattcagtcccttccacccaaacagccttctgaggttggtaagggtattcagccatcttcgctttgcatatgagaagacaatctcaaagatttgaagtgtcccagtggtaactggcagaaggagaactcttagatctcctgacttgcacatcctgtcatctgctgtgttacattctcatctagagtctgctctccacacttgatccttgctacccctctacctgctgctgttcctctgagagttcatcttgcctttattttgagggagggaggggcaagcccagtgttagtgttgattttgccctcaaggaccctggcggggaagcagtagtgttcccattgtagaggccagaaaagctgcccagtgacacagccaggatcagtcatggagccatgataggccagagcctgagctcccagccactgaggaggggtggcagaggattgtttggccaggtctgtgtgggctgaaggcttggtgaccagggacgacatgatcatctgcaagaccaatgctatcactgccctgaggatgttcttcccccgaaagtttgcctccaatagcacaggcacctgcgtctcagatggtggtgacatctgagtacttggacttcatcagctgcctgtaggaggtgaggtagcaggaggtgagggcaatactcccttcagcttcagcaggtgaaaagtgtggttctcaatgaagttgagctagtgtgtgccaggtctccttctacagtgggtacgcgtcatacaggatcccatcaaagcgaccacctggcaggggagcgccacctccttccacaggactttcaaggggatgaccttgtgtggctgctgctgggtccagtcctggagcagctggaagatgctgtcattgcactccatgatccagtgttcctggatggcgacctcctgcaccttccatattcttgtggccatgccgaagcccacctctaagactcggccccctttggaggtggtgaaggcagcgaagggggttgcagtaggggcgctcttgctgcagatggagccccaacttggaacccgacgtgccagggcccagtccctgcagccatctcacttttcacatacctcatttctgcttgccaaacccacccagccacttaataaggaagcagagagtatgggatagagaaattgtgggaatagtggcccagccagatgttcattgctccactgggactctgataggaggcttggccttcaagctctgcagtttcctgtctggcaccctggcagctgggctcaagtctaaaatgtgcagaagtgttttatagataaatagaacattccaaagagatggcctcatcagcagtgagacatcttagggaaggagacaccacagtattaaagagaattacctcaatggcagtgcctgtgagctggcttgagccaccttctttacctctgagctttctgccttctgaagccctttttgctctttctgttcagatgagaggcattatggttcctatttgggtaacattagggaggtggtcaaagcccccagtatagcccattcctgtagtcctaatccaagatggtcatcactgatagtaggattctcctctccccatttcagtcacaggaaatggggtggtgaccaaacaagctcaagtgataaactgctggtgatatgtatatatgtttgttgttttctccacctctgaggtgctgggttgcctgataccaaagtgttccagtttgtgtactaaagttgtttttctggcagcctgagacttcgctttttaaaaaatgcagcaattggttgatttttgttgttcctgaaggacccatcacactacccacggtatctgagtttcaagtctagcatggcttgggtaatctgtgattgtacctgtttcttcctgggattctgcacatagccaggagcatctcattgcttcattccgtgttttcttgcagttatgcctgggatatgcagatggaaatgcatattttattgtaaatttcattttatatctagcttatattacccttagggcattaagtgggtcttttaaacttatgtctgttaagtaggttgtctgtgacttgacgtcgggcagtaaaggtagatgctaagcaagtatttattatcaaaaggaaatgttgagtcaacattaagggtgagaactgctcttcgtggttaaggataaaaccaagaaggaaagaagtgatgggaatgcagagacaggaggcagcccagctcttcttggggttgtttacgcccatccttgcgttggtctgcggcgtttccccagcagacaccactgtgggctactctaatgacttctctttcctcctcgaacaacttctggagaagtcgcaccgttgcagagtggtgccgctacacattgatcatctaaccttacctgggtcctcagctatagggccgtctgtctcgagtcagctgtcacttaaaagtttcaccattttctctggtttgacttgctgaaaaaaaaaaaagaaacattaaaaaatttcactattttcttaaaatagtttaccttatcacaccctctcatgttcactggatgactatcctttcttcctggtgaaagcagaaaccctcagtttctcatcttgcacctacagactcatctgcaatccttacctccttgggaaaaaaagacgtctctctttccatgtgagtatcagtcatccccctgtgccatttcattttctggttttcagtccaccctgccttttctccgcaaagttttcacttctgtgtctttagcctttcctctaatggatgtaggtgttgaataattttacatttaaggggaccctccctgaacctgatgtccctttccagccgctgcctttttcatccttaacgaccatgcttcttgagagttgtctaccctttctgtccctctcttctccttcactgacacgtgacattctactgctacccagccactgatcattttcctgtcaaggggaccattgatctccaacttgctatcctcctaagtttttatctggcttgatctttgtgttacacttggcactgttgggcccacttctttaagtgttctcttagttttcatggctccagtctctccagattttcctgtgttccttgacctattttaacatttcttcaggggggcacctcttcctttggagttggtggtgttttctagggttccattgtgacctcattttacttttatacatctccagaagttatatgattcactgccatggttccactttcatttataatgcccaaatctctacctctggcttgttctgccaacatgaatagtcagcagccacctggacatttctgcttgccatctcccaggtccactcctgtagtcggtaatcggtgcccaccattcacgaagtatatattagtttgctaagtctaccataacaggatgccacagactaggcccaagcaacagaattttcttttctcacagttttagaggcttgaagtctaagatcaccgtgtcaggaggtttgatttctcctgaggcctctctccttggctcgcagatggccatcttcttgctgtgtcctcacatgtccttttctcttttgtgtgtgtgtgtgtgagacggggtcttgctctgtcacccaggctggagtgcactggcacaatgacagctcactgccccctcaacctcctgggctcaagtgattccttccacctcagcctctcaagtagctgggaatacaggtgcatgccaccacgcctggctaattttttgtatttttggtagagatggtgtttcaccatgttacccaggctggtctcaaactcctgagctcaagcaatctgcccgccttggcctcccaaagtgctgggattataggcatgagccactgcgccaggccaggcctcttcgctctgcacacatacatctggtgtctcttccttttataaggacattggtcctattggattagggccccacccttaggacctcatttaaccttaattgcctctttaaaggccctgtcactaaatacagtcacattgggggttaggacttcaacataatgagttttgggagagacagttcagttcataacagccatttgcctgagcaagaactgggggttcttccttaactcctctgtgttgcgtatctgattcaccacatcttgaccgttctacgggcgtaccttggagatactgtggatttggttccagaccactgcaataaagcaaatagtgctataaagtaagtcacacaagtttttggtttcccagtgcatataaaagctgtgtctatactgtagcctattaagtacccaatagcattatatatattaaaaaaagtacataccttaactaaaacaaaaaaatgctaacggttgagccttcagcatgtcgtaatctttttgctggtggaggatcttgtcttaatgttgatggctgctgaccagtcagggtggtggttgctgaaggtagggatgactgtggcaatttctcaaaataagatagtgatgaagtttgccacgttaattgactcttcctttcacaaaagatttctctgtagcatgttaacgctgtttgatgcattttacccacagtagaacttatttcaaaattggagtcttctcaaaccatgccactgctttatcaactaagtttctgtaatattctaaatcctttgctgtcattcaacagtgttcacagcatcttcaccaggagtagatcccatcttaagaaaccactttttttttttttttttttttgagatggagttttgttcttgtcacccaggctggagtgcaatggcaccatctcgcctcactgcaacctctgcctccggggttccagtgattctcctgcctcagcctcccgagtagcctggattacaggcagccactaccatgcctggctaatttttgtatttttaatagagatggggtttcaccctgttggccacgctggtctcaaactcctgacctcaagtgatccacccatctcggtctcccaaagtgctaggattacagacgagagccactgtgccaggccagaagccac

SEQ ID NO: 98008 - DNA, 41309 bp, Homo sapiens
cacccgactattttttttttgtatttttatttttatttaatttttatttatttatattttttaattttttttttgagacggagtctcgctctgtcacccaggctggagtgcaatggcacaatctcagctcgctgcaagctctgcctcctgggttcatgccattctcctgcctcagcctcccgagtagctgggaccactggtgaccaccaccacgcctggctaattttttgtatttttagtagagatggggtttcaccatgttagccaggatggtctcaatctcctgacctcgtgatctgcccgcctcggcctcccaaagtgctgggattacaggcatgagccaccgtgcccagccgttttatttatttatttttgagacggagttttgctctcattgcccaggctggagtgcaatggtgcgatcttggctcaccacaacctccatctcctgggttcaagcaattctcctgcctcagcctcctgagtagctgggattacaggcatgtgccaccatgcccggctaattttgtatttttagtagagacggggtttctccacgttggtcaggctggtctcgaactcccaacctcaggtgatctgcctgccttggcctcccaaagtgctgggattacaggattacaggcatgagccactgcggctgaccttttttttttttttttttttttttgtatttttagtagagatggggtttcactatgttgccaggttggtcttgaactcctgacctcatgatctgctagcctcggcctcccaaagtgctgggattacaggcgtaagccaccacacccagcctgtaatttcttttacaattaggtaagtagcctgtagagtgatactttgatggcatttcccagcaatctttcatctaaaggttttgaagtccattgatagtccttgtctgagtcaattatttcattaaggtttgcatcatggttattgtctaattctatattttattttatacttattagctggcatcctatagtaaagaagagtttttcctcatcaactgggtataaaccacattctttattaaaaaaaaaaagaaaaaaaaagcagggtaggttgggagcagtggcccatgcctgtactcccagcgctttgggaggttgaggtgggagcatcacttgagcccaggagttcaagaccagcctgggcaacatagcaagaccccatctctaaaaaaacaaaaaagcaagcaaaaacacttagccaggtatggtggcaggcacctgtagtcccagcttctgacgaggcacgaggatcacttgagcccaggaggtcaagactgcagtgagccatgtttgtgccactgcactccagcctggatgacagagcaagactctgtcttaaaaacaaaaacaaatgaaacaaaaaacaaacagggtaaatgctatctccctttaataactaattttcagagtatcaaattggtgtaatagacactaccaatgatggaaaaatagtttccctcttctcattctctcttctctgtactagagagtagacttttatttattcagtatttgcaatcaattgtattcattttctttttgacgctaaaattgccctaaatttgccccctgggagatccttcaagctggctcccatgtctctaaaatttatttttgagagactgaaaatacaaatggtaaatggccagaatatacataaaaacagaattctgacccattacctacaacaactagcccagtaaaccaaccacttatttaccataagtgtactctcagcctgaaagccaaacctgctatcaaccagacttgtaggaagtcagactgctatctctggtagcaatccaggaagctaaataataacttctatgacaatcagctcaaaatggccaggacttgattaaaacttgacagcttccctactttttgtcctcacttctagcttatgcccatccagagaaagccaaatatgctcctttaaccaagaccataggatgccaacttgtagttagcttccagcttccccatgccaacagcttccaatcaggcatacctgtgaaacctttccttttgtccactgtaaagctttcccactcctctgcatgcctttgaacctctgctaaaacataagggatggtggctgactcccttgctacagcaagttctcaatcgactttgcttttctcatttggtttgcaataaaatgcattctttacagtgacacaatttgatgaattttgacaaacgtatacattcccactaaccatgacacagaacatttccatcacccccaaaagttctcccattttcctttccagtcaattccttctctcttcccctcctaaccaaccactgatctgctatctaccactatggattagtgttgtttgttctcctaactacagttggcatagcctcattggtctaagcacttcctctgcattcaggcacaacgaaatacctggctcatcttgtacctttcccgtcccagagctggaatcagccagttctccaaaggagctctggatctttttagtgggaaatggaatttagaaaccaagatctcagtgtcagatgtgctcactgttactgtagggtgcccatgcctatacatcctggttcagccaggactgttccagttttaatctgaaagtccagcatccagagaaaacccctctgtttgtggcaaactagaacaactggtcaccctagtgcttctaggccctttcagtccacagaactaggacttttttttgcagttgaaacttttttttctttttgatagggtctgttgcccaagctgtagtgcactggtgagatcacagctcattgtaactttaaactcctgggctcatttgggcctctcgcctcagcctcccaagtagctaggactataggcacaggccaccacccctggctattttattattttgtattttgtagagacaagatctcactgtgttgcccaggctggtcttgaactcctaagccactttggcttcccaaagcactgggattacaggtgtgtgccactgcacccagccctccagtttaaactcaatactacagactttttttttctgaacttcttaaaattctttatattagtttccacccccacccccggatgaatgaacgtcttaaaaattgttttaaattttttaaaaaatggagacagggtcttgctatgttgcccaggctggtctcaaactcctggactctagtgatcctcccgctttggcctatcaaagtgctgggattacaggcatcagccacccggcccttttctgaacttctttgatcttgtgtttgtatctcattctctcatacactgcacatctttgtatatagtaacattaaaatacttatgttatcctaccatatacagtacagagttttaaaaccacagtaacaatgttaccattaatcataaatcagtgaagctgaaagctcctgtgcacttttttcatccttagaatacacagttgacccttgaacaacactggtttggactgccagggtccacctatatgtggatttttttcaccccaacacagatgaaaaatacagtggggcgagggacggtggctcacacctataatcccagcattttgggaggctaggtgggaggatcacttgagcccaggagttcaagaccagcctaggcaacacagctctctactgaaaatagaaaaaaattagctagatgtgctggcacatgcctgtggtcccagctactcgggaggctgagatgggaggattgcttgagcccaggaagtcaaggctgtagtgagccatgatcgtaccactgcactccagcctggacgacagagtcagaccctgttctcaaaaaagaaaaaaaaaaagaaaagcaagagaagggaaggaagggaggggggaagagagggagggagggaagaagggagggaagaagagagggagagaaagaaaaaaagaaaagaaaaagaaaggaaagggaaggaaggaagaaaacaaaacagaagtacagtgggatgcaaaacacacctacacaaagaaccaactttccctatgctcagctccgggactttagtatgcagatttctgtatatgctcgcagaaggtcctaaatccaatctcctgcatataaggaaagactacactatcacaacacagatacactactagagtactgtgttcaaaagctcggaggggccagtggtggtggttcattcctgtaatcccagcactttgggaggccaacctgcaggcggatcacctgaggtcaggagttccagaccagcctggccaacatggtgaaatcccatctctattaaaaatacaaaaatcagcaggggatggtggcgcatgcctgtaatcccagctattcaggaggctgagctgagagaatcgcttgaacccaggagacagaggttgcagtgagctgagattgcaccactgcactccagcctgggcaacacagtgagactgtctcaaaaaaaaaaaaaaaaacccaaagaataattattttttctgtgtatcttagttatattagttaacagttaagttcatttgtttcaatttgctttcaaccttaggatttactttgtttccttttttatttacttttttggctatgtaaaactaaaagttcaaagacagagaaatcttgtctccaccccccactctttataggcaactaaaaatgttaagtttccaggatatccttccaattcctccccgaaaataagcatatacacataaatattcatattaaatataaatatatatttttatgtatttaagtaaatacataaaagcatatatgcttatttttgcttttgaatacagtgaatacttactacacttaaatatttaagtgaatacttaatacaacctgagactcattccaaagcaacacacgattatttcctgaatctttttaatggttgcattgtgttctactgtatggatgcaccattcccaatcagttccctattaacggatatttgggttatccctaacttttgctatgacaaatagcactgcaataaccttgtatacctattgtttccatgtgtggagctgcaccttcagaataaggttagggttagaagtataactgcaaggtataagaataaacacaagtaattttgtactccgtggaacttgaaccatttttccactcccaccaggaaaggtaatttcaacgtgtatttccattgtaagtgaggtggagcgactttctatgtttaaagaccattacggtattttttctgagaatcatctgttcatgtccttccccattttctcctttggcttttgcactttttgttttcaatttttgagagctcttgtgatacgagttgcaaagattttctccagaccgatctgattcactggaaatatactacgaccatctggaatgtactttaatcttatcctaataaatcaccttactacaagacactcctttggggatgaacaggtttgataaagccggctaaggacagaccaatcaaaagaattacgtgctcttctagtaagtgtttagagactgtttcacgttctccaggtaacaccgccattactcggcggtccagatggcagtcttacttcagggagtctactccacttgcaggacctctttgattgagttcactaaacctcacagggccgccttccccgtgttccagttagcaaggggccctcaacgccgcggacacagcgcaacctccgacgccagagaacaatagctcctcgatgcgtctccagagatgtcaaggaggaacgaacccagcggccaggagactgcgcctcacgactgatgagagggaaggcatcggtttctaagttctcaaaacttacaggtgagcttctgctaagagtaaacgcccgcggctcgccgcccacggcctctctcttgaggtggcacctggtcctccgacacgcggaagcatcacggatgagcgtcacgaacacagagcggccaatcacgcgccgccttcgcccagatccctccgcacgaggcagccccgcagccgcaggtggccccggcgagtacttccaccttcccttcccgtgatgccctggggctgacctccgacctcgctggcccgcccctcccctcggccgcttcccttactgagcttgctgagctccggggcccgcggagctcgcgccaggctcctgggaaaggacggggagtgttaccggggagcagctgctccattgtgcctcgaggccccgatcgggctaggccgacggcctccctcccttcacctttcctctcctggcggggttcggcggcgggcgagtgactgcggccacgcctgaaaggcgactctcctgtgagtgggccagaaggcgaacatggcggagcggggaggctggcgggaggcgggaggcgggaggcgggaggcagtggcgctggcctgcggcgcgttcggaccggctgtggggcggggcagggcggagcggagccgtgcggcggggcggggccgggcggcggggcctggtttcctccctcagcgccattttgtggcagcgagacccacaaataaaggggagcgcaggggttgcggcgggactaggagcgcggcggggccggcggcagagctgtccggctgcgcggtggcccggggggcccgggcggcagggcaagcagcgcggcctcggcctatgcgaccggtggcgccggcgcggcttctgcctggagaggtaggygcgggccggctggcgggagcggacgcgggggacctccggggcctgagggctgatgcgcagccgcccccggcgggtaaggggcgggcagggcccgaaaggccacacgggcctggtgcggcaccggtctctcgtgagccgctctaccttcccgcctgcggggaacacttccgccgcttcgaggccattttatctcygtcctccgtccccaaggcccgggttgagaggggtgctctggcggccggagagaccggccactcasggaggccggaggatgccctccccgggctgagcggcggcgctcgttttttcctcgcctcggggtcgcccccttcacctcccttgggcctctcctgaggacctggcggcactaacgagttcagcaaggaaaaaaagaaacattcgttccctacatttcatgtcacgcagtaggatgttactacgttctcttgtagacttccatttttaaatgagtataagcattctgaggaaagaaactgaattattgcagatttttgtgaaatccaagtcttaccttggatccctgtgagacagttactagatttttttttcaccgtttttcataagtctgtgtacacgtaatggaaaagcccgagttcttgttttgataagaaagtcacttggttgtttgatcccaaaggattagcttaacattatcaaggactagcataactgtgattatgtaaaaaaaacaaaacaaaacaaaaaaactattatttagtctggtagggaaatacttctatgagtatgttacaattggaagttgtatttgtgcctattttatctagttttagttaattccattgcttcggaagataagtggacgtcatagatccatcgcaagttctcgttttttggattttaaaattttgaccattaagttttctacgatagataaacatgttgtggacatttaaaaccgtaatttaaaactatgagcgaaaaatcttttcaagatggatacattttaattcattcaagtagcatctgattagccaagtcggggaaagattgcagtccgcaaagctggcttgtgataaggttgaggttacattttaagggtttgggtaggtgtgtttcttacagtgcttttatatgttaaggtatcttaagcagacacatggtttaaaagttcagtatttttagtactttttcattggcagaatttggacaagctaccagaattgctaactcctaaaggataaaagtaataataatagtgtgtcccaggcactgcttatttttacatggctcttttatgtctagcttttccaattcaacgttgagtcatgtttgctgaaaatatttttgtgtattgtttgtcagaaataagctggtagagatgaaacacaatgtgtaaaaagccctgtgatgtggagatgagcattgtcacaatttgtacagtacattaaagcgttcaaggtctcttatggtcttgtatgtagtattgaatccccttgaatatattgtttagcagttttgatcattatgtatttgcttcttgctcctcaaaattgtaygttagttagtaggtccttcagcaaaagaagactgaagatagtattttggttttattcttgtttttaatttttttagttgtctccaacttttctgcctctaaatattttgcttcttgtagttactaagcttaacacagaaaaacttttcagtatctccacaatagtaaacttcattgtgtattgtgtataacaagatgttccatctgactaaaatatattgctgtaaatattttctgcctttgaagatgtagttaatagaatttaatcttttctaagtgcacattgaagttgccttttatgttcatattatgttcatattttatttgaaaaatckatagcatttttattgtgctgaaagcattaatatttgcagcactttgtgagacaggcaaaattatctttttgctgacttggaaactgcaagagttaaaagacttgcttggaatcacacatggcagatagaggataaggaaaagatggcctttcagttcctcatcagtaccttgctactacagtgtctgcagattggtgtcttacattcagctatgatttgttcgccaaggtaccgtgtcttcttactgaagttgttttggctggcgcttgcctccgttcagagggaactgagttacctaactttatgatgctaagagccaggaaggtactgggatctgggatgctaggcacctaaccagtctagactgaactccatactaagctgtttttctgtgttaaggcatcaagagtagatggtggtcctgattttctgagatatattatctctgaattatctacataaataactgaaacttttatgtaattttaaaactagtcaatcatgttaccacccttttgaggggcaccaaatttgagacccttacccccaatttattaattaatagctgttttaatcacctaatagctgatcacctaatgactaacagtcattttcatcctggaaaatgggaactaactttgactttgaaaagtgctgttattaaatgtgtgattcataagaactgaacatattttctttattattttccttcaggattcaactttaattgactccaaatgatgttatggtcattctgtttttctgatacgagaatagattgttctgagaacctagaatattcattgcctttatgaatctagaattgactttaaatttaggttattgtgtttgtcatttgcgctaaaaaaaaaattgccctggggaataccaaacttctcggtacattcgtgtggtgtgaaagtcaaaattgccaattaggttctattttgaccaaatagttgaatgttgtagacagttgtaaattttgaacctgttctaatttgccttttgccagatggcgcatttaactttgtggcatatcatcgactttcaaggaaagatttacttttcatcagattaaagttgaggaaggattttctttctaaatactgaggctctgaatttcccaagttggataccccagacagctagagtgatcttaaaagtgactctgagagttgacttaggaagtgtagacatttatccaaaatctgtatttactcctgacttacattacaaatacagagttttatttttaaagaaaatttcaataaaaagcaccatttaattaaaatctactcaccatcaaactttttaaaaagaacataagccaatgtcaggagttggagaccagcctggccaacatagtgaaacgctgtctctactagaaaaaaaaaagaaatacaaaaattagctgggcatggtggtgcgtgcctgtagttccagctccttgggaggctgaggcagtagaatcgcttgaacccgggaggcggaggttgcagtgagcccagatcatgcccgtgcactccagcctgggcaacagagagagactacgtctcaaaaaaaagaaaaaaagaaaagaaatttcaataattgcaggctgggcatggtggctcacaactgtagtcccagcacttttggaggcccaagcaggaggattcctgagcccaggagttcaagaccagcctgggcaacatagcaagacctcatctctactaccaagaaaaaaaaaacaaattagctgggcgtggtggttcatgcctgtgatcccagctacaaaggaggctgaggcaagaggatcagttgagcccaagagatggaggctgcagtgagctgtgatcgagtcactgcactccagcctgggcgacagagtgagactctgtctcaaaaaaagagaggaaaaaaagaaaatttaagtaacttctgtttagaatcctaaatattggagatgccaaagaattctgcagtaagtgttagaaacagtcgggaggacagtatgattattatcctcaacctgtggattatctcttcaggtttttcaagaaacactgagtctgtgtttttgatggggagaagaaactattaattaaatgcccattttgtgccagttaccatgctaaagattaatgtctgtcttcagaaatagcacagtatttgggccctggttgtggtaattctttttgagatggggaaactgaggtgcagagattttgctacttttgtatttgcaaagttgacaacctgtttcagaataccaaggttatcagaactttcttcatgtgtttctcagtccttttaatgccctttaaaaacagattatcatctcattttttgctaagcttactgttaattttattttagtggaataagaatatggatacctgtctttaagaagagagtaagcaagtaaacctagggaaagtatcaggttgtagaaccacataccgatgatccttgccaaaatcctggcataggaatttgaaccctggtgtatgaaaagtctgccctttgcatactcaggtttcgcatcccgtgaatgctgtatttttgatycgagtactgtattttttaatctgagtttgattgaaaaaaatccaaatataaatggacccatgcagctaaaacctgggttggtcaaggaccaactataataacttttataagctggaatttatattgaacagcatccatgatactttagtattacaactaaagttgtacatactgagtaggtaggatgccttagtaactagataaaasgtataccacctagccatagtgataaatatagctgttttcaaactgtcattcacagatctctaccacagtacctgttacrtgaagttcctggttggttctcaaaattttatgttcgtatatacatagatacagatactgatataccggttaaatatgtacagctcaaatagctaaaattgtctttaagattttttaaattaaaaatattattggccgggygcagtagcttacacctgtaatcccaacactttgggaggccaaagcaggtggattacctgaggtgaggagttcgagaccagcctggtcaacatggtgaaactaaaaatacaaaaattagccgggcgtggtggcaggcacctgtaatctcagctactctggaggctgaggcaggagaatcgcttgaatccaggcggtggaggttgcagtgagccgagatcgcgccattgcactccagcctgggcaacagagaccgggcgcagggggagggggagtgtctctgtctgcttctttctctctctctctctctctctctgtatatatatatagtgtgtgtgtgtgtgtgtgtgtgtgtgtgtgtaaaattgatatttagctccagacaaatgggaaattacaaggaaatgccagatttgatatctgggttctaagactttgcagcctaatgcatgtgtcatgctaaaatagaagtagttagacatgtggagttaaatatggtgatggtttctsagatgattaaaatgactgccaccaggttaaggtagttacaaagcagctttctgtaatggcagcagagataataaactgggcaacaagggaggaaccaatttaaagaaaaagaataatatacattttatatcatagtaatatggtttatgtcttcataggacagagtgacttgctcagtgaaacagactgtatacaattagctcagaaacaaatactgaggtttttatctgtttgctgtatcccttgagaaagattaaagagggaaggcagggtgcagtggctcacgcctgtaatgccagcactttgggaggccaaggcagttggattgcttgcgcccaggagttcgagaccagcctgggcagcatggcgaaaccctgtctctaccaaaaaaaattacaaaaaattaactgggtgtggtggcacatgcctgtagtcccaggtactcgggaggctgaggtgggaggatcacttgagcctgggaggtcaagattgcagtgagccatcatcgcaccactgcactgtggtctaggtgacagagcgagactgtctcaaaaaaaaaaaaaagcccagcacgctggctcatgcctgtagtcccagcacttgggaggctgaggtgggcagatcacctgaggtcgggatttccagaccaccctgaccaacatggagaaaccccgtctctactaaaaatacaaggaagttagccgggcgtggtggcgcatgcctgtaatcccagctacttgggaggctgaggcaggagaattgcttgaacccaggaggcggaggttgcggtgagccgagatcgcgccgttgcactccaccccgggcaacaagagcgaaactccatctccaaaaaaaaagattaaacagagaaagaagcaagccagtaatctaagatcaatttatgatttttcctctaaattctgctttcttcaacacaatttacttaatctgaaaaccagggtttaataacagtatgattagaatgtttcatttataaagtggagttgagattgtacgtagtataaaacatgctgttggaagattatctccttttgaggaatctcaaaatcaagtgggagaaatcaagtagtcttggtgtgtgtgtgttttgtttgtttgttttaatgagagacagggtcttaccacattgcccgggctcggttcaaactcctaggctcaagcagctctcctgcctcagcctcccaaagtgctgggattacaagtgtgagccaccacaccagcctcaagtagttttcgagatgatgccacagcactccagcctggcaacagagtgagactccatctcaaaaaaaaaaaaaaaattcagtttaacataccaagcttttggtcaaatttctagtagtttagaatttataataagtatgggtaattaaaataaaccataaacactttaaagtaagggaagattcatgagtatactattagaaataataactagggctgggcgtgatccttccacaggtagttctagctacttgggaggctgagatgagagtatgacttgagcccaagagttcaagactagcctgggcactatggtgggtccccatctcttaagaaagaaagaataggaaaaactaaattagtataagaactaattacttaatttgtataagttatgaatatgccaaatgcaatttagatgctttttcaaaagagcactggtactcagaaccctgattcaattttttaatcctcatagaatttttatataaagattttatgtttgtcaggttagctcttcatgtcgtatacttttttttccaaccttgtattttaatgtggtgtttatgtttattacacattttttctttgtcttttttttgtgtgtggatttgtagtttaatgaataatacctgctattagcattcgttctaaaaaacagcataataaagtgttccctacttgaattcattaacctatctttgaaacagggttaagtgaattttgtataataaagaagctaattttgagatacaaaatatttggcataaaattaaatactgtaggaatatttttattaaggtgtgacatacatgtgtatgtgagtttttgttgtttgtttgtttgagatggagtctctgttgcccaggctggaatgcagtggcgcgccatctcggctcactgcaacctccgcctcccaggttcaggcgattcctgcctcagtctccctagtagctgggattacaggcgtgtgccactacgccgggctaatttttttaattttttggtagagaccgagtttcaccatgttggccagacttgtcttgaacttctgacctcaagtgatccacccaccagcctcccaaaatgctgagattacagtcgtgagccatcacgcccaaccagtgtaacatatattttaaaatatgtaataggatgggcgtggtggttcattcctgtaatcccagcactttgggaggccaaggcggacgggttgcaatgtcaggagttcgagaccagcctgaccaacacggtgaaaccccgtctctactaaaaatacaaaaattagccaggtgtggtggcacgcacctgtagtcccagctatttagggggctgaggcaggagaattgcttgaaccctggaggcggaggttgcagtgacctgagatcgcgccactgcactccatcctgggcgacagagtgagactgtgtctcaaaaaaaataaaaataaaatatataatatatctaaaaaactattgggcagtagtaaattatggctgtggtaggtactaccttactttaacaacataatgctataaaaggaaagacttaaactggtattacccttttatagtcccttagcaacatgcgtaggatrctacttgaggtcattatatttctcttcaccctttatggcgacatcaaatgatttgaatggctgatcagcttttttacgagggaatttgtaaaaactacccaataactctaatratggaagatgttaacaaaggaagatctgggtacagagtatataggaactctgtaatatctttgccacttttttgtaaatctaaaactattttaaaattgtttatttaaattctaattattcaacagtaatttagttcactaataaattgatttgaaagagtcagtattttttattcctactttcactggaagaaaataaattgaacttgttttccgcaacttttttttttaggattcaagatgaccaacgaagaacctcttcccaagaaggtatgggttttggttttgggtttttttgttttgttttgggttttttgggggcttttttaagcactttaaaaaaaaatagacttgaagggattatcgttgtttgcttatttttcatttctttgcctttataacaataatagcattggagttgtacagtgtgccagatattgtatcttatatccagtatattttttagaatattttcagattttggaaaactttagttataataatattcccatggtctactcttaatgttcattatgtgaatatttccaggtctactcttaatgttcattatgtaaatatttccaggtacatatatacaaataatgtcaaaaatggacattatgagtatattattattcttttcctagtgtaaatccctttgattgtaattaaaaactactttattaaaaaaatggttatagctaattttcaaattctacctttttctctgaagttttgttgtctagtctcaaatctccccctgttgtgcattcctaccttgagtttaattactcttacatacacacacatacacacacacagtggctgttataaaagaggtaacatygtctctaggaggaatttgtgattcaattgggaaagcttactaaacttaatatttaagtgaataatttagatattacagaagtttcctattgtggagtcagattactcattaaatgaataaaggattgtattatgctttcataatctgagaattactgtgtgctccctctggtaccctttgattttcctcccttggaacagggtcttgctctcttgcccaggttggagtgcagtggtgcaatcttggcttactgcagtctccgcctcctgggctcaagcgatcatcccacctcggcctcctgagtatctgggggctacaagtacrtgccaccacgcccagctaatttttgtatttcttgtagagatggggttttaccatgttgcccaggctggtctcgaactcccgggctcaagagatagccacctgcctctgccttccaaagtgctgggataataggcatgagctgcctctggcagcctttcaatatgttacattataatagttccctcgttccattttatggtaatactattttactggttagtattataatttgaaacatttttaaggaaaaaaatttaagtgtcttgtaagggaatactaataaagcctttattttatttttattttttattttctgagacagagtctcactctgttgcccatgctggagtgcagtggtacaatcttggctcattgtggcctcataccccagcttatgcgatcctcccacctytgccccccaaagtagctcagactacaggtgtgccactacgcctggctaatttttgtattttttggtagagatggggttttgccatgttacccaggctgatcttgaactcccgagttcaagatatactcccgcctcagtctcccaaagtgcaggaggcatgagccacaatgcccagccaaagccttaattttatactgaggtaggagaggtatctcacctttacagcctttatttggtgtagtgaatatactgtttctcaatttttgaagcatgttagcttatgcccttctttcagctttttgttttgaaataattatagattcataggaagttgcaaataaatgtacagagaggttctgtgcaactttcactgagcctgcttcattgttaacaycttgcgtgactagcagacatctctaataactgtgaaaatcagggaattgacattggtacaatccacagagcttattcacatttcacgttatactagcactgttattgggggaagtggggaagagctatatgcactattatcatgtctagctttgtgtaaccatcattaatcaagatacatatctgaactatcaccataaagcttcatcgagttattcttttatagccacatctaccccgtccctctccatgcctgacccctggcaaccactaatttatctccatttgtataattgttacttcagagtgttatataaatgtaatcatgtagtatgcatctttttgagactattttttttccttccacttagcacagtttccttaaggcttatacaaattgtttcatgtatcagtagtcctgtttctttttattgcttaaagtgttccatggtgtggctgtatgatagttcaatcatttgcctgttaaaggacatttggatagttttcagttttttagcttttacaagtaaagctgcttgcatgttttcatttctttgagatacatgtttaagagtgcaactgctgagttatatggcacattcatttttagttgtattaataaaaggaactgccwtacttcttcagataccatttttatattctcacctgcagtgtaggaaacttcagtttctctgaatcctcaccagcgtttggtgttgccactaatttttattttagccattctaatcagtgtgtggtgatacctggggttttaatgtgcattttcctaatgatgatgcccattgttaagataccaaatagtttaccttaaaaaaaaaaaacttttgtaataaaatactttttcaaaaaatcataatatgtactgagccgtttaaatctcacacttgggagatgtttcataggtctcattatagaactttgtgtcttcaggaagaacactaaattcatattgtaattctctttataggttcgattgagtgaaacagacttcaaagttatggcaagagatgagttaattctaaggtaaaatgttctctgttcaaaaacaaagtctttctatagaacattatattgtgactctacactgtaattgtctttgtgccagatattgtttttaatgttgttctatcctcaaataatttaatgtactttttgagcatactatgacctatttcttatattaacaccgaggaaaacgtaacactttaaagaactactaggaagctataagtttaacaaatatatggcttgttttgtgtagtttttcctttcgtgtttaacatttgaaaaagaaatgtaatcctaaaagatgcacttatatttatggaagaaatacataatttactaatgaagtgaggttactttttcttattagtgtgaccttcaccagctcatataacttcatactcttcattttctcatctgtaagttgaagaggttgggttaagttattgttaaaggtgacttccagttctgaatttctgcggttatcttgtaaatgtcttacaaaagcagattgtcaagtacaacgtataatctttttagattgtgtaagaaatcaggaagtaggatgttctgtgttttgtaatttaaatatattctttctgtattttattgctatggttagtaagtttcttgataacttagataaaaataaaataagtattttaacaggctgaaagcggaggagagaaaagatgttttgtgagataggctaacacagattttgttgtttcctagagtgtgacaatttcctactttcacctttggacagctactgtattatgaacacactttttacctttttttttttttttttttttttttttttttttgccataatctcatacataggacagtttccattgcatacctttgtctttctgcacataaaatttaaatttttgttattctaaaacacttctgtcttatgctgaagtatatacttaagatacactactactcaatgctgggtttttttttgtttgttttaatgtgcatataaattataatagaggtgaggtgctgctcaggctggtcttgaatgcctggcctgaagtgattctctcaccttggcctcccaaagtgctgggattacaggcatgggccaccatgcctggccatgattttttttttccctgtctctggcattgtatactttttttaatgccttcttacataattgctctggttagtctgtgcagtcatttttttgatttaactgtaggaggggaaaaatcagtaatcttaataaagaatcatagaaatgttttattttaagatacctttaaggtttctaaatcatatgcagtgtatttccttgaggtcagtttaacatctttccttagggaattcatgtaagacttttaggcgagttttttctctttgattcccttggagattttaaaccagctgctacttatttaactagtctgtgccttctatccttgtgatatacatgttcttgcttcagtttttatatttttctgtacttctaaaataaatcgttcttttatagcctccactgaagatctttctctatacatccccaaatatttggtaaactacgtgtcttaggttgtaagtgccgtaaaaataaagcatggccttggctgaacatcagtgtttacatagaaagtggattagtttggtattaggaaggttttttttttttcttttttctttcttttttttttttttaagacagagtctcgctctgtcaccaggctggaatgcagttgcgcgatctcggctcactgcaaccgccgcctcccggtcaagcggttctcctgcctcagcctcccaagtagctgggactacgggcatgcgccaccatgccctgctaatttttttgtattttcagtagagacgggatttcactgtgttggccaggatggtcttgatttcttgacctcatgatctgcccgcctcggcctcccaaagtgctgggattacaggcacgagcctttttgttcattatgttgtaatattaataactcatgacaagcctgtttttaagattataaaatggttttctaaagccaaattttaattaattgtacctgaagagcagcttgaaaacatggctcttaagtatgcaggatagcagacattcagggcagggtgctttccattaggaactgcctaataagactaggaaaaatctttattgctaagaggacctagcagtgtatatattcagggtagagaagtataatgaagaacaacggtccccttgtattctgatagcatatggcatttatgcaggtttctgacagttagatgtgattgttaaattacagtcttgaaaaatgttatattctccccctgtgtttacaggcagaaattgatactaccttgagaagagtcacatggtattttcccaaaagagccaagataaagaaccttcaattctacataatgaggcacatttctaatatgccttttgttctaagtggacaacatatgaaagcagcagtgggatttttttttcagcttctataatccaggattatcctgaacatcagtgatatcaaagtgaatctggggtttgatctcacccagggcatgcttggcatgttctcagcagaaaaaaccttctctatatatctctttttacctgtttcctgtaaaatgggaaggaataatgagggactattttatgatcagttaaactagatttaggctgggtgtggtgactcaggcctgtaatttcagcagtttgggaggccagggtgtgaggatcatttgagctcgggagttcaagaccagcctgggcaacgtagtgagaccccatctctacaaaaaaatgagccatgtgcctttggtcccagctatacaggaagctgaggcagggacatcgcttgagcccagaccctgtttgcgccacgctgcactccagcctgggggacagagcgagactctgtctaaaaaaaactagatttaaaatgaaaaatccagaagaatgctcagtattactaaaatctgtgagtttatagatatcttctagtttatttaataaactattttatcgtaacaactaatgtatggatttttttttattagatggaaacaatatgaagcatatgtacaagctttggagggcaagtacacagatcttaactgtaagtttgagttttagcttcctaaagactgaataatctccttttgattgttaaaatcaaaaggatagttgtttttattaaagcaaatgtaatttttctcgtgttttattataagaactgtacataggcactgtgttgggtgcaagaaaatataaagatgaatgagacacagtctcagtcattggagaagacagaggtgtaatagtcatgtaatggcatgacttagcaaaattatatgcaaggttctgaatatagatgcagtaactcagaactacttgaaacttttcttacttgtccctaaccccttctgcataggaatttgacttgaagcatgagttactagtctagaagagaaataaacagaagcaaccagtaacagatttatgacagcttaaatcaatatatataacttaataatatatacagatttttttaaatctgctgaaaataacgtttatcattttaagccattttagtctcactttttactgtttgaatcacatactatttgttgagtataaaaaccaatatatattgttttgtaacttcagaagggttaataccctgaaattctaattttgcgtgactgtgttacccatagaagtcatgaacattgtgaaagtttaaggctaggcacagtggctcacacctataatcccagcactttgggaggccaaggtgggaagatcacttgagcccaggagtttgagaccagcataggcaacatagggagaccttgtctctacaaaaaaaaaaagagtcaggaggatcactagagcccgggaggtcaaggctgctgcagtgagccctgattgtgccactggactcctgcctgggtaacagaataagatcctgcctcaagtttaaaatacaaattgtccagcagttattactattttatttatttatttgtttgtttgagacagggtctcgcactgttgcccaggctggagtgcagtggcacaatctgggcttagtgcaacctctgcctcccaggttcaagtcattgacctgcctcagcctcccaagtagctgggattacagacatgcatcaccacgactggctaattttgtatttttagtagagacggtgtttcaccgtgttggttaggctggtctgaaactcctgacctcaggtgatctacctgcctcagcctcccaaagtgctgggattacaggcgtgagcctctgtgcccagacagcatttttatattaaataggttaaaacatactaatcaggattttgtgaatactgtataacacagatgttttctgtcttctgttgggagtagatgaaactataaaaacataatttagttagtagtcatggagcactatgacaccattgtctcctaaaggagctctcgtgaccaggaagaaattcgcctgttataaaagtagttaggatggaaactaaagacttgattaattttttgaccctagttcttattgttcttgacagaggtatttagaacttgatcttaaaattgtatttataatttttttttgaatcatcagctaatgatgtaactggcctaagagagtctgaagaaaaactaaagcaacaacagcaggagtctgcacgcagggaaaacatccttgtaatgcgactagcaacyaaggamcaagagatgcaagagtgtactgtaagtatttcaagttatataaatgtctttagttgaggaattggtttttagtccacattattacatgttaattttaaacatttaatgctaaatataagagcttatcttttataggtacgtatgctttgagctttaagaatactagatgaaaaattttgataatgtctcatttagactgttttttgtggccaagaaggcaaagttttaagttttttttgaaattttcatgccttataagtattagttcatcaattccagacatttttcagatatcttggtgtctgaggatgtaatcaataaaagaacatttgctctttattgctttactttcactgattaggaaagccatctgaggactttatctctgttctcttgtcccctctgtgtatagaactgtttttcctagtgtcagcaacctctttagtgtctcctttttaattgttagaactttgatgtgtactgtgtagtatttactatgtctacgtagatctgaaatctagtgacataattgatcatccagctctggtagtttaggctcaatcttacggtgtaattatacaaaataattagaggcagctgtatccttgtttctgattttaaaatctgaatgtttcttcaattctttgtgtactctcccttcatttggtacatatagaagtcttcttatgtgttattaaagtcttctaagatagtattctggtcattggagacaccaaaaatctatgggcacagtcctgttcctgtttyttttgccaatagaatgttccttaaggttcagtcacagtccttttacttcccttacagagattgtttaaatttccacaaaagcacgtatttactcttctttcacttgttactaaatgacttcttcacattttactttgctaaaggctggcttttatcattttctttacttttttttcccactaacccccccgcccttttcttgagacagrgcctctctctcatccaggctggagtgcagtggtgtaatcacacctcacttcagcttcccgagtaactgatttcaggtgtgcgccaccaagcgcagctaatttcttaatttttstagagatgaggtcttccctatgttgcccaggctggtcttgaactgctgtactttggcaatccttactccttggcctcccaaaactgttgggattataggtgtgagccatcgcacctggcccattatcattttctctaccttcttaacacattttgtccttttgtttctatcagttttgttgtaattcttaccaccactgatacttctttctccatagttactaatgaatgttttaacaaatttccctttacacgagaaatggatcttacctttagactgctagcacttgggagatagagtgtgaatagaaggtgttgatggtaatatctcataggatcagaatgtcttgaattccatttctcttccggattcctactcttgacatcatagttgatgtgtgcacatcacaatgtttgtgctattcatgcacatctgattctccatctgtcctatatgcgctggcagttttgatcatattacgcctggtcaaggccttcggtgatacctcatcactcttgtctcctcgacctggattttaaggttatttcaactataatggaacctaaccttttccagcttttttttttttttaaaacagctgtcacctgcatacgccagctgaacaacttcctgttcttccaattataatacaagtgaggttttgcagacagggcagggcagcaggagcaaaatcacaaggaaaggtcaagattatatatggcagatgaggataaagtttcaggtgagagtgaaaaaagatgaggtcagcctggaatcttgggtattctagaagagaggggactactgaagaattcttcagcaagagatgtatgtgatggatcagatttagatttacattttaggtagatcactctgacttgagtatgaaagatagatttgagaggaacaggactttaagcaggaaaaccaattgtgaggctgttaaaatagttcagatgaaatacatgaagccactggtggtagcagacaggacagartaggtgttttggaggcacaatcaataggacttgtttagtttggatgctgttgtggaaggaatgaaaaaaatctagggaggaatcacagcttcaggtttgtcttgtttgactgagtaacgatgctactaggatagatcctacaaagatcaaattttaaaagaagagtagagtgtggtgttaggaaaacaggaaatccagcattccctcctccttccccaaaatacaaagtgattaaaacaaaggcatacataaagttctgtacaatacgaatttaaaattgttcgttagatttggcagttaagaggttgttggccaaggaagccaaaagattggatacccctgctctagaggaactgtcaagtgggaagtgagagaaactaaatttaaagagtagaaagaatgggagtgatgtactataggagtttggagggaataggttaagcgaatggttgaaaggattggccctgagaaggagggtttcttaccctcttgagtgaaaaatagtggaaaggtttgtattaggtacctgtcctttaaaacagagctgctgcatttacccttggtgtttcaaattaagctaagcttagaaaaaataaaatatacatccttaggaatctatttgtgtagatcttttgtttgtccagcatactaactcatccatttgatcttttaataataatgctttatttctttgtctacatgcagtctttgccaagtacatcagtagtcaatttagttagttttgagcgtaaggcataaattagccacgtagttactatattcttaactatatactgtattcttaactatattttattttgttggtaagtaaaatctgtcatttttgttcacctcagtggtatttctgtttttcatttagtcttttgccaatcaactcaaaatagatttaggaataaaactaactttgaaaacactttactcagtgttctcttccctagaacatggaatttattctagtctgattcacctctcttttcatgaatgaaagtgttgactattgggtctttgtaaagctaaatagtaactgagtctcagtcagtgctgtagactgttttaatcagtcctgtcagtacatggagtgcactgtaagtcatggtttattctcgctctgttatcttagcagctggcttcacattgactatgcagttgtactagatttttgctcagtgaaacaaatatattcccaaaccacttagtatatttgttccttttactaaatttatattagaaaattttaactgtaatcctayttaagccttagtatggagttagatcttgggccagatctactttgagtatgaagaaaatgatgaatttaatgctaataactatatttcatattttagaaatgtatttttagtgtgctagtaaatagcacaactgaagtcgaaattgaaggtttcatatgtaagtagaagggttctggtatggtggaaaaagctctagactgggaatcagaaggccggagaactagaattgtagtcccgctatggcactgaactaaacagttgggttatttaatctcaaaataagcagtttggattaggtgagttactttccagctttacaattctatgattcggatctattcagaaggggaaaaatatgaattatactttattttggcttaaggtcctatagagttttgcttttataaagctgtaacagcaactcttgtagctataagtactgtatattttttcctttagaaattcaaatgtgtattttaagttataatcttgcacctgatgtatttttaggggactttacatagaataatttccacaggtaaaaaattaagcaaaccaaagacttcattaactcttaggtaattaatattttaaactttgcttttttccactgggttgtcagcatttttagtaaatataatgttgattttcgtttgttttttggtaatgtttggattgtaaagtaaaatgtatgtagccactttaagtcccagatttggagatgtaatcaaatggcctcaattccwaagtgagtaaccttaaataawgttatttttttaattgacaaataagttttttacatattcaaggactactacatagtgatgtttcaatacatataatgtatagtgatcagatcggggtaattagcatattcatcaaatagtttttagtctgtactttttctagaaagttttaagatttttctagagaatttcaggatcaaagaggggaggagcttaatgaaagagttggtaaatcaagtgaatggagggagttttccccaccttcttatgtatgtttcctttgatttggtcgtaattgtttcttttgctttgcacagactcaaatccagtacctcaagcaagtccagcagccgagcgttgcccaactgagatcaacaatggtagacccagcgatcaacttgtttttcctaaaaatgaaaggtgaactggaacagactaaagacaaactggaacaagcccaaaatgaactgagtgcctggaagtttacgcctgataggtaaacaaatcatactccccagtcaagacttccctgacagtcccactacgagaaagctgtggtgggacagccaagtactcgtttccacaccaagactcagactttttgagccaaaaaaaagccacattcttacactgtccagcttgtaatggttaatgtaaaacttaccagatgaaccttgtgtttcagcttttttcttttccccttccccttgcttcagaggcctgatggcgtcggactattccgaagaagtggccacctccgaaaaattccccttctagaacatgtagacacttgagaaatgtttctgtttgaagaaaatagagggagaaacagaagtcttaagtctgtggcacactgtgtcttcagacagtttgaaggaatgaaaacctagagattttaaatyatgaattgaacatgtaaaattccagtaaaatgtaaaaacggaatatgcatcgctcttaaccttgagcatagtgacttagagacactgtgtatcagttttgccaataagactgtggacttcatgattgttgttgaacttctgggtcaaaactcaaatgaggtgaattttgcctttaaagggtttatttgctgagaaccaactttcaatagtcatgagagaatcaaataatagatgtccgtacaagtagcgcatatatttaaccatttagtttggggctctatattacttgcttgagccttaatcaatgtggttttattcaatggtttgttctttgaatggttgcaaaaactgtagatmatcttactgaggactgtacaaacatgaaggtgtggtatcaaacttcaggttgaaactgtttgaagcattataaacattcatttcacaactagattgtataaggatattagctgtgatgagactcactgcattattttttttagtgaattttatgaaatccccgttccattcaacaggcacatgtttaaaaragctttgtcgttggtgttaatgggggaatgtgttccttcattgtatttgggccttttgtattgcactcttgatattaaattaaatgtgccttgaaatagttggtttttttttttttttaagttcaaagaatattatgatgattttgttgtactctttaacattttaatttggggcggggagggcctgttgagagcagattcattttggaaatactgttgctgtgctcttcaaagtgaaggaaaaggcgctgtgcctcatttttaaaagacctacataaaagacaaggagacttgacacttgttacttttatgacactttgtcccagggtattgcagtagaaagtaatgtgggacagcttcacagggtgtctgccagaagataatgtgttggaactgtgggctggcctaagtaagacattttgtgaattgaaaaaaggtatagtgatcatttctagcaaattcatttaatcatttagataaatgaggcattattttcttcatgcttccatccaatcctggaggtgaattttttccgtcagatcattctataagtcaccaattcaaattttcgcttggtgataatggagtctaagatgagtggaagataaatgttccagcttgtcccaacgtttaagtgcagttttaacaagggtgacttaagttctctcttaatcattcaaatcaattgtaagtatcatatgtttgtgctttagggaactgattgtggggcagagggtgggttgaagaagtggtttgtgtgacttttcagcaagaaatctgcttctaaaattctcactatttgtgagggttggagggtaagtaaccagatctgtttgaaattagcttatgtgcttgcattaaggcttttgtaaatattttatgccatttaagttcacagtagaaatggcctaagtatctttttagtagattttagtagaagagtaatccataaaatgtattattaacatgtactcaaattgagcaggcatctttctttgacacttagataacagtcatgagttctatggtttttttcttgtcattgttaaaattttctcttttaataagataatacatgcttatgtataaaattgaaatactgtagagaaagggggagatgaaaagtgagtgtcactcccggatgtgaccttgacatcctcattctcttctccaagagcagtaactgctattactttttcttgggtatcatcaagataatttctatgcatatacagttattttatgtatattgttttaaacaaatgtgatcataccataaacacagatgagttgcaccttgtttttttttacttggtctctttggcatttttccattttttaatgtatctagacaactacatttttaatgcttacatagtatatttccgttatattaaggaatcataatttatttgaatcacttataaatggatttttttctataaaattggctgtaagccagagtatatcaggtactataaatacatcactaatttgaaacaaataatggctcaggcaatcccctgtctggaatatttccagtggtggaatgggttttgctttgggttgcgtgcacgcgcacgcacgtgtgtgtcttcgctttactgtttttctgttctaattttgaggaagaaagattcccagaaataacctgtccagttcagttaaaatatttcattcatgtgagaatgcacacattttagagtgtttagaggtatatctttcaaagtgctttctattatgtttgtgggttaatcgattttaggaatgggttgatttttttgtttgtaattttaaaaaattatttcaaaaacaactacttgtaattaaattattttttcaaaactgtgattttgttaaaatttattttactaatcactagttttaaacgtgatatgactatcttagcttagacatttatttattaaaaggtatgactttttaaacgaaaccttttttgcattagaatttgtgacatttttatatggggttaagtcaggtcacagattaatgtatcttacagttgtctttttctactctttaaaattcatatagtaagaaggttagttgtaaacaccaatgaaatatatatactttgcaagaagacagttttgagagcataggcagtaaagtggaaggaattccattgtttttgacaatcttgcatatctctcattttcccattgtttaatttctaagtggatgttcagtggaggctaacgcctgagagtgctgatgggaaatggtggaaatctggagctacagtagcagtgaacaagaacaccagctaataaagttatcatatcaaagaataaagcctttaccacatgctcactggtggctttcaccctcgggctcctctgagcagtagtaacccaggttgaactcttcaggtattttctggaagaaagcttaattacaaacttttccttgaattacattaggttagaaaacatgcagccaggcacggtggctcatgcctgtaatcccaacactttggaaggctgaggtaggcagatcacttgagcttaggagtttgagaccagcctgggcaacaaggcgaaaccccatctctactaaaaatccaaaattagctgggggtgctcgtgcacacctatagtccccaggtactccggaggctgaggtgggaggatcacctgagcctggggacgtcaaggctccagtgagctgagatcacgccactgcactccagcctggcaacacagtgagacccccatctcaaaaaaaaaaaaaaaatgctgtaggtgaaagaaccatgcaacacttcaaagattgataaaatatttacaaaatgctctcatttttaaacttataaggcatactgaagtagtgtatcaggcaagtgaaagcctcactagaagaaggaaagactagaatttaaaaaatgttttaacccataaggtcatcctggacttaccccaaggacaagaatgtcacactgtctttatccaagtctcaaaggtaaatatcacaattatttacttagatccctttaaaagtgatcatttctttttttttcttttttcataaataattacaagaacaagcaaataatttctccttttattgctgaggctaaagaaaagcagtaaaattttattgggaaacatttgagcttttcattacatatttgcaattgctatgtatgtgcacataggttcagtagtatgttgcactagcatttggaaactataatctgtggaaagtgtgacactcctagattggcagatatttgcgtgtttgaattgtgatacgtgaccactggtcttatttttgtgtcaaaaggatgatcttttccaataaagtcttaagtctttaaaaaaaaaaccttaactgctgaatgtgcctcaattaatataatagataatattcttgagagttatggaagatggatgtaccagaaaacttccctctctcctcctcttttttgagacagggtccctgtttccgaagctggaatgcagtggcatggtcacagcgtcaaccacttgggcttaagcagtcctctcacctcagcctttccagaggctggcactacaagcatgtgtgcctggctactttttaaaaaattttttgtagagttggagtctatgttgcccatgctggaggacttcctgttaaggaaaatccttattaaatgtttttctagcaagaataaatactctcattcatttttatttgtaggtactgattttcataaatatttgtgattgatgttgcatgtaccttttcaagaacttttctgataaagcgctagattccttagtgtaataatactggtatagccaaggtgtgtgttaattaactggctctgtttccatttcaaatgataatttgagatgaaaatagatggatttcagaattgattattgatgtaatagaaacaaggtgtagctgtttgggcactttttgtttagggtttatttttrctgctgtgttggcaaaatactgaaatgcagaagatggatgtgtcccagaaaagaagatggtaattatggggaagcatctgctgtgatatagttatgtttgtatgtgttacatctatcactgtaataattgtaagcaaagacagagagttttgkcttcattttgtgatggatggctctttcctttgcagccaaacagggaaaaagttaatggcgaagtgtcgaatgcttatccaggaraatcaagagcttggaaggcagctgtcccagggacgtattgcacaacttgaagcagagttggctttacagaagaaatacagtgaggagcttaaaagcagtcaggatggtaaggggtttgtttctttttggaacgttgtctcaactttgcattggctttttaaaactgccagtcatgaatattataggttagattctgtacattgttaacctctgccctatgattgtatattattgtgagtgaagcatttttagttgagtccgcaaacaaagccatataattttagtttgtttatccccaccctcctaattctttattgttcaaaatttcttacatttttgtttttagttgggggtaggatttggtaaaagataaaagggtgttgtattacttaacaagatggacaaatttgtattcattgtttgaaagggagaataagcatttctcgttaagtgtaaatcttagaaacatgggcagttttcagcgatctgaaagtaataaagttgattgtatctgtgaaggttttattagtgaataagagatttaatctttaaatttgctgagataaaacttgtcagcctccatcctttttagtgcaagtgtagctgtatctctgtttctcttctttgtaaggtgcattattaataaggaaaatatccaaattctttgaaattttaaattgaaaattagtgtctctggttaattgcaaagatgatcagtagccaagtaatttcttctgaactacctaccttttcaaaatcttcaggaattatttcctgtgacttttgtccttttatrtgtaacagtccttggttgagaacatgggcctctttggagtgttatagaggaccacactatccttaaggatcagacttgctatggaactaaggcactggatcaggaataaggggattggccatagtgggcccataggtaaacgtgagtcaaactttggggctgtaatcaggcatatggcaagatggatcaaaacaattttaacttggttgcttaatacagttgccctcggtatccatggtggattggtgtcaggacctcccacagtaagcccctcatataaaatgatgtcatatttacatataaacctatgtacatcttcccctttgagccatctctagattaacagtacctaatacaatataaatgctaggaaaatagttattttactgtattgtttgggggataatgacaagaaaaaaaatctgtacatgttcagtatagacccagttttttcttccttgaatattttccttctacagttgsttgaattcattgttgcatgtggagggccaactgtatattattttaagtatctgacttcccccaaaacaaactcagtcatattttaagattccaagcaaaatttttaaatgtagtgtgattttagaattgtatttgtttacttgagcgtttattgactcccttgctttgtggcaggcactaaagaaacatttttcaatgttataaacgatattaaagttggtctgactctcctttgcacagaactgaatgacttcatcatccagcttgatgaagaagtagagggtatgcagagtaccattctagttctgcagcagcagctgaaggagacacgccagcagttggctcagtaccagcagcagcagtctcaggcctctgccccaagtaccagcaggactacagcttctgaacctgtagaacagtcagaggccacaagtaaagactgcagtcgtctgacaaacggaccaagtaatggtagctcctcccgccagaggacgtctgggtctggatttcacagggagggcaacacaaccgaagatgactttccttcttctccagggaatggtaataagtcctccaacagctcagaggagagaactggcagaggaggtagtggttacgtaaatcaactcagtgcggggtatgaaagtgtagactctcccacgggcagkgaaaactctctcacacaccaatcaaatgacacagactccagtcatgaccctcaagaggagaaagcagtgagtgggaaaggtaatcgaactgtgggttcccgccacgttcagaatggcttggactcaagtgtaaatgtacagggttcagttttgtaatattttttcagcaaatttttatacagtgtcatttaatttgggagaggatactgtccagaaaattaatgcatacttttgtcacaatttgcctttttgtgggtgtacgttttggtttttttttgttgttttttttctttgttttttttttcttttctttttttttttttttttttttttttgcttcaatacttctgccgctttggaaattgtaacagttaattactttgaatgttgctaaaaggacattttgtgtagggtcaagttatttttatatgagttaatgtgaaattgtaaatggaaatttttccttaaaatacaacacaatgatgtctgtataaatctgtctgtttaraatctgtgctgtgtaagggcattcgtactcatgctgttactgtacttatgcaccattcagacttgttagagtagatgtgggtttatgactgccaagtttgcccagtacagtagttttttatcactaaaagttggactcattgatggagtcctgtagtagtttcagtgttagatacagttttttccaccatacatctgtgcattttctctttaggtgactgtttaagaaatttgtgtgcatagttactcagtttttatgaactgttgtatcctgttaatgcatattgctctgtgactccagtatatcttacctgtactgaccaaacctaaataaagatttttattgtaactccttaattagcttttttgttttgttttgggtgtatgtttagcatttgtcattttcattgagtcattgaatttctactcattatccttcaagtaccacaacagtcaaacttaagaccaagcatcgattacgattttgcacacaatttttaatttatgccttattttgcaaaacggagctggagtttagggctacacttaaaattttttcttgacttataattgttacaaaatattttaaaatacagaaaagtataaagaaaatagtcatctatttcttaggctttttttttttttttttttttttaattgagacagggtcttgctttgtcacttaggctcaagtgcagtggtgcagtcatggctcactgcagcctcaaagtcctcgactcaagtgatcctcccacttcaggcttccgagtacctgagactataggcatatactaccacacccagctacatttattttaattttagtagagacaaggcctcgctatgttgcacaggctggcctcaaactcctggccccaagggatccttctgccttggcttcccaacgtgttgggattgcaggagtgagctacagctcctggccctttttgagttttaattgaaaagcagcgttggttttttgtgacctgatttcaagtagagtatctttgtagtcagtgatgtttgttttaaaacgctggccagcactactgatttttactaacaacatatctggtaatattatatgagtaaggggtgttagaatgtaggtaggagaaaatgtttttaaggtggaagaatgtcaaaatttgctccattttctcagaggtaattaagtataaaagtatgatattgaatggccttcaaatgtgtagctttcatatatggttgaaatgaaattccatttctgttaaaagcaaagtattgttttagacataacttgtaatacaatcaaggaaccttgggagtggagttataatactcgaaaactgaggtacaacttatttgaaagtaattgctgcttttgcttgtttagctgatacaggtatatccggtcttcagcagtatgttaaatactgcactgtctcttgattaaccttttcttttttttctttttctcttttttttttttgccgagagtctcgctctgccacccaggctggagtgcagtggcaccatcgtggctcactgcaacctccacctcccggattcaagtaattctcctgcctcagactcctgagtagctgggattacaggcgtgcgccaccatgcccggcttatttttgtatttttagaagagatgaggtttcactgtgttggccaggctggtctcgaactcctgaccttgtgatccacccacctcggcctcccaaagtgctgggattacaggtgtgagccaccgcgcccaaccttgattaaccttttctacagtctgctcaagtgagtaaaaaatcctatacgatttttaatttgcatgtgattaaacattttggtgtttgatatatcagatactgtgtttggcttttgttatgtacatccttcaacttgaccaatttaaacaaaaatgtaatttctctgtcctgttggtgtaatgtaatcaagagtttgtgataggaaattaatttttcaaccagtgatacaattttatgactgaatttaatatggacctgttaatgtgacattttcatgtttctgttgagtctgccttgatgaataactcagagcacttattctgtggtacacagagtcagtatttctcatttctggaattggatgctttattttctggtatgcctgtgataagagaggtgatagagtggcttctgcatctaattggtttgaatcctggtattacacttaactgatttgggcaaatgtatcctcgaggctcgatattttgttttgtttttctcccctgtaagagcactcactgctgtcttagcttgggctgctgtgaaaaaaaaaaaaaaccacagactgggtggctttacacgcgcattcctcactgtttttggaggctgggaagtctaaagatcacagtgccccctgattggtgccccagtttggttcctggtagtcctcatacagagagcgcaatagatgtcagtttccttggctcctcaggtgtattggatacaactgactactccagtttttgagacacttttgcaaaacaatgtaaagccattccttctgacaactttctttctcagatgttccctctttcatgagtagttatgccctgtactcaaatcattgcctgctgctctacgtcactgtcttgggagttcacctatccctgtggttatagtgaacactttcataatcccaggtaatgtcattaactgatctggacccatcatggggtggctgtgctgagggagtgttgagctagcccctagtggtaaggagtacactgctgaccttcatcctatggcaattccactttggtgattcactgttcccctcatggagaccaaggaggaatttgctgcatggtaggttggtgaatccagcctgtagcaaagacctggcttggactcctgcaactctttatgaaacttaaccaagaatgattgcatcttccagcgggggaagatgctgagaaggccccttcaggataaactggctccatagcactgctgtaatgatggctcctcatgagtaagcacttggagatttttgtggcttcctgcccactcaccctgctcaccagtccaggtagtttatgatttgagatctagatgtaattttattttatttctttttttttttttgagatggagtttcgctcttgttgcccaggctggagtacaatggtgcaatctcggcccaccacaacctccgcctcccaggttcaagcaattctcctgcctcagcctccctagtagctgggatttacaggcatgtggcaccacgcccagctaattttgtatttttagtagagacagagtttctgcatgttggtcaggcaggtcttgaactcccgacctcaggtgatctgcccgcctcggcctcccaaagtgctgggattacaggcatgagccaccgcggccggccaagacataattttaaaaattatcttccagctggccgggcgcggtggctcacgcctgtaatcccagcactttgggaggccgaggtgggcggatcacaaggtcaggagttcgagatcagcctgactaacatggtgaaaccccgtctttactaaaaatataaaaattagctgggcatgatggcacgggcctgtaatcccagctactcaggactctgaggcagaagaatcgcttgaacccgggaggtggaggttgtggtgagccgagatagcgccactgcactccagcctgggtgacagagcgagctccgtctcaaaaaaaaaaaaaaaattcctcttctttccttcattcattattcttagtctctgtctgtctcatatgagtagataatcatatgagtagctataatgaggactcctcaggggacagattctgtttggccactcagcagaagcatgcaattaccttctcaagattggctcctaaacttactctagatagagccttcaggcaggaaactctatatcccttggctccagaagaatatattcatactcattcaaatgtgctaggcactggccataaagaatattggtgttcattcataactgcctataatgtgctaggagctgtgcataaagcagtgtaacaggatcatcttggaaagcttatgtagtcagtagaggagacagataaactaggaattacatggtaagttgaaagaggaagttaggggtaagatgctgcaccaaatgcaggagattggaaggtttttctggaagaagtgatgtttagggggagtttcagaggtaaatttctggtttggttaacagaagatagtttcactgctcactgagattacagaagaaacaggctggaagagtttggtttcaatatgtcaaatttgatgtgcttataggaaattttatttatttgagacagtttctctctgtcgctcaggctggagtgcagtggtgtgatctcggctcactgaaacctctgcctcctaggttcaagcgattttcccatgtcagcctccccagtagctgggattacaggcgcacggcaccacgcccggctaatttttctattttatggtagaaacgggatatcaccatgttggccaggctggtgtcaaactgctgacctcaaatgatccgccctcctcggcctcccaaagtgctgggattacaggtgtgagccaaggtgcccgacctgatgtgcttgtaagaatttaaatgaagagggtcagtcagcttaggagacgaggttagatgtaaggatttcagacttgtcagtatacaggtggtgattgatgccgtaggaatgactggtattacccagggagctggtgcaaagtaggagccttggggaacatgttaaggggatgtgagagtaagcccacaaagactcagaagtggccagggagtaaggggaaaatgggatagaatagagcaaaagccacgggaggcattccttgaattccttggactcagatatgttaggggacaggaaacacattgaagacaactgaagagacttcagtgtgctgctgagttcttagcagagtagacagctgatttcaccactattccagaccctaaagatttctcctgaaattgcactgttatgcaatttttttccttctctattgccccacctctggggcctacactctttaccttctctgatttatctgacccatccgcatatctctgcaaagtcttaatgtaggtttccaggatttaatgattctttcaatcaactttaaagttcttcaggaagattctccaggtccgtcaacagttttccccttcatgactttgtgacaaagctttcttgttccactatccaggtgttcccaacaagttgctgtaacggtggcccctcataagcttgcctggaaaccctagaaagctcagaaaaattatgaactttgcccagtaagaggctgggaagtcagaaagggttttaaacaaaactgaccccacttgttacatgctcctttcactgtccaaacgtcaaccaaaggaacttttgtgacgctaagacgctcccggcgtcctcacccgttcacagccagagttgatcttagaaggcagggggctcgcaccgagacgctcctagcaagcccctcacgcgagcgaatgactggcgccaggagaaacgcataggacctcccgaagccgccgagagcaaaaggacccatcagagctgtgctgagacccgccgcgggccgggctcgcactcgagattctcgcccgtgggattccagtcctgagctgaacgagagataagtctttgtcaccccccagtctttactgtttcgagaaaccctaagattttttaaaaaaaagcccaagacgtcaagtcggggaactccaacattggggtgtccagaaacactggggtttcaggcgctctgtaaatgcgtccgaggtccgcggttctgcccgcaagcccagaccccggcctcacttccgccccgcgccccgcgccccggcctcacttccgccccgcgccccgcgccccgcgccccgcgcgcctccgcccgcccctgctccggccttgcgcctgcgcacagtgggatgcgcggggaggtggtgcgcggggaggtggagggcgaggggcggggctacctcaggtcccgcccgcggcaggcctgtgggctgcgaggaggagctttgcctagcttgcaggcagcgcagggcagacggcggcaggagaagcaagatgaatgcaggctcagatcctgtggtcatcgtctcggcggcgcggaccatcataggtgagtggccggcgggagccgcgcagagtccgaggcgcctgctgcttcggcaggagcgccgagggccggacttgtgtaggagaggggcgtatgtggaggaagccggtcaggccaagccgcgaggagccgcgggatccctggaaccctgcggctcccgcgttccctgacctggt

SEQ ID NO: 98009 - DNA, 20991 bp, Homo sapiens
aattaggagtcagtttctttttctttttaaacactgaaactcacactcaacgcagtgagaggttcattagggagtggaacatgatggagacaggtgaaagccattctcagttggggcacagggagagcagcgccagctgcacaggcagctgaagccatccccgccaagcatggatggaggtcaccacactcctggaaacggcacgcccgcccacgggaaatgcagacaacagcaacaaggaaacaaaaaggcacctggagaaacaggccatacctgcgaactctccagttcccagtcaggatatcgtgtctaattttcttctcctgttcttcattcatatatgggattccgtttttgagaaacttaagacagaaacagaacaacaaacagaacaaggagacaagtcagagggatcctctgtgcctgatttcacgaggacaggtagaaaggggaaaggagacgggctgtataagccagttcgtctagatcacttgtaagacattcccaggccgggtgcggtggctcatgcctataaccccagcactttgggaggccgaggcaggtggattgcctgaggctaggagttcaagaccagcctgaccaacatggtgaaaccccgtctctactaaaaatacaaaaagaattagctgggcatggtggcgggtgcctgtaatcccagctacttgggaggctgaagcaggaaaatcacttgaacccgggaggcgaagattgcaccactgcactccagcctgggcaacagagcgagactccatctcagaaacaaacaaaagacattcccgttcccctcctccaatgccataccttgttatagttgaagccatactgattcaaaaactgaacactggaagcctggaaggagaattctgagtccaaaatcccaaacgttgtagggaagagatagaagttacaagaatgggctatatacctataataaaacaaacatacagagaaaaagccacaaccatttaaaaaactctggctcccagggctggcttcagggtgggctctttcttttaggcaagaagaatctgagtgtgcccgagtgtctgctgtgtttcaggagctatgattggcactgggggtgctaaatgaaaaaggcagagagcctgccttcagggccagcgtataccacagagacagcccctccacaagctgcccagggatgccaggttagggcgtgcaggctggcaccctcaactgctcatggggggtggggaggcatcctgatagttggggcatcctttctgcctactgtgtcaggtagtttaaacatcactttcattacaccacactgtgtcaggcgcttttattaatataggtgcacactggagacaatggaaatggggaaaggagcacttaaggtacagagcaaggctggcgggaaaggtactgcttccagagagacatcaaagacaagctggaatccgcagagggcagagtgagtggaggaacagacacaggagagaatacggaagatccagggcaaaagtgatcggggcacctgaggcagaatttgaaggtggcagctgtggaacataggtgggaagcacctatgtttgcagaagctcttgatacgtacttgtttgcctctccttcaatagcggaaaacacagacaatcctggaagaatgaccgtagagggaatgaatgccaaggaaaagcaacctgaatttcactacaaagacaaaaacaactcaaacagtactttgcgcccacagatactatgtgggctgtacaacaggataacatctttaatgacaaaaaagaaaagacagactggaagcatgagaaatgtcaaattgtaattcacactgaatttgctaaaatctaattgtggcctgttcttcaaatacagaagtaaatattaaaatgacattctcatagttttaaaactatccacagaaaataccaaaaaccattaagatttatatatttaactcatttaaaatgtctattcctcccccctcaaagaaaaccatatgcaaagttaaaaaaaaaaaagacttcaggccaggtgcggtggcttatgcctgtaatcccaacactttgggagacctaggcaggtggatcacttgaggtcaggaattcgagaccagcctgaccaacatggtgaaaccctgtctctactaaaaatacaaaaattagctaggtgtggtggcgcgcacctgtaatcccagctactcaggaggctgaggcaggagaattgcttgggcctgggaggcaagggtgttgcagggagccaagatcgtgcccctgcactccagcctgggcaacagagcaagactctgtcccccttccccccaaccaaatttgggtacaacaatggaaacataactacaactgtttcctatacttctcaaagaggtcttataattaaaaacaaacaaacgaacaaaaaaaaaaccataacagaaaagtagcaaaggatcaggatagagaggaaaacacacacacgttcagcatcattcatagtaaaagcaggggctgggcgtggcagcactcccagctacttcagaagctgagactggaggatctccagagcccaaaagtttgagcccagcctgggcaacacagcaaaaacccaatggtgcgggagagggcacagacaaacccagaaaagtaaaatctggcccagggtctgtttctgtaaatacaataacattttactggaatggagccatgctcatttgttcatgtattctctacagctaatttcacattacaaaagcaggattgagtagctgtaaaagaaacagcattacgcaaccgttaacagctctgtcttgaccagcctggccaacatggtgaaaccccatcgctactaaaaatacaaaaattagccaggcctggtggcaattgcctgtaatcccagctgctctggaggctgaggcaggagaatcacccgaacctgggtggtggaggttgcggtgagcccacatcgcgctactgcactccagcctgggcaacagagcgagactccatctcagaaaataaactaataactaaatcaacaaatagatctgtatgaaccgatacagaaagatctccaaatcccatcaaggaaaaaaaaaaagtttctgaaactgagatgaccttaaaaaaattatttttgtgtgtaaattttcttaagaaaaaaaaatcacaggccaggtgtggttgctcacgcttataattccatcactttgagaggcagaggcagaaagattgctcgagcccaggaagtcaagaccagcctgggcaacatgacgaaaacccatctgaacaaaaaatttaaaaattagctaggtgtggtggtgagcctgtagtcccagtttactcaggaggctgacgtgctagtatcacttgagcccaggaagtctaggctgcagtgagctaagactatgctactgcactccagtcttggtgacagagcaagaccctgtctcaaaaaataaaataaaaatcgcacacacacagttttacttgaaagagtaacagtgagtgttccttaatactgacttatttaagcacggaaacaatgctgctaaatttggtttgctccgaagtgttgatttccatatgtatacaatggcccaacacaaaacaagcatacaaaacgatactcaatatccttgaaaaatctcagagctgtttttacagtaggaaatccaaggacaataaaaataccttcttgaaaaactctaacagctgatattaaactcaccaatctgacagactgtaaattgctgaacactctgacgggtctttagataccactccgatggcaaatcaaaaagactgtgaacaaacaggcatctcattccacgagcaatgacatcccatcccggcactatggcctccgcggcaggaccaccactcgcaaccggggaggattttttccttgttacaacaactagggagcactaccatcatttagtggacagaaaaaagcaaggtcctccaacacgtaggagcaagccacacaaaacgtcctgccccccaaatgccaacaggctgctggccagaaacagtgctggtctggccaggctcttatacagaggggacacagctttagttttacctgatctgctggggcccagacaggttagaacgaaggcccgtgaactctatgtccagacctgccaggaaggcaaaaaatagcagtcctcgggtgcagaacatcgccagcactcctcacactgtagatctgcaggcggccaaggcacccgcgctcacctctgcgctcaagccaagtgaggtcaggaagggaaaatggaggaaccaaggcaaggagcagccaggcacctgggcgcacggggctctggccaacaagggacgtggggctcggagtgtacttgctgctcaaagtcccaccgccccggggctggagaaggaagcccccctgtccttcccgaggccctctctgaggccctgtggcctggcaaccgtcccgccaccccctccccaagctcgcccggggcaaggggctctgtccggcacagccgcgaatcccaggctcttcacccacgaagtcggcctcctggacgagctcctgcagcagagggaggctctcctcgaactcgtcggcgcccacgtccatggccgtgcagctccgcggagtcgcccagcgctatcacgtgctgcccacgtgctgcccacgcgcttccgtcgcgccgccgggtcttaaagggcgcacacatggaaaccaggcagctgcctccgccccacgtgcccagcttccccgtgtgctgctggcgtcgcccacacctgcctgcgggtgttttaattgtacgatttgctacagaggtttgattgcaattgcaatcaaagcctgtttacctggctcctcagcaatttctttgcagcccttaacgtgagaatgtcatttacatggacttagaatgttaagaggcgtggcaggagacgaagacagagtccagaaagggtgaaatcagaaaagcggagcaggaacaacaccggacgcaactgcaataagcagatcctttgctgcggctcacggtcttctaaatcacctcttcccaacttctccatcactgccagtatgtctgtccccattccctctcccacgcccctggacatctttttcctcattctgctgtccaccttaccactgtcttcacacctgcaatcaaactttgcaaagcctcaagaactgcccattaaattgaaggaatccttggtccccagggattatctcgtgcactcactccttgcggaaatccctacctacaccatcacatacatgtgagcttaatttttacttttgttactgtttccagtgcaactagtccatggtcttccttacagtgtcctcccttgaattctaggcttctacttgaacagcgttttggaactatggtcctcaaagtgaggtgctcaaatcaatctttaaggttagcggagaaaacattaccgttatacttttttattttttccttttgagacagtctcactctgtcacccaggctggagtgcagtggtgccatctcggctctctgcaatctccacctcctgagttcaagcgattctcccgcctcagcctctgaacagctgggattacaggcatgcaccaccacgcccaactcatttttgtttttagtagagatagggttaaaccgtattggccaggctggtctcgaattcctggcctcaagtgatccacctgcttcagcctcctaaagtggtgggattagaggtgtgaggcactgcatccgatcttcaattatacttttaaatgcctctccgggacattaattaagcaaaaggggactattaagccatttgattctgaagacctctcagaacaaatcatacttcatacagatgtgttccatttaaaataacacattgaatactcaaattggcagaagtaacatatttcacttctaaacaaacatttaattggggtatacattaaaaaaactggaaaacaatgctctagaagccaccttaactgcctacaggttttttctcacatttatcaaatagccaaaaattaacaccttaatcagctcctttcagagaactgccatgattcccatctacccaagctcaaattttagattaacttgcatgcatttcaagtttcatctcctatctaataaaatgttcacttcatggcaaattgagcgcccactaaccccaaccatttccacctctgctttcagctcctgatgccacctccttcctctttcaaatttgtttctcttactgttgggaaccaagagtccaagtgaggttggcatttggtcctttcattttcacatwctgactgttctataatattagattgatactgacatttcctattttaaaaaacamcccacactccgagcagcaaacaactgtcattcactgagatcactcgccatgaactagacacagtaataagtgctttacatcaacctcatatgtgctccactgccacagtgagctcagacaatgtcatataaccagaaaataagagttcataatatgcctttattttgtaatttataaacaacttctgacttgccctttgaaagttaattataattgatgactgcttttcttagatgcttctgaagcccaagagaggggcagaaygtagttcttgatttaaaaaaacagaaaggggaggaggatgaccttaactacaaataatattccactgcaacattattgctgtaaaacttccaagctggctgttcttccagatgctctcttttgatggctgtagtggctgacagatttatatttacatgttcaaaacaattaatgcttccatttattcatagattctctgaggttcccgtagaaccacaccaccttctgtcatggcactttgtagtcgtttcatctggttttgaaaatcagawaaaaaaggaaaagattaagtcagcagcacragtaggctgaaaatactttcaccttccaaaagacagaaataaattgatttgttcttgctaacttcccagcctacaacrgtttttcagaaagtgatcttaataatgatgtaagtaaaaaggaaatgtagagatgtcaaggttcagcagcatttcaaaatattatatggacaagatgtcaatatatgaacaggaaatacagtggctgacatcatggactacagaatcagtcaccctgggtttgaaatccaccatacactgactctgggcaagtaagcctcagtttatttctgtatagaatgagagtactagtccctaccctatggactgatgtgaggattaaatgaagtaacactgttgagtactcaccaaagggtctgacacatggaaagtatttggtaagtaaaaactgttattattatgtaagttatcyaatgccaagaattaacacaataccttttcaataartacatgaaaacaaaaataccgagtctgaggctgcctcccacggggttggttggtagaccatgaagttgattcccgcctctaagcatctctgtgccagcactcgtcctatactctcacaagccaccacatttctggtactataaaggtgctttttaatagcccactcacgagtggaggccgaaaccacaaccttgccattctgatgctccacaagtgcttctacatgatgctgagtccttataactcgcaacctaaatggggtgagaagataataaaatcacagaagaatctgtatcctaaagttacattaattgaggtgaataaatgactaaatattttycaacaatccagtgtttggttmattthacatatttaacttggattttgcttgggaaaagtatttttcctccgcctttatgagaatatcctcaataataacaaactaaatagttcaagtatcatgaagaaatttgtttctgaagagctgagttttatttacagatctacttcaaagagatttgaagagacagagctaagttactgaacatatgcatgayatggatatacttactctttgcttttatttatagctagcaccaaaataaatataagacggaacaaaaatttaaatgcaaaaactgaaatcataacagtactagaagaaaacatgagaawtttttttataatctcaaggtatgcatatttaaatatgacatcaaaccatgtcatatggcttttattatttttcagaaacagggtctcactgtcacccagctcggagtacagcagtgcaaccacagctcactgtagcctcaaacccctaggctcaagcaactctcctgccttagtctcccaagtagttggcattacaggtgcatgccactgcaccaagataatttttattttgtagagacagggtctccctatgttgccaaggctggtgtcaaactcctggcctcaagcgacccacccttctcaacctcccaaagcactgggattacaggcatgagccactgtgtccagcttcatatggccatttttttttttttttgagacagggtctgcctctgtctctcaggctagagtacagaggcacgaacttggctcacagcagcctctgcctcctgggwtcaagtcatccttccacctcaacctcccaagtggctgggactacaggcgcatgccactgcacccagctaatttttgtatttttttgtagagacagggtttgccatattgcccaggctcgtctcaaactcctaagctcaagcagtctacccacctcagcctcctaatgtgctggggttacaggctgagccaccatgcccagcccctcatatggcataaaaaagaaatgatggacaaaatttgctgcatggttaaaaaaaaaaaaaaaaaaaaagtaaaatgaagtcaaaagaaaagcaatgaaacaaaaaatattttaggctgggcatgtgactcaagcttgtaatcccagcactttggaaggctgaggcaggaggactgctagagccaaggagttcaagaccagcccaggcaacacagtgacactctgtctctacaaaaaatagaaaaaatcagccaggcgtgatggtgtgcacctgtagtcccagctacttgggaggctgaggtgggaagattgtttgagcccaggaggttgtggctgcagtgagccgtgataatgccctgcactccagcctgggtgacagagtgaaaccctgtcacaaaaatataaaaagaaaaaatattttaaactcatatattgttcaaagagctaatttacacaatatgttaaaagcctcctataattaacaagaaaatgatcaataacttgtggggaaaagcaagagatcagattgttactgtctgtgtagaaagaagtagacataggagactccattttgttctgtactaagaaaaattcttctgccttgagattctgttaatctatgaccttacccccaaccccctgctctctgaaayacgtgctgtgtcaaactcagggttaaatggattaagggttgtgcaagatgtgctttgttaaacagatgcttgaaggcagcatgctcgttaagagtcatcaccactccctaatctcaagtacccagggacacaaacactgcggaaggccgcagggacctctgcctaggaaagccaggtattgtccaaggtttctccccatgtgatagactgaaatatggcctcgtgggaagggaaagacctgaccgtcccccagcctgacacccgtaaagggtctgtgctgaggaggattagtataagaggaaggcatgcctcttgcacttgagacaagaggaaagcatctgtctcctgcctgtccctgggcaatgcactgtctcggtataaaacccgattgtacgttccatctactgagttagggaaaaaccgccttagggctggaggtgggacatgcgggcagcaatactgctttgtaaagcattgagatgtttatgtgtatgcatatctaaaagcacagcacttgattctttactttgtctatgatgcaaagacctttgttcacatgtttgtctgctaatcctctccccactattgtcttgtgaccctgacacatccccctctcagagaaacacccacgaatgatcaataaatactaagggaactcagaggctggcgggatcctccatatgctgaacgctggttccctgggtccccttatttctttctctatactttgtgtctttttcttttccaagtctctcgttccacctaacragaaacacccacaggtgaggaggggcaacccaccccttcataacttaataggcaaagcattatccraacagactgttcacagaaaagaaaaatattaatgactcaaattcacaaaaatatgctcaatctcactaacaaaatgcatggacaagacaattcgatgcaacactgtaatcataaaagataatcaccctctaggagcgagttaagtaaaatccatgcaatagtattccatacagttactgaaatgaatgaaataatgctttataatgatgaagataatagttaacatttactgagcacttagtatatgccaggcctgtcttaacggtttatagataaagcttatgtctcaattctattattttttctatatttttttttagctgcagaaactaacacagaaasgttaagtaacttgaaaaagattaaaactagtaagtaatggagccatggtttaagtcccagtgtctggctccagagtcaatgctcttaactaccatgaagaatctccaagatgtatttttaagtgcgtgcttggggtggttgagggtggtggtgaagaaagatgcggaagtgtttatcgtatgctaagatttattgtttttaacagtttttgcttatatgcatagacaatctttagaaggacacacaagaaactgtactccctttggattttataacatacgtatatgttaccctttaaaaagtcaagtttaagttaaagaaaacacacccaaatcattagattctcactaggattctcaatgtgaaatagaagaggcattagatttggaaatatggagtctactcctggttttcctggtggctctagtaaaaaatcacaatctctttttttttttttgagacggagtctcastctgttgcccaggctggagtgcagtggcgcgatctcggctcactgcaagctccgcctcccaggttcacgccactctcctgtctcagcctccctagtagctgggactacaggygcctgccaccacgcctggctaatttttttgtgtatttttagtagagacggggtttcaccgtgttagccaggatggtcttgatctcctgacctcgtgatccgcccgcctcgacctcccaaagtgctgggattacaaacgtgagccaccgcgcccggccaaaaatcacaatctgttaaaccaggagtcaacaatctttttccacaaagtgccagatagtaaatattttaggctttctaggtccaatagcttctgttgaaactgttcgactcagccattgtagtgctagaacagccaggtgatgcgtaaacaaatgagagtaggtacagctakgttctaagaacctgggcaacgaaatttgattttcatttaattttcccaagccacaaaatattcttttgattttttttttaacttaaaaaaagtaaaaacaagtttttagctcacaatctacctttggcccacgggccgtagtttgctgacacttgaaccatttgttcaatgaagggcccgattcattatgtcaaaggtcatttcctactataatattctgaaattctctacttttaatattgcgagtaaggcagacagagaaaaaatgaggaaatacatctttagttatttttaatgatccaaatattaaatcaaagtaatgcgttggggccgagtgcagtggcycacgyctgtaatcccagcaccttgggaggctgaatcaggcagatctctygagctcaagagctcgagaccagcctgggcagcagcaaaaccccatctctacaaaaaataccagaaaaaaaaaaaaagaaaaagaaaaaaattagccggccatggtagtgtgtgcctgcagtcccagatgctcaggaagctgagatgggagaatcgtttgagcctgggaggcagaggttgcagccagctgatactgtaccactgcactccagcctgggtgatagagccagagcttgtctcaaacaaaacaaaacaaattagctgggagtaatggcatgcgcctctagtcccagccactcaggaggctgaggtgggaagattgctggagcccagggaagtcaaggatgcagtaagcagatatcataccactgcattctagcctgggcaacagacccagaccctgtctcaaaaacaaagaaaaaagaaagtaataggttgggtgtttcaaaagatttttagccttaagatccagattatttaaaaagtgaactgcctactccctttcttggactccctcctctatgagtaaaaatgtattacagcaactgtaacacatcattatccccattccactttccactatgaaacttaagacttttgatgacagggataacatctactttatctttgtaactcctgcctctaacgcaatgcctakcaagtgatacaggtatgatgcttgttcaataaataaataatacatcacacagtaatgatttccaatttactcttacaactttacatagtacttaagaagtccttaagaaattctaaaaaatcctcaccaagcagataagcagcagataaacctgataaacacttacatgctgtagtatagtggtaataacctagygtcctggctctgaggtcagttaaaacatatgtaaatcttagctctggcacttactaatcatgtctccctaaacctcaatttctttgatcctgtaaaatgggggaaattataactgcttcatgatgtaattttaaggattaaatgagaaaaaacatataaagcaagtagcataattcctggcaaatrtaagtgttcattaaacaaccacctttataacaaagtatctcaagtcatactagactcctaactggtctttcttcaagtcctgctccctcaaaaatttaatcttccaaaaagcagctaaaatgatttttttttttttgagacagaattttgctctgtcgcccaggcgctcagctcactgcaacctccgcctcctgggttcaagtgattctcrtgcctcagccactggagtagctgggattacaggcgtgcaccaccacgcccctctaatttttatatttttagtagagacggggtttcaccatgttggccaggttggtctcaaactcctgacctcagatgatccgscttcttcggctggctccctaaagtgctgggattacaggcatgagacaatgcgcccagccagaatgatcttgaaaaaccaattcgggctcaagctttaaatcctctcgtagtttcccactataatgaaaagaaagtctaaagtgctcatcttgacttacaaagctaatcatctgtcgcctccttacccctccatgttcatcttgggccattcatcctctgcccattgagcttcagatccacaagcccttcagttcctcaccccagcagtttcctttgctaggactgctctttctggcagatgactaggcttcttcctctttcagatctcaccttcttaaatgtcacctcagacaggcaggtatcctgtccgctactgtaacatcctctttaaatagcccccatcacacctatttgttgtttgttccagcccctccgcgaaccytgcctctacccgccgcatggcagctacctgggagagtgcctggagttgaatgaatgaaaatagtctgtagggtgcactgcccttgtcaatcacaagcagatttaattacctgtgccagaactcacgggagggaaacaccgtccgccagccccgctctttcctggctacagataaaagctccaggttccgggggttccggttggtgaattctggggcgacagcttcattttccacagggtccacttcaggtttcgctgccggctcggagctggttgacagggctgcgaacctgcaccctgggcaacgggaaaaaccgcacagggcttaaaaatgacggatatggacagcgcacgaacccgctctaacgtctatccgcttttacacccccaatctttaggcccgaggggacgaaaaatacgtatgcccacagggtggagtcagcactgaccccgtccttaacttcctactgtggtcttcgcagtgccgcgagctctatttcgatccggcacgtcgaatacaaaatagaacccgcacgttccaatgtactgtgcaagcccaggcgagtgagctgggagaaggggggcaagactaattaccagggttcctgcaaaccgagaacccccaaaacygcgaccgaagcgccatcgctgagacgatctcggaaaagcctcgcctctttttyctcacggacgactcagtcgctcgccaggmgcagccatataaagtcagggacaagcctttggctgctgtagatccccaaactctccacgccagacgccrccgacccggaagtagcaagtcccctgccactgagtggccragaaggcgatctgttatcctkcaycgccaatcatcgctcacgtcgaggggcacgcaggccctggagcccaccaaccacctcgtagctacgcccaagaccacgcttkttgcttaagtccggggtcaaaggcacacaccccacaaaaccatgtttgggttttctactcggagagcttgggcggtcattgactggtccacacacaccccacctgggcaccgcgtaggaataaggcagggcaagatgcagttttctccttaaaaagggtggttgtcttcctcgaaccaaaaattttcccgtatggcccgctggaaaaactgccccgtcccacccaggttcgcgcccttaaacttacactcctgaggcctggagcaaagccggccgatctgcctcacgctccccgagcagggacaaggaaaagacactaaacctaaaacgcacgactcgctcagaaccccaactctaacttggagaagggcccgcccctccagttacaccccagctccaagctccacccttcttacaaccttttctagaaggcactagaatggcccactgcgtctgcgcaacatcgtttgaggcgaaggttcaacctcttcccagcggtccaacatccgacttccgttctccgctttcgcgcccttcccatcggctatctaattggacaaaaatgccgaccccgccccttccccggagcctcacttccgtcacagtcctgtttctctccctgttgtccctgcctctttttccttcccgccgtgccccgcggccgggccggggcagccgggaagcgggtggggtggtgtgttacccagtagctcctgggacatcgctcgggtacgctccacgccgtcgcagccactgctgtggtcgccggtcggccgaggggccgcgatactggttgcccgcggtgtaagcagaattcgacgtgtatcgctgccgtcaagatggaggggcctttgtccgtgttcggtgaccgcagcactggggaaacgatccgctcccaaaacggtaagggcgggccgggcctgggtcgggtttgcggccggggagggccgagtcccaccgcgaccggaccccggctgccctcgtttctctcctttacctccgcagaaagggcctcggggccccgcagccggacccagcccacccgccgttctctggggcagggcgctgtggccccacttttcccacagcgaggaggagccccgccgcgcgcggcagggttttgagaccggcaacgcgtggatgtggtgtccggggcggcgttggaaacgcgccctccgcgggaaagcgggcctcccgggctcgcacgtgcgggccacgcctcgcacccccttttgtttcagggcgaccccctgagtgtccatgttaaacgccaggttttattttaggaccatttaccagaaaaagagtaggtccatccgcgcgccctcggatgagcccggtgccctgtccgcccgcagctgcagtcgaggtcgggcgtccggcgtccagccgtatccgggttgacagcttcttacagtagagttagcccaggaaacgccactcgagtgcattgaccccaggagacggcagcgctaacttagcagagcgtttgctgtcaggcctttggatacctacagagcttactgtttcttgatagattcctaatttttttcgtaaacaaatctgaaagtcaccaccttccccgttgactaccgatttctctcctcacagataaagagagttttaatgagcaaaaaacttgcagaatctgaaggaaaaggctggtatagctgtacgaagtggcagagcatgaaattggtggttattactttttttttttttccccgccatcagattccaccccgcatcaaagctgtgccaaataggctcgctttgtttagggacagggtcccacctgtcgcccagacgagagtgccatcatagctcactgcattctccaagcacaggtccgcgccgccgcatccggctttgtttttattttttgtagaaatgggtttcgctatgttgcccaaaggggtctcaaactcctggcatcaagcgatcctcctgcctcggcctcgcagtgttgggattacacctgtgagccacagtgtctggccccatttacactcttagtaggtggtttttaaataattaacacagatttgtagatttgggaaatacgggggctgttggatgtcatttacctttaggctgaaattactgtctttcagagttgtggcttatcctcatttcttttttatttttaattgattgtctacagttatggctgcagcttcgattgccaatattgtaaaaagttctcttggtccagttggcttggataaaatgttggtggatgatattggtgtaagtacacataactgttgtgttagtttccttaaagtaaaactatcttcagtgttttgctatgttctttctttgactttatcagaatccacgtactggaaggtgatattaaaggtgaacgtgtattataatggggctgtgttgatttctataagtggttcatattttttcctgcgaatttcttaggatgtaaccattactaacgatggtgcaaccatcctgaagttactggaggtagaacatcctgcagctaaagttctttgtgagctggctgatctgcaagacaaagaagttggagatggaactacttcagtggtaggtagactggctaaagaatgatcatttttctaaaaacgaccgactttcagaaagttgaagccataagtgggtcatttgtgctgtgtcagaaataagttacatattctgaatgcccagaagattgagcaagaagaaaaaacaaaagaagttacacatttaagaggggaaataagcttcttaggtacagattcagaaacaaaatttgtaagttgatagttacagctagtttgtacagtttaagtaggaaagaatttgagttcatttgacatagccccattgttttaaatgttggtattcacaagttttgagggcttatttttccttttatggcagtattcagacatcacacagatttttttatggtctctcaaaagtcttgtttcctcccccatcaccccttgagacttggaaagctctcaacttttctgattatttggaggataaaatgttaccaatctgggggagaaacaatgtttttatattattatttttaagagaccatctgtagcacagtctgaagtgctgcagtgctgtcatatctcactgcagcctggaactcctgggttcaagcaatcctcctgccttagcctcccagagtgcttgggattgcaggcatgtgccaccacaagcaactaattaaaaacctcttttttttttttttaagagacagggtctcgctatgttgcccaggctggtcttgaactcctggcctcaagtgatcctcccttctcggcctctgtagtgctgggattacacgcatgagctgcactcagcctgttctattttttaaatcctgacaggtaatctcaggaattcaaaatgggagtgtgagaaattaataaatacatcatgatatgacagtgtgatcttaccgagtcagtaaatgtgatacacagtataaactcttcatagatcatccagcatgctggtatagtagaaacactattgtttggtgagaaagatgttaattctggagaaactagatagtttgtggggaaaatgtatttctagattaaactttagccatgaaagaatggaatctactcctaaaatatgaatatgatctttgtctaacttacgataatgtgatttaacaaatgtagttttccttccataagaagctgacagtctttttgctttaaaaatatttcttagtgttttatcaacttgaagaactatcttttttaaataaaataatagcctaatataggtcatatgaatagtcacactcggtttagcttctgttgagcattttttctaaaggtaatagatgtgttgtcttttacggttgtattgatgaactagtttcttattgctgaactagtttcttagaacatttttctggctcctacccagttttggccatttgcatttataatacaataagacctcactgaacatccacagtggcttcatggaaactgactttaagaggaaagatgatgtataaaaaaacaagttttcctccccccatcagcgttacaataaacaactgtatttgagaaattgctgtccattgttttgcttaaagtggcagtttccaagaatttatgagtaacgtggaggacttggagtgttttgtagcgttcttctcccttcacgcccaggtttctaataaccagttaattcatttcatcactaccattttggttaataatatatggccattttagtgtcattccatatgtattgcacatgttgaatatccggcacactcagaccggtgaatgttttctcaacaggttattattgcagcagaactcctaaaaaatgcagatgaattagtcaaacagaaaattcatcccacatcagttattagtggctatcgacttgcttgcaagtaagattgtttgcattcagagaaattttttttgatgtaatagttgtaaactgtgttgtcttaacgttttgattaataactaaattttaatttgaaaaccttcaatttaaatgttttagcatttaagtagtaatatttgaagttaaaaacttggaccagtatcttttttctcatttgactaccacattttctcctaataatagattttagtggctatgcttatgggatagattaaacttgccatgatctgaagagggagggttttttcatgtcctcctcctatatgaaatggctgaacgggtattattacttacgacattttggctctgtgttaagcatgatgaatgcaaagagtttgagtagtgactttataagcgtttttctcccccacacttttaaacagggaagcagtgcgttatatcaatgaaaacctaattgttaacacagatgaactgggaagagattgcctgattaatgctgctaagacatccatgtcttccaaaatcattggaatgtatccttgtggttgtcagataaaatttagactttttaaagcataagactttgagatgggcatggtggtatgtgcctgtagtcccagctactaaggaggctgaggtaggagtattaattgaacccaggagtgccagtccaatgtgggcaacatagcaagaccctgtctcgggagtgggtgcgtgtgtgcgcatgtgttgcgcgcacgcgtgcgtagtagcagcagtatcaattttgtgcaataaaattttgaataaccaattttatgcaaattgatatcaatagagaggagtaatgctgtattgaaattacctgttgccttccctgcttttttagggtgaaaaggtaataaaaagcatgtctaaaagtgatatgaattgcagatagtgataatgttgtaacattttggtgacaagtaatgcttgctgctttaatagattagattactaaaaggaagtcccttgaaattacccttgatttttcacgtgtgtaccctttgtccattccaaacctgttactgtccttaacttttggcgtagaaatggtgatttctttgctaacatggtagtagatgctgtacttgctattaaatacacagacataagaggccagccacgctatccagtcaactctgttaatattttgaaagcccatgggagaagtcaaatggagagtatgctcatcagtggctatgcactcaactgtgtggtgggatcccagggtaaggtttgggatttggtttatagaatgagattgctacagattaaaactagcttttcttttggctgggcgcggtggctcatgcctgtaatcccagcactttgggaggctgagtcaggtggatcacgagggcaggagtttgagagcagcctgtccaatatggtgaaacctcatctctactaaaaaatacaaaaattagctgggcatggtggcacctgcctgtagtcccagctacttgggaggctgaggaaggagaatcactggaacctgggaggcggagattgcagtgagccaagatcacaccactgcactccagcctgggctacagagtgagactccgtctcaaaaaaaaaaaaaaataaaaaatgtttttttgtggattatgtgcagtacatctttttgtaatttaaagcacatacaacatggtagaaggaatgtgaattaaaagaaattacgtgcatttaatgccataaaatttttctaagataaaatgcaatgaattagtctaaatttgtgtgtttacatacaatcgattataggtactctttattatgcttttaaggatagacgtattaacttaatcttatgttcaattgtaggcatgcccaagagaatcgtaaatgcaaaaattgcttgccttgacttcagcctgcaaaaaacaaaaatgaagcttggtgtacaggtggtcattacagaccctgaaaaactggaccaaattagacagaggtatgttgagagattatttttggccttttaag

SEQ ID NO: 98010 - DNA, 23942 bp, Homo sapiens
gaagcatgtctcatcttaatcttcatgacattctggtgaggtgagtaattattatgcttattggacagatgagaacatggagcccaaagagaaagtctgttgccaaatgtcatacagtaagtggtagaaccagaactagggcacaggcttttaaaactttaagctggatttcttattcccaaggttaatagaaccaaaagaaaaggacaattttcttattaaataagtaatttcttatttattattaaatacataatttatttcccacttattaagttcttattaaaaattacatatttaataagaacttactaattaaagaatgtgacctgcttaatgtaatagaagtttttgactaaaattgagggtctatgtctggaattatagcatacttttttctttttttaagtggagacagggtctcactatattgcccaggctggcctcaaactcctggcctcaagcagtcctcccaccttggcctcctaaagtgctgggattacaagcatgtgccacctgcatacaattataacttttttacataaaacaatagtagtgaaagttacggtctacagaaattcagtaactaccatataatcatgttagtgtttcactactattgatttaaagcttaattggtaagaaaatgtggcacatatacaccatggaatactatgcagccataaaaaaggatggatgagttcatgtcctttgcagggacatggatgaaactggaaatcatcattctcagcaaactaacacaggaacagaaaaccaaacaccacatgttctcactcatagatgggaattgaacaatgagaacacttggacacaaggcagggaacatcacataccagggcctgtcatagggtggggggctgggggagggataggattatgagaaatacctaatgtaaatgacaagttgatgggtgcagcataccagcatggcacatgtatacctatgtaacctgcatgttgtgcacatgtaccctagaacttaaagtataatttaaaaaaaagcttaatcgaaatttgccagttggatgaaagttactggtaaggtgaaaatgtcttagttaacaggagcctctgtaagtgagcccttttttcaaatttttgactgaggatattttaagtttagggtaggtttgttttatttttgttatccttaataagcattaaggtaaaatttcattttcagtttctaaacttaagcctaaactcttaagaattgaaagaaaactctttgttttgcttttgtaaatagcagataaagaggaatgacctgtgaaaaatctgcttgccttgccttttgtaaatagcagctctcaaggagtgacctctaaaagaagctggaatgttgtgatagtttatcctgctctcaaatcctttacacataattaagcagcaaaagactttagcttactggagtgtgtgtgtgtgtgtgtgtgtgtgtgtgtatttatatatatatttcattctaacttgaaacatgggacatcaacagcttttaaactaaagctcattcgattacatttctttttttttttttttttttacgtagggtcttgctctgtcacaggctgaagtgcagtggcatgatcatggctcactacagcctcttagcctcctgagtacctgggaccacaggcatgcaccaccaccacactcagctaatttttagatttttttttagagacaaggtctcactacgttacccaggctggtctcaaactcctgagctcaagtgatcctcccacctcagcctcccagagtgctgggattatagacacaagccactgtactcagcccacattctcagtaatacaaaatgtaggaatttaaacacattttggtaacagcaagggatcttagcttttttatgagtctgaaaagtggtactatattcagtgtgaagtgtgaaaaaaggaaaaaatttgagcaggggtcaggatagagaacttttattctgaattcataatatccataatatgtcactttaaatataattcaaagatgattttccaaaagaatagtttgggtattggttttagttcattcatatgactatccttgttaaatgaaaagtcaaactgaagcttccttagactaaatcagagttaaaaacaaaactacattttaaaaatccacctgtcaagataattttagtttggttaattaagtggcttctggataaatgtttcttataatcttagtgtttgaagggcaaaggcagtcttattacaaaaatatgggcaagtatttaactgatcctgaacctatttatgtgtttaatctttgcagcctctcaaggtagagtccttgtgttatctcagaatctatgaaatcataattgtgctttgacttctggggaaggtattgagtaaaaagcagcatacagaggaataaggtgggaaggaaaaataggaaagaatgggggccccaagtttgtgatttacccactccaagccaagagacaaagctgggtgtcattcttgaaggggcccacctgacccccacacccaattcatggccatgttatgtcagtttcaccttgaaatatcttttgactccatccacttctcccatcctcactataccatgtcacttgcctgtactcctgacaaagacctgattgatcctttctaccacctcctgctgggctttctccactggaagtggtgatctgtttgggctcaccattgtacccttagcttagcatcaaacagagtgccttgctgaatgaatggatttgcattagttattaagataaatatgaccgtgtctctgctctgcttaaaatccttctacagagtttccattggcctttagaataaaatctccaacttcctcttgggaccctcttccccattctcatttcgtcacgtggttccttggtgttccccaaacatacccagctctttcctgcctgaaggctttgtggcaggtggtttctcagccttgaaagttgtctgcccccactctgattcatgagtactcatctgtcctctaacctcaatcaaaccatgttgtcacatcctctcatggcactctctacacctttggcgcagatgtcactttttaaatcatgggctctgtctctggctatactgcagccacagcttcccggcccaggaccatgggtttgttgcttgaagatactggcctgcaggtacaaagccatattacaggtgacttaaacatgccacctacagtactagggacccagtttctgggcccaggagataagaaattgggaggtgacagaacatggtatggggcagaggaaggaggatcctgtcgtaatggctcaggttttaacctaggctactgctaggttttaccgtttgcaaaaacattagaatgggactcctttttttctttttttggacggagtttcaccctcgttgcccaggctggagtgcaatggaacgatctcagcttaccgcaacctccacctcccgagttcaagcgattctcctgcctcagccttcctgagtagctgggattacaggcatgtgccaccatgcctggctaattttgtatttttcatagagttggggtttctccatgttgctcaggctggtctcgaactcccgacctcaggtgatctgcccgcctcagcctcccaaagtgctgggattacaggcatgagccactgtgcccagccttagaatgggactctttaaactgacttcatgtgtcacccacttatttgatccaatatgaattggccaatgtgattgtgccagtatttttagttctacatacacataatttgaatcatgactcaagattctaattaaggagagaaattcttgtggttaataaatagctttaatagagttttttttttttttcttggaagaaattctaagtagaacttggtttgggtcttctagtctgttcatttcttaggacagcattgaatgataggattttggagtagaaatgggctgagaaggctgagtaattaaactgcctccatttagagatgggcagacgaagtgtggttggtgacatccaaggtcacactaggctagcgtgaagcaaagctggaatccaaccagaccttctggattccagaacaatgtattccctgctgctttatgcccccatgttaagtatttaattagcataagttgaaacttcaagtcagcagtttttagcactgatgaactcattattgttctctgatcttctttaaagacaaattttatgatgtgtcattcatagagccacatgaccctgcttggcaaaaggcattgagtcaagccagaccccactaagcctttgcaaagtggagcggctagttgtagccgctgtagttgtagtaagtggagcggctagttgtgtaccatctgctagtgaaagggaaatgagattattctagaagccagggactgtctcgggatctcttatggtctctggatctcttatggtctctggatctcaaggacagcaaccctcctctttattcctcggttttattagtgtttccagcgtgacagttcacttcctctaaacaagacatagcttcgtataatgccagcctttcacgcatcattttgaatcaaccctggggtggtggagcccagggtaacccagctgtagtggactttagaacgtttttacaccatgtatttaaatatgggtgtgtctgatattcggcaaattcatttcaagccaaatgacgtgtcacactcaaaagctaggatgggcccaactgagaggctgccctagttttctgagcgtgacctggctgaattccctcgcctctcctggcagagaacaggcatttccccttgctttcgtcccactgcctgcttctcagctcgagctgggaacagtgagtgttcaggtcttactgggtctcagatattttccagatgaaatgcaaaatgagaataaagggagaggccctattccctcccagctctttatggtctctggatctcaaggacagcaaccctcttatttatacctgggttttattagtgcttccagtgtaacagtatcacttcgtctaaacaagaaacagcatcttataatgccagcctttcatgcgtcattttgggtcaaccctggggtggtggagccgacagacctgggcccccaaacagctctgccacttgctgtgtgcagatcacagaacatctgtgactcagtttcctttttggtaaaatgggactgttgcaagcactgatgttgaggtaatactcataggatgacggtcaataaatgagacgatgttttttaatattaactagctaaaagactggacgcgtcccttcactttaggcgctgttccttatcgggaatacgacgaagctgatcccaaaggcctctccagcccttttcagcagacagtcccgtgggtcctcactctaaggcattctttgaagacttggtctctcttccacacacccctcccattccccatctcttagtggtggtctaacccgccccgccatccccttccctctcacttctcatatccatttggaagctgcagattgctgagtttccaggactttaatccgcgccctttgccctcggcccgggcttaggggtcgacctctgtcacaggaggcgcactctgcgcttggatccatcctggggcgcccgggccgtggatctccaggtgggagaccggaggagagcgcagacgttccggcgccaccctcggacccgccggcttttccaaacctcttgaggagcctgagcgccctctcggcccggcgctgggaggctgccagcggacctgggaccgcggcgggggcgggtggtcctcgccttgcggcggggaaagagctagccttgcacgcgcaagcaccggcaaggagcccaggccgagggtgcgcggtccagcactgggcgccctgaccctcgagctcctcagcccccaacaggccagacccacccagaggccccagagcggaacggggtgtccgcagcgccacgccctcgggcgccaccctgcaggcatgggcgggcccaagactgtccccgctggaggcggtagagggatccagaagtaatgagatgctaatgagtcgcgaataaagcccgggcggcgccccgcgcccctcgcggaagcccacactccgcgcgactccaggcgcacgccccgggccgccccgcatcccagcatccccgcccgatctcggcgtttccgcccccgcccccgcccccgccctcccacccgctcagacctggttgccagcccaacaggaagcggcccctcccggcttcggagccgccggtaagtcgtccagcggagccggctgcgagccccgcggccgggtggggtgaggtggggtgcgcttccggggaaacgcagctgcggtcgctcgggaaccacgcctggcaggtcaggcaggtcttccctcagcccagccctgctcacgccgcgtccggactttgccgtccagtgtcggggacccccaccgctgccgcccgcggtccagctccctctccatcctttcagaccgctccacccctctcacagcctttgtcctggcgtttccaggctgggtcgctcctttctcccctttcgccgaggtcttcctccttccaccctccacccccaagaaagatctttgcccttccgtcatgagattccgtctgccctcgtccgggccacccgcagcgggaggctttcatctcctgtctcggcgcggcgggctgggaacggaggggcagctggatggtggaggggcctgagcctcagggacctgcccccactgctgccattcaccctccctaacgctgccgtggacacccgcctcctccataccctctgataccttctgggccccgcgtgagaaaccccctcgggcacccttcaggtggcgtgggagggggcgacaaagcgaggctttgtctccggagattcctgggagagcgcgcccgggcgcacagggggcggggcggggtaggggtcgatcagggaggggggaacctgggaggggcgcacccggctgcggtcgacccccagccctacccacggccccctggagtagggcacattcacagaggaagtgttttgaccacagtgcgtcagaaatagacccaggcctccgttccccagtcagtcgcaacatcctcccgccgtttgttgaggcastttggtggagggaagtggaacctacgcggacagaggctgtttctctgtcaggaggcaagcacgagtgctgaggaaaactttgcccttgccatgagacacttctcagacacagcgtggcactgaggccatcaaggggcgccggcacagggacgcttggagggagatggggcaggatgtatgctcagcagctggggttgtgggtatcagatctgtccctgtgttgcatgcaaaggcagctstgtcctctccacatctaagaaatccccgcacrccctgattccaaggcctaaggaaggcaggctaagaattcctaccccagggcttggagatccctggacagggaggctgaactggaggctcccctggtgtcccatgtgccctctgtgcccaagactaatgtttttcacttccaaatttggcaratttcacttggagtggactggatagcagctgtctctggagcagatgctgkcaggggaatgggctgggaggagcagagccaatcactggtgaatcccgagctccctggggacaccagcctgctctcttcgcctccccttcctttttatttcttctgttctccagcctcttccccttctttttccacctctccagccactcrtctctgcccagctgctgccctccccaggaggcctccatggcttcacctacctccaccaacccagcgcatrcccactttgagagcttcctgcaggcccagctgtgccaggacgtgctgagcagcttccaggagctgtgtggggccctggggctggaacccggtggggggctgccccagtaccacaagatcaaggaccagctcaactactggagcgccaagtcactgtggaccaagctggacaagcgagcaggccagcctgtctaccagcagggccgggcctgcaccagcaccaaggtggatacacggtgcctgggatggggtgtggagcatgcggggagtcagaggacggacaggatgccatgccctcactgccctgtgtgttcacagtgcctggtggtgggtgctggaccttgcgggctgcgggtcgctgtggagctggcgctgctgggggcccgagtggtgctggtggaaaagcgcaccaagttctctcgccasaacgtgctccacctctggcccttcaccatccacgacctgcgggcactcggtgctaagaagttctacgggcgcttctgcaccggcaccctggmccacatcagtgagcaccacgtggtggcctggaggggcgggtgagcttgggcctagaggcaggccagtggggaaatgctgggacagccaaatgtcgaagtggacaagatccgtatcagccaggtgaccttgaagattcaggtcccccatctataagtgggcttttgggctgagtgattgctaaggccttttccagtctgaccctgaccaggcacacactggtacatggggagcttgtgctgccctagggtccctgttccyaatgtcctctcccttccaggcatcaggcagctccagctgcttctgctgaaggtagcattgctgctgggggtggaaattcactggggtgtcactttcactggcctccagccccctcctaggaagggtaagtatttctatgctccctggaatctccccctcccccatcaagaacttggccagtgtctgaaaaaggatgggccaggagtgtccttttctgtttttgttttgagacagagtctcgttctgtcacccaggctggagtgcagtggcatgatctcggctcactgcaacctctgccacccagtttcaagtgattctcctgcctcagcctcctgaggagctgggattacaggcatgtgccaccatgcccagctaatttttgtatttttttaagtagagacggggtttcactgtgttggccaggctggtctcgaactactgacctcaagtgatccacccacctcggtctcccaaagtgctgggattacaggcgtgacccaccatgccagccaggagtctccttttctaatagtgtggccttgggcaagccactctgagcctcagattgagcatttgcaaaacaagaataacacttccttcctcacctgccttccatagctgctgtgaaggtgtaatctgatagrtaatatatcattgctttctaaaccagagagtcctttacacgttttgatgatttcactggtttgtcctgagagtataggggctcttacgacttctacacctttgtgcctctcataccccctgccctagggagtggctggcrtgcccagctccaacccaacccccctgcccagctggccaactatgaatttgacgtccttatctcggctgcaggaggtaaattcgtccctgaaggtgagtgatcacttccctcaaagaagccagcatctctggcacatcctgggcctttctagattgttataaccccctcctcctgccattgttcacctaccgccacctctaggcttcaaagttcgagaaatgcgaggcaaactggccattggcatcacagccaactttgtgaatggacgcacygtggaggagacacaggtgccggagatcagtggtgtagccaggatctacaaccagagcttcttccagagccttctcaaagccacaggtcagggaccctcttgctgaatttcccctccccctgcctgactgtggcctggctcctgcctctcccttccaaacttgtcctcactgcaaggaactccacacttttctgtttttttggtctcagcagcaaaggagaaggaacctgtcccctcagggattaagcaagcacagccctagttgatcacccagcatgaaaagtcctggaatctctcagagatgaacctgtgtatgggagttttgcttaagtggtacttcaagaaggtgcctctgtttactttggttttgcactgccatgcgaccaggtggtgcaggtctcccaaatgccacccccctccaagcttccctctttgctctaagtcctcaggcctcctgggcctgggacagatggttgtttgtgtcatcaggactcgtggggttctatgcgtggagcactcaccgcagcctaagctgggatcccagctcagaggtcaggccatgttgggatgtttagggaaggtgatgcattatcaggagacatatctactgtcccctgccctgtacccccaggcattgatctggagaacattgtgtactacaaggacgacacccactactttgtgatgacagccaagaagcagtgcctgctgcggctgggggtgctgcgccaggtgaggcccagtcctggccaggagaggctgggtggtgagccccgggaggcagaggstaggcttggacatagtcgacacctgggtgtggggaccccgtcctctcctgcctttgtcctggcattaacttcacctctaaaagttctcttggccaggcatggtggctcatgcctgtaatcccagcactttgggaagccgaggtgggtggatcacctgaggtcaggagttcaagaccagcctggccaacatggtgaaaccccgtctctactaaaagtacaaaaattagctgggcttgttggcgggcgcctgtaatcccagctactagggaggctgaggcaggagaatcatttgaacctgggaggcggaagttgcagtgagccaagattgtgccactgcactccagcctcggcaacaaagtgaaactctgtctcaaaaaaaaaaaaaaaaaaagttctcccctgggatttacaaggcagcaggaatcatattctgggctaaacaccttataccagccacagtagatgtgtgtcagctccatgagggcaggcatttctgtctctttgtctgttgcttgctgctaattgccagtacctggaacagtgccaaatacatagtaagcgctcggtatgtatttgctgaatgaatgaactagttgagtgcctaccatgtgctagatactgtgttgagagttaaatttgcatctcccatctaattctcatgagtaccctgataaattaggcatgttgtctctaagtgatggacaaactaaagctcttgagtttgtggcaagtatatgacagtaatgatatgggcagaacagagcctgggacacccagcagcagggtgaatgctgaagaaagggctttgagaattccaggctgctggaattctagtcccagctcagccttcaactgctgtgtagtctagggcagccccttccttctctgggccccaggatgtgcaccttctgcgcccaagggggtggcactggcccactgaccctgctctcagaggtctctgaggttctgctctgttgaccatacaggactggccagacaccaatcggctgctgggcagtgccaatgtggtgcccgaggctctgcagcgctttaccygggcagctgctgactttgccacccatggcaagctcgggaaactagagtttgcccaggatgcccatgggcagcctgatgtctctgcctttgacttcacgagcatgatgcgggcagagagttctgctcgtgtgcaagagaagcatggcgcccgcctgctgctgggactggtgggggactgcctggtggaggtgaggggttcaggaggcacaggggtttcatggttaggggagggagctgcctagtatggaggaggggataaaaaggtctgcctgcagaggggaggagctaagggctgcctggtgtggggatggccccttctgctgtgacctgggtggatatctgggcttgggatgcacctgttggattctccctgagctgcttcctattcctctgacactgcagcccttctggcccctgggcactggagtggcacggggcttcytggcagcctttgatgcagcctggatggtgaagcggtgggcagagggcgctgagtccctagaggtgttggctgagcggtaagacctgagttgaggaggatgtgggcagggcaggacatgtgacaaggttcaggaagaggggcaggggtgctgagtgaatagayggaggaataggcagaagaaaaggcctggcagttcctgagaggtgggtgctgacaggtgccctcccattcatgcccctgccccttaccstcaccccctcagtgagagcctgtaccagcttctgtcacagacatccccagaaaacatgcatcgcaatgtggcccagtatgggctggacccagccacccgctaccccaacctgaacctccgggcagtgacycccaatcaggtcagacccccgacacacccaccagccttcccaagccaacccccttcccccrggtcaggccctccctgcccagtcgctgccctttggggtcaatcctacccccggcaggcccttacccctggactcaggggctgtgtggccagcctgccttgagacctgagcrgggctgccttaggtacgagacctgtatgatgtgctagccaaggagcctgtgcagaggaacaacgacaagacagatacagggatgccagccaccggtgagcaggccttcctcccaaggggtgaccaaaatatgtactacccagcgaggcccaggtggtccctgcaaagcagctgcagcctcaggacaggagcagcgtgccggagcactcattgttggctggtgggttggttgggggcctgctggaggaacggaggggcagcaccgcacaggcagcagttggctgccagtctgaatgtaagcgcgttagtgtttgaaccaccgttacagccatagtggtgctggcaacctcccctgcccccagtttagtctgctgccctctatgtggccagttgcgatttcactttattcactcctctactttattccaaagagattttttttaaaagagaattgggatggagagctgctgatagtcagctttaggctggtgccctagtagaggtgggtccctgactcctcctcccctacagaacccccacatgcagcagctgggctccctatatgcctgggatgggcagagggggccttgggcacagcacagccttctttcccagggtcggcaggcacccaggaggagctgctacgctggtgccaggagcagacagctgggtacccgggagtccacgtctccgatttgtcttcctcctgggctgatgggctagctctgtgtgccctggtgtaccggctgcagcctggcctgctgtgagtccctggcagacccacctctctctcatgatctcagtgtaggagttagcatatccagttgaatcctagagacagtgtgcttccctgcatctgccgacagtcttgtgagactctaatgcattcagatagtggagagctttgtgaatggcacaggcccccaaagccaggagtagtgtcactgggttgggcactgggtagcagagactacacacctaccttcaagccttcttgtaccccagctgctgcttgctgtccctcccctcctgctgcccttcctcccctcagtggggctaggttcttgtctctagttggcttttctccctgacatcccacagggaaccctcagagctgcaggggctgggagctctggaagcaactgcttgggcactaaaggtggcagagaatgagctgggcatcacaccggtggtgtctgcacaggccgtggtagcagggagtgacccactgggcctcattgcctacctcagccacttccacagtgccttcaagagcatggcccacagcccaggtgacctgaaggaaaggcgggcaggataactgggatggggaggtgtgtgtgtgtgtgtgtgacagagggagaaggcggtgtgtgtgtgtgtgtgtgtgtgtgtgtgtgtgtgtgtgtgtgtcagaaagaggaagaaggcgccctctgagggccagcctgggagaggtgtccttctgggttggagagtgactgttctgagagkacagtattggcaccccccatccacactgatgccctggctctccccgcaggccctgtcagccaggcctccccagggacctccagtgctgtattattccttagtaaacttcagaggaccctgcagcgatcccgggccaaggtggagagtttaggcagggctggagctgagcagggaggagtgggcaggggggtacccrgtggagatcctggggtgatggtgaggacattcagaaagtggggaggactgggacctcaaaacatcacacttagagctgttaggacttattgcaggaaaatgcagaggatgctggtggcaagaagctgcgcttggaggtgaatgcaggcaggggcgggtcggtctcctaccccacattttatcccctttcctggtactgtcttccctatttctcatcccatgtcttgttccccaccccaggtcctgtaacccccccatccagcctccctgcctagtctcactccccttcccttcagccccttgtgttyatctgtacgcatcccctcccagctggccctgcccctctaccctccctgcctgagcacttacctccttagatggaggccgagaccccaagtactgaggtgccacctgacccagagcctggtgtacccctgacacccccatcccaacaccaggaggtgagagccaggctttgtgtgcaggcagaggccyggrgagggcagggcaggggcgtttcatgggagggaaagaactttggagctggccttggctccacctgaccctgtgtcctgggggtccacgcaggccggtgctggggacctgtgtgcactttgtggggaacacctctatgtcctggaacgcctctgtgtcaacggccatttcttccaccggagctgcttccgctgccatacctgtgaggccacactgtggccaggtggctaygagcagcacccaggagatggtgagtgggcctgggagacctccagagagactctgggcctggccctgcttgggggacacagagcttgaggtagagaggcacaggatggaaacaggctcaagatggcacttcgttctcctgagctcagggtcttctctgtcccctgcaaagctccagatgtgtggttctgaggaacaggaggctggcagaaattcacctgcaaatctgtcttgttttccccaccttccttcataaactgttgcgtgtctgggcactgggctgcccacaccaaatgcctcctcccctctctaccctttccaggacatttctactgcctccagcacctgccccagacagaccacaaarmggaaggcagcgatagaggccctgagagtccggtaaagactgaaggcgtgtatgtatattggggcatgggaagaggaagagggtctcgtcaaaccagcgctttgctgggggtaactgaatgtcgtcttctactagcatgtaagctctgtgaaggcagggatgcctgtctgcttacacttcttgttctctcaagtatctaaaacacagccagacactgtttgtaaatggttttaagtgaatgaatgccaaggctcacctttgctccgaaggggtggcctcaccccccgacctcactccacatggtggcttttccaggagctccccacaccaagtgagaatagcatgccaccaggcctctcaactcccacagcctcgcaggagggggccggtcctgttccagatcccagccagcccacccgtcggcagatccgcctctccagcccggagcgccagcggttgtcctcccttaaccttacccctgacccggaaatggagcctccacccaagcctccccgcagctgctccgccttggcccgccacgccctggagagcagctttgtgggctggggcctgccagtccagagccctcaaggtaacccatcctcacagatgtgctgacccagggtgggacagggtgggagcactggcttcctgcagaggaawtctggggaatacagagggaagttgtggggatcccaggccgtggcagcctctcctctgctccattcttctcagttcctcccatgccccaacacatacattcagtctttaccagacttgcagggcctccgtcaccaccatgctctttgttgcctgactggggcaggcgctggaggcagtagaacgtctcagttcttcttctcagctcttgyggccatggagaaggaggaaaaagagagtcccttctccagtgaagaggaagaagaagatgtgcctttggactcagatgtggaacaggtgagtgggccagcgtgcarccacaaaacgctctccagcccactacaggagaaacctgcactggtccactgcacccttctcttggaatgtcttctcacttggcctgtcatatctctggcctctaccttttctaccagagcttaccccacttcagcacgggttattttctgcctttccaaacaacactcctatccaccaggrggcccaggccctatccctgactggcctgaccctcctataggccctgcagacctttgccaagacctcaggcaccatgaataactacccaacatggcgtcggactctgctgcgccgtgcgaaggaggaggagatgaagaggttctgcaaggcccaggtgaagcccgggggttcccaaaattctgatggggtcaaagttctgagactgagatcagagttcctccagtgctctgttcttgagcaacctagagactcctggatattctgtcttgtacccctcagaccatccaacggcgactaaatgwgattgaggctgccttgagggagctagaggccgagggcgtgaagctggagctggccttgaggcgccagagcagtgagtgacaagctaggacacccctctgccttctagcactgtgttcagctccacgctccagcccgtaggagtcccagtggctatgccacacagctaacacatacctgtgacacccggctctcctgtctcccctaagcctgtaactcctgtggtgctggctggaagcctcctgatcaccctacccatcttccttcttctcaggttccccagaacagcaaaagaaactatgggtaggacagctgctacagctcgttgacaagaaaaacagcctggtggctgaggaggccgagctcatgatcacgtaaggggaaggggatggtgacagtggcycatgggccaggctccagccccttgggcaccttagacagctctgcttctacaatccctgacctccacagggtgcaggaattgaatctggaggagaaacagtggcagctggaccaggagctacgaggctacatgaaccgggaaggtaggtgaaatgtggggagaagcagacacatcccagggatgtgtcatgcaagcctcaygatctcagatactgaccaagcaacatgatgctctagtctgtgtacctctgasacaattcaggaggaagccagaggagggggstccaaagccccttctcacttcagttcaatcagagctgcacagttggcttttgtataagatctccttcaaaaaaaatcgtgctgctcagtagtgctagaaaaccactggtgttggcaaccctcctaatttggcagcttaggaaacaaagcccgggttatagaaatcacataggctgggattaggttgtggccctcctgcttccctgcccagttccctgttctctaagctttgtctcctccttttagaaaacctaaagacagctgctgatcggcaggctgaggaccaggtcctgaggaagctggtrgatttggtcaaccagagagatgccctcatccgcttccaggaggagcgcaggctcagcgagctggccttggggacaggggcccagggctagacgagggtgggccrtctgctttcgttcccacaaagaaagcacctcaccccagcacagtgccacccctgttcatctgggctgcctggcagagagccttgctgtttacaattaaaatgtttctgccacaaacagcgttcacaccgcctacaggtgggaggtgggggcgtgtatggggacaggagaagatgtgtaggagccttaaggtctgtagtgtgacagtcacactgacccctggctcccatcgcctctacaaggaaaaaggcagagccactaaagggccaagctttattgttctttagttctgtccccctcctgctgccccaggagtagggctggctgaggctctgggcccagatcctgggcctcccttgcccttcctagcacatgctggagctcagcctgggccctatataagccattgacctcctgtacgtggaagaggtagaatgcacctgcccacagcaccagccctacactgggggtccagagcagtatggcagcttccccggcccctcctccagccgccaggacacacagcagtgccaggagaagcagccccaggccaatcacatagctagcgaaggtggcccaccagcgagcctgagccatgcccagacccagctccgtccaggcctcctttagcacacacatcaacggcgacctctctgctggtcctacaacagagcagggcagtggggcaggagagagtcaagagtggaagggctgcttcaagcggggcaagggccaaggaaagggtgggggtgactcaccgtgggtagagctggggttctgctgtggggggctgtgcctcacaaacagagtagccatcagggcttcatgatcagagaggggggtgccactgtgagggtcaaagcctgtagtggtttcaaaactcttacaggagatgtaaaacccagaaactgcctaggaaaagtaagggccagagagaagcttatatatgagggcctcttcccagagaaccagctcccggctaccccactttccacccatcagtggtccaagactagactagctgagcaaaggatctacacaggttagtagacaaagagacacagcatatgaaagcatgttgaagggaggagcctgaccttgtaaagcacgtagtcaatgcggacaccaaagggaaatggcttcagctcctgctggctgacgtagcagttcttgggtaccattgtgttgccttcctcagagccctaagggaatcattggctcatgctaggatgtgggggagaaggagggagagaagctggggatataggtggggaagtaacaggcaagtcctcaccttgaagtcccgagtttcaagataggcatcatgaagccctgtccactccttcagcaggcagcagcccaggtcttctgggtgcatgttgaggtctccacacaacagaaccacgtctgccttcttggatgtgtggctgggggaaccaggttggtgaggcgggagttcttccatcaccagctcttccccatgactggggccttgttcaccctcagcccctgggtcccatcccacttcccatttcaagcccaggctcacacactggatgaactgggccaattcccaagcttgggccacacgatgtgctaggtagatgtccttctgtcgattgtattcggcatggagctgagcaagatagatgagatcacagcagataagactgagggtcccaggggtatgtctgaatcaagcctgtgtctgtcacttggcatggtgtttggtatacaatggataagccttgcccattgcttccttataagatcttgcccccacacctcatccccaggtatgagagctagagaagtaccatctctctgtcccaggactgggctgcatgtcccagccctaggcactgccagcttcactcacatgggtcacataggcgttgagcaccatgccacttagatggagcaccagcagccccacagccttcccactgaaccagtcaccatgatggatctgcaggcaggaggagatagaaactcagggcaccgccaccatctttctgcccatcccctgcagctctcagagggctgcctcctctaccttgtattactggaggtggggaagggaggtggaagaggtcaaaggtctgccttaccatgtaggggtagccattgagagtgtagatgtgctgggtaagctcctggattggatgtttggagaagacacagaggccactgccaatgattccgctgaaagccaagccctgcttaataaccagaaaaacagggagagacacccagccttcttcccctcccttgtcttccagctctgatcagctatttttttctttttctactgctgggactagccctagaaccaaggcgacagcctttggaggagtatagggcagccagaaaacaaagctgaaatgggctgaagtcataggaccttcttggttcacccttctccttctctcacatccagagggagaggaggctggaggagactggagagtgcaggcaggatagggaagggctggcagggccaagagcctcctgggatgacaacaggcttcaggccagtgggcttctcacctccggaagtggtgtgcagctgggtaggtaggtgacagcttctgtctcaggtactggaagtcctgctcactccacacctgagggaagcggtgaggatgcctgcttggtctttccccagtgggacggtctgtccctcctcccagcctgggttccgcaccgtgctgcacaatctcacctcctccagcaaagccaggtcgaagctctcctggttcagaaagtctcccaggcgcctcatgcggtcggcccggtgcttgctcaagtacggaatgcccctaaggaagggaagagcggggcaggggaggcgactgctgggaccaccggcgctggggccagatgtggactttggaggttcgggttttccctacaccctgagatcgtggggcgggatagggggaggaaggctgcatgggtgcgaacggaaggtggcccccagaccgcactccgcagacgcactcaccagcagttgaggttgaagatccgcagtcgcagggagaagttgggcttcatggttggggagctccaggggcgctaggcggctcgaactctccagcgacggccgcggtggggacgggggcggccggcggcgccttctccccagaccgttccttcttcgcaggcggcgcgcacaggtgggcaccaagcccgcgtggctcaggtcgggcccgactcccgcgttcccccggcaaccggccggctgttcccaatcaggcgggccgccaacccggaaaggcgatccgctgccgaaatccgggcgcccaggctcggtaagggccgcgcgctaggaccctgggggtccggagagcgcccccgggtgggcggctcccggttccttttcctccaagctcgtccccggcggtcgcggccgcccgcgcgccggcggcccagcaacaggcgcaaagttgaggaaaggcccagccgccacgggccgccctcgacccgcccctgggccccgcctcctgcgagcggcggaggcggggccgcgcggttgccggagcgacgcgcagtgtttggggtcaccgggcgtccccgggcgcggccatggcaaggccgcagccgtgcgggcccccgcacgctaggtgcggctcgccgtcgctgccggagcggccgctgcaggtgaaggtggtggggctcttcagctgccccaactttcagattgcgaagagcgccgctgaggtaaccacagagaaacctccgtcgtgggcggccctccccgctacccgctctcggccgcgtggactgcaggcgccgcgcctcctcgaggcggcgggggtcgaggccccaccggccgaggaaggggctggcgtgtcctggccgggcgggctccgtctggaggaccgggaggagagtataggggggcaagtgcgggtccgggggcgggcgttccacttggcgacttttaaagggagaactgagcgaaggaagggttcagaaccgcgctgggagataaggtaatcccctccgagacacacacacacacacccgcagattttgttctacgtcaattttttctttaattagagatatttaaatttatggaaaaatgattactatataactagctaatttttacaaccccgccacctcggcccaagcgatttttgttaactattcatgcggggagattcttttctttgaattttatagagccgtcactgcgttccaatcgaactagatgcttcacaagtgctttggaaaatcatttctttgtaaacactcagaacgatactaaaggaaaagcacttgaggaaactggaagaatttggccagatcagtcatgctgcagcacacttacaacctgaaatgcaggagaaatgtatgaaatgtcggcatgtagaattcagcccttcttacagggtttgctccagaaatgctgtccatggcaaacttctcgccgaagctcacttgactccaggaccatgccttaattaatgtttttaactcccgaagtacccagctggatacttgacaacaaaatgttcccaaatagaagatatcttggcgcggtgactcacgcctataatctcagcactttgggaggcagaggcggagttctagaccagcctggccaacatggtgaaaccccgtttctactaaaaatacaaaaaattagccgggcgtggtggcggtctctgtaatcccagctactcaggaggctgaggcacaagaatcgcttgaacccgggaggcggagtttgcagagagctgagatcgcgccattgccctccagcctgggcgacagagccagaccccgtctcaaaataaataaataataaaaagaaaacaagtgatcagaagtctgtgaaaataatacatgaatcatcaaaagtagaaattgtggtctgtgttgcttgggcagacgggatcagcaaccttttattaccaaagttaatggccatgaagttaattacaaagttaatgtattaatgagtttcagagattttttttctcttttttttcgctctttttctgaaggcacatattttctgtgccgactccacattgtaaagaaagtgttgacaagtttttttctgtaaagtccagatagtaaatatgttaggccttcttggcaatagggtctcagtcacacctgtttagctttttcctgtgttgcaaaagcagacacagagatggaaatgaatgacagtattccagtaaaaccatattatggacacgaaatttgacttgcgtataattttcacataacgtgaaatacaattcttttgattttttagaattgtttacaggccgagcgcggtggctcttgcctataatcccagcactttgggaggctgaggcgggcagatcacgaaatcgggagttcaagaccagcctggccaacatggtgaaaccccatctctactaaaaatacaaaaattatccaggcatggtggcgggcgcctgtaatcccagctactcgggaagctgaggctggagaatcgcttgaacccgggaggtggaggtttcggtgagctgagatcgtgccactgtgctccagcctgggcaacaagagtgagactctgtcttaaaaaaaaaaacaaaaaactgtttacaaatctaaaaattattcctctccaacccctgatgtagaagacagtaggtcgagaaaacaatatctttattgtattaataatgtcaattttccctttcttaaacttttacctactgtagttatattcaaatatgaaaattcagctagttttttttttctttttttggaagagatgggggtctcactgtgttgcctaggctggtcttgaactcctgggctcaagcaatcctcctcgacctcccgaagtgctgggattataggcatgggccacggtgatgcccagcctctagttctgtcttaataaaggatatctgaatgtattcctaacatgataatttgtgagcgatcccagatgcctgattaactgacaaagatttagatttgtgttgaatgttcccaacacaaagaaataataaatgtttgagatgatggatatgctaatgataagtatacattatatgtattgagacatcactaccccataaatatgtgcaattattatatgtcaattgaaaaataaaaaa

SEQ ID NO: 98011 - DNA, 137430 bp, Homo sapiens
gaagcatacacaagtatcaatagccatatctatcaagcagaagaaaggatatcagagattgaagatcaactcaatgaaataaagcaagaaaacaagattagagaaaaaagaatgaaaagaaacgaacaaagcctgcaagaagtaggggactatgtgaaaagaccaaatctacgtctgattggtgtatctgaaagtgacggggaaaatggaaccgagttggaaaatactcttcaggatattaaccaggagaacttccccaatctagcaaggcaggccaacattcaaattcaggaaatacagagagcaccacaaagatactcctcgaaaagagcaaccccaagacacataatcgtcagattcaccaaggttgaaatgaaggaaaaaatgttatgggcagccagagagaaaggtcggattacccacaaagggaagcccttcagactaacagcggatctctcggcagaaacgctacaagccagaagagagtggggccaatattcaacattcttaaagaaaagaattttcaacccagaatttcatatccagccacactgagcttcataggtgaaggagaaataaaatcctttacagacaagcaaatgctgagagattgtgtcaccaccaggcctcccttacaagaactcctgaaggaagcactaaacgtggaaaggaacaaccggtaccagccacagcaaaaacataccaaattgtaaagaccattgatgctacaaagaaactgcaacaacgggcaaaataaccagctatcatcataatgacaggatcaaattcacacataacaacattaaccttaaatgtaaacaggttaaatgtcccaattaaaagacacagactggcaaattggatatagagtcaagacccattggtatgctgtattcaggagacccatctgatgtggaaagacacacacaggctcaaaataaagggatagaggaatatttaccaagcaaacagaaagaaaaaaaaaaagcaggggttgcaatcctaccctctgataaaacagactttaaaccaatacagaacaaaagagacaaagaagggcattacctaatggtaaagggatcaatgcaacaagaagaactaactgtcctaaatatgtacgcatcaatacaggagcacccagattcataaagcaagttcttagagacctacaaagagacttagactcccacactataatagtcagagactttaacaccccactttcagtattagaaagatcaatgagacagaaatttaacaaggatatccaggacttgaacttagctctggaccaagtggacctaatagacatctacagaactctccaccccaaatcaacagaatatacattcttctcagcaccacattgcacttatgctaaaattgaccacatagttggaagtaaaacactcctcagcagatggaaaagaacagaaatcataacagtctctcagaccacagtgcaatcaaattagaactcaggactaagaaactcactcaaaaccgctcaactacatggaaactgaacaacctgctcctgaatgactactgggtaaataacaaaatgaaggcagaaataaagacattctttgaaaccaatgagaacaaagacacaatgtaccggaatctctgggacatatttaaagcagtgtgtagaggaaaatttatagcactgaatgcccacaagagaaagcaggaaagatctaaattcgacaccctaacatcacaactaaaagaactagagaaacaagagcaaacatattcaaaagctagcagaagacaagaaataactaacatcagagcagaactgaaagtgatagagacataaaaaaaccttcaaaagatcaatgaatccaggagctggttttttgaaaagatcaacaaaataaatagaccactagccagactaataaagaagaataaagagaagaatcaaatagacgcaataaaaaatgataaaggggatatcaccaccgatcctacagaaatacaaactaccatcacagaatactataaacacctatatgcaaataaactagaaaatctagaagaaatggataaattgctggacacatacaccttcccaagggtaaaccaggaagaagctaaatcccagaatagaccaataacaagttctgaaattgaggcagcaattaatagcatatcaaccaaaaaaagcccaggaccagacagattcacagtctaattctaccagaggtacaaaaaggagctggtaccattccttctgaaactattccaaacaaaagaaaaagagggaatcccctctaactcattttatgaggccagcatcatcctgataccaaaacctggcagagatacaacaaaaaaagaaaatttaaggccaatatccctgatgaacatcgatgcgaaaatcctcaataaaatactgacaagccgaatccagcagcacatcaaaaagcttatccaccatgatcaagttggcttcacctctgggatgcaaggctggttcaacatacgcaaatcaataaacgtaatccataacaaacagaaccaatgacaaaaaacacatgattatctcaatagatgcagaaaaggcctttgacaaaattcaacagccttcatgctaaaaaccctcaataaagtaggtattgatggagtatctcaaaataataagagctatttatgacaaacccacaggcaatatcatactgaatgggcaaaagctggaagcattccctttgaaaatcagcacaagacaaggatgtcctctctcaccactcctattcaacatagtattggaagttctggccagggcaatcaggcaagagaaagaaataaagggtattcagttaggaaaagatgaagtcaaattgtctctgtttgcagatggtatgactgtatatttagaaaaccacatcgtctcagcccaaaatcttcttaagctgatgagcaatttcagcaaagtctcaagatacaaaatcaatgtgcaaaaatcacaagcattcttataaactaatagcagacaaacagagagccaaatcgtgagtgaactcccattcgcaattgctacaaagagaataaaatacctaggaatacaacttacaagggatgtgaaggacctcttcaaggagaactacaaaccactgctcaaggaagtaagagaggacacaaattaaaaaaacattccatgctcatggataggaagaatcaatatcgtcaaaatggccatactgcccaaagtattttatagattcaatgctatccccatcaagctaccactgactttcttcacagaattggagaaaactactttaaatttcatacggaaccaaaaaagagcccacatagccaagagaatcctaagcaaaaagaacaaagctggaggcatcatgctacctgacttcaaactatactacaaggctacagtaaaaaaaacagcatggtactggtaccaaaacagagatatagaccaatggaacagaacagaggcctcagaaataacaccacacatctacaacaatctgatccttgacaaacctgacaaaaacaagaaatggggaaaggattccctatttaataaatggtgttgggaaaactggctagccatatgcagaaagctgaaactggatcccttccttacactttatacaaaaattaactgaaggtagataaaagactcaaatgtaagacctaaaaccataaaaaccctagaagaaaacctaggcaataataccattcaggacattggcatgggcaaagacttcatgactaagacatcaaaagcaatggcaacaaaagccaaaattgacaagtgggatctagttaaactaaagagcttctgcacagcaaaagaaactatcatcagagtgaacaggcaacctacagaatacgagaaaatttttgcagtctatccatctgacaaagggctaatatccagaatcaacaaagaacttaaacaaatttataagaaaaaacaaacaaccccatcaaaaagtgggcaaaggatatgaacagacacttctcaaaagaagacatttatgcagccaacaaacatgaaaaaaagctcatcatcactggtcattagagaaatgcaaatcaaaaccacaatgagataccatgtcacgccagttagaatggcaatcattaaaagtcaggaaacaacagatactggagaggatgtggagaaataggaatgcttttacactgttggtgggagtgtaaattagttcaaccattgggaagacagtgtggcaattcctcaaggatctagaactagaaataccatttgacccagcaatcccattactgggtatatacccaaaggattataaatcattctactataaagacacatgcacatgtatgtttattgcagcactgttcacaatagcaaagacttggaatcaacccaaatgcccatcaatgatagactggataaagaaaatttggcacatatataccatggaatactatgaagccataaatcaggatgagttcatgtcctttgcagggacatggatgaatttggaaaccatcattctcaacaaactaacacaggaacagaaaaccaaacaccacatgttctcattcataagtgggagctgaacaataagaacacatggacacacagaggggaacatcacacactggggtccatcagggggttgggggctaggggagggacagcattagaagaaatacctaatgtagatgatgggttatgggtgcaacaaaccactacggcacatgtatacccatgtaacaaacctccacattctgcatatgtaccccagaacttaaagtataataattaagaaaaaaaaaaagagagagagaaagattctcgtgcctcagcctcgcgagtagctgagattacaggcatgtgcaaccatgccagactaatttttgtatttttagtagagatggggtttcaccatgttggccaaactggtctcgaactcacgacctcaggtgatatgcccgcctcggcctcccagagtgttgggattacaggtgtgagccaccatgcccagctggtttattctaataggcttcaagaaccccattcagtctgggatgcctgctctcatcccatgagtcttggtgttttgtagggtgagaaatgagctgtttataaaagcttttctccaagcagagtagtaaatttgctttttgttgttgagatgaggtctcactttgttgcccaggctggtcttgaaatcctagcctcatgggatcctccccactccgccttctaaagtactgaattacaggtgtgagccagcaaatttatttttatttccaactcatcttcatttggctagtataggataataatagtaatctcaatcttttgctctttaatcatttattcaaaggccaaactcatcctacaaaggatggcaagctaagaaagtgcttgccatcataatgttcttgaacacccactccacatgatacactggactgggccatttgcccatttaatggtttgttccaaactacactacagtaaaattgatatgattcccattttgcagttgcagctcaagaaattaagttacttgctccaggcccacaaagctagcaggggagagcatggattcagattcaggtataccattcacctaagcctgcattctttctaatacattacctcacctgtcaaacacagagagttacaattagaaggactgtcttagtccagtcattttatttcaaatgaaaatatactctcattttatctattttacttatttaataaagaacagatggcccaaagcagttttctttaagtttttctgcttactccttctcttaatataaagaccaaaaaaatactggtacctaatgagagcatttattatttgacatagtaagaattagtacagatcctatgttgtaacgtgttccactcatgttgcctacccttctttctatataatctaacagccttcattgcacagttcatttaacttatgaacacttcaattccaaaattgttaaatcaagattttaagactagaactaaattgtttaatagagaatagaagaaaaagtcatttacttgaaaatgcacatattttcatcttacatttctctcaacaggaaatataatgtgtatattcatttttccataatacctaacaagaagaaatgcttaattttaaaaaatacttcagctactcactaaaaccagttcttgaaaaactttccacatttgttaatgctgaaaaaaatgttcacgtttgttaccagttcttaagaatgagggagacgtgagttctcgtttctactgttaatctgcatcatgttagaaagagggaatgggcaggggttccaggaaggtgtgatgtctctgaattcggtttagaagctgctgtgccacaggtttgaattctgtttcccaatggagtttgtgatagttttttaggtctggatcaaaactgccatccagtgctagttcttcatctgtattagaaaaatttaaattacagcattatttagaaatgtaatcctattgaatatagtttaattttgatgatatgagttaaactcaccctgggtcgtcctttaataccaacgtaacacaagacaggatttcagagaagttctttactctcttctgttctttatgaatacatcattttattttattttatttggagaggcagggtctccatgtattacccagrctggtctccaactmctgacctcaagcaatcctcccaccttggcctccccaagtgccaaagtgctgggattgcaggtgtgcgctacctcgccaagcccattagtttacaattagtctattttggtatcttaatttaaatgggcaatatttttttcaaaaaaagtctggccagktgtggtggctcatacctgtaatgccaacacattgggagcctgaggtaggagaattgcttgagccccagagttcaagattagcttgggcaacacagtgacagctcagaaaaaaaaaaaaaaatcagaagattatctgggcatgggggcatgtgcctgtggtcccagttactcgagaggctgaggtcaggagratcacttgagcacgggacattgaggctgcagtggggcacgatcatgccaccgccatccagcctaagagacacagmgagaccctgtctcaaaaaataaaaaatccaaaattgaactgaacccttatttcaactaattccttagttttttatatgtaagtttgtatctaaaagtcagatcacaatttctcagaataaacaacgtattaatatgttacttccttatgtgtacatagaaaaattaattacttcaaaggttaggtataaaaggaatcaggaaatcttttaggaaaatagctcagttaaatttgacactttaaactttactgaaaatcagaactttgctggcttcaaagcagcagggaagtagtactttggaaagacaactttccacccccaaactctctccataactgaaaactgagagaccttgggaatcccaaggagtattagaatcccaagtgagcccatggataatgcagaaaagaacttgtaagaataaaatgcaaaagtacaacttcaattcttaatccaaggaattctgggaacaccataaatatattcaatccaggtaggaagataaatgaccataaatatattcaatccaagtaggaagataaatgaccactgaggtttctgtgctgattgccacagcaattttacatgttgatgttgagcctcacactctgtgtgacagacttcagaaaagtgcactgacctgccaatcagattagctctgccacttcctacatttgtgacatgaggccaacttctaaaatggtaaccactaaatcctaaaacaaccacagatgttgttacttaaattgccaacacttttttttttttttttttgagatggactctcgctgtgtcacccaggctggagtgcagtggcgcagtctcggctcactgcaacctctgcctcccgggttcaagcaattcctctgcctcagcctcctgagcagctgggattacaggcatgtgccaccacacccagctaattttttctttttagtagagacagagttttaccatgttggcccggctggtctccaactcctgacctcaagtgatccgcctgccttggcctcccaaagtgctaggttacaggcgtgagccactgcacccagctgccgatactttttttttaagggccaatgaaaatcctattacaaaatgcttcatgactctgttgatatcagattttctacactgaatatttgtgtacattcactgtgtrctttggcactatgggtgttagtgtcaccacccaaaataagataagggagtctggaatcccagtttgtaccttcctctcatcacaaccaagtggtcaactatgcagttctgagataagctccaggcagacacaaacacttcggcaaggagctccatggagaccctgtaagcaaacctggatctccccacccatgagataactgggccctgaggggaggagaatgcaggtgatatgtggtgcgttcagagctcttcctgtttggctacttccagacaaaaagagtcaggtagtctcagtgattcagatttcattccgttttttcgagacagagtctactctggagtgcaatggtgtgatctcggctcactgcaaccttcatgtcccagattcaagtgatccttgtgcctcagcctcccaagtagctgggactacaggcatgtgccaccagaccaggctaattttttgtgtttttagtagagatggggttttgccatgttgcccaggctggtctcgaactcctgacctcaggtgatccacccaccttggcctcccaaagtgctgggattacaggtgtgagccacagcgcccagccagtgatttcacatttctaggccatcttcctgctcactgttttccagattttctgaacattaaattttgttgaaaagtgaattctgctgtataaaaataaaattctgttgtatagaaaatgaattctgttgtatagaaaataaattctgggtacggtggctcacgcctataatcccatcactttgggaggctgaggcaggtggatcacctgaggtcaggagttcaagatcaacctggccaacatgatgaaaccccatctctactaaaaatacaaaaaattagccaggcatgtggcgggctcctgtagtcccagctacttgggaggctgaggcaggagaatcacttgaacccaggaggcagagagtgcagtgagccatgatcgtgccattgcactccagcctgggcgacagtgagagactctgtctcaaaaaaaaaaaaaaaaaaaaagaaaagagaagaaaaagaaaagaaagaaagaaaatgcattctgttgcagaagcccttctttcccaagctgctggcggctgagcagtgtggcctgggcatgtcatagtcccttctttctcctagggctttggttagatttagtggttttagcaaaatctctgttgggtgagtggctttttaaaatctaatgtcaagaccatgttacttgtcttgaggcccagcctatagttaatccaccctcaaaccatattaattctaaattgggttagacaagataacaagaatagccaaacagctacaggtaagagaaatgaggtctaaagtttcaaagtaaacacagcaacatacattaaaagtgccatatcacatggggtattaaattttggaacttgtactgcaaagagtagcagaggctgattgagtaaaaatttagatctatgattcaatttttttttttaagagacagagtctcattctgtcacccaggctggaatgcagtggtgcaatcatagctcactgtagccttgaattcctgggctcaagtgattctcccacctcagtttcctgagtggctaagactacaaaacacacacacccagctaattttttcacttttagtagagatgggtctcactacgttgcccaagctggtctcaaactcctagcctcaagtgattctcccacctcgtcctcccaaagtgctgggattacaggcatgagccattgcactcagcctttgattaattctttttaagatttgaatcatcataagttagaaactgtgcttcacagtattttgcatcatgactctgtatacatatacctacttatatatgaataaacaaatgtttcacattataatacttgtctttactaaatataatacattctgatattttctttctttgctacttcattttttaaagatgctggtcacaaccaactaaattgttttcctgacctgcagtgtgaaaagtgcttatttaggtaaccaatcattcttaagctttctttaggcacagcatgcttccaaatactaaaatttggggcaaagtattagaaagaattaaaagaccctaaaatataaatatgtatcaatggtcattacaacacaatcatcattagaagtttgtgtcctgcagcatctataaaagcttcctttactcactacactatttcctagctagctgttcagcagcagatggctgtttaagggatttatcatcgccctgaccattctcttataaggcaaagttgtcgaatgttctagaagcacctgaaagctcttcaacataggttgatgtgatcctccaacttgaacgtggggccccgctctacccttgtcacaaaacctaagtgcccactgccacaaaacttaggatgaacatacaacagcctagtgtacttcccatttgcaacaataaactacacacatggtcatcaggtgccagctccccacagaggggctcatggtagtctggagtgctcagcacaccactaagaacttcagcatcaacacgctgcttatgagctcataagacatgactgcagtataatgggaagtttcagaccacgttcttttaaagccactttccagaaagactgtcaacattccaacgatgttgagggtatattacttctcctttttttctagtcactcagcaagaaaaagttaggtaacttacattactatagaaattgccataccagtatttgcaaaaacagtgttcatacttcaacacaggccttggtaattcaacagctcatcctgtttccaaaatggcctgtttttktttgtttgtttgttttagctatctttgtaaaagaattgaaatgcaagtatactctcacccacatgcccatttcactcgcagcagtcccactgcccagacccagccacgacccggtcagaagtcagggtctgagtgctcattgccaagagaaaagccaggaggcagcacagcccaccacccagcccacaaggcacagtccccatggttcgtgaagaggagctcacgtgagaaacctgggatgcattgcagtggcttggcttcctgagtgagctgtgtttatttgctgttatccatgccacagtccccctgcacrrggtgcagtggagtaagggtgttctaggtaacggagcggctggaaaacacarggctagttgtttgttttcggatgggaattcctgcctttgctacagtatgacttcaggcaagccacttaactgtcctaaaacctactttccgtatctgtcacctagctgatggcctcagatctttcaaaaatagaataaacatgcttttaaaaggatatagcactattgaaacaaaggtaccaccattgttagccaatccacatgcagctatcaagtaccttctttgtatgaggcaatatccttttcctaaggtggttcagttgcaaaggggaaataagataaaactcacaaaataataatacaggataattacaggacaagttacacaattcatgactgattgctatataagaagtatagatttcctatgactagcctacgactgtgggcttgagaagctacgtgggaagggcctgcacctggctaggcagattgggatgggcaggcaggaaatgaaacagaacatgtgcaaaggcacagaggcgggagaagcacaatcagaagcccagttaggctatggaaaagttgggaatggagcgcagtcagcccttcgcatccacgggccacgtatccacaggttcaaccaaccacagacagaatatttgaaacaacaacaataaaaagaatacaaataaaaatcacagcaygacaaccatttacatagcgttcacactgtaggtattataagtagtctagagatggtttaacgtgtgcaggaagatgtgtgtaggtgaaatgccaattctatgtcattttatatcaggcacttgkgcatctgtgttggtatctgaggcaggccctgaaaccaatccccccarataccaaggggtgactgtaacaggcagcagggcccactaaaatgaagtgccttccaggtacactgcccctgctgagaagccagccatgcccacacctccttctgatccatctttatgccacacggccccggccccgcagccccaccatccttgttatttatggctgattgccccaggcttgggtaacaaaggaaaccacagatagcctgtcacccggtagctgctgcctatgcgggaaagccctgggccataggacagtgactcactgagccaatcatatcttctcctggagtgggtgacataggaaagtgccctggcaacagacagacacagggagggcagcaagtggaagcctggaggtagctgaagccatgatctagaaggagcctagagagagtaagtggggagagaattctttccctaacagcagacacaacacagctgggtctccagaatggcagagcccagggggcggagctcatgacgcccacggctgaggggtcacttgggactctggctcctgcctgcctctctgggaggctttgagcagtatcttgtttcctggcttctttcttctctgtacactcttcccttaagctcctttgctaacgagagcaggggctctcaatcttagctaatagactcacctgtggaactttgaacacagattctcagcctcatcccagagcttctgaatcagaattcctagggctggggccaggaaggtgtttttagtttttttgggttttaactccacagctgatttcaatgctctaccaccatcgagaactgaattaaggcaacctgaacatgcacttctgctccctgcaacctgagtcagtttaatgctcatggagccgactgtgaacctcaatgattaaaaaaaaatgctcacttttttttccttattgtgttttaaaacacatgtacaaaattatatttacctggaaaaaccaaatttcacatcaacctagcaaacccaattatttcaaacaactcctgagttccagtttctgtttagtagcacggtgttacaacacttaaagagtttccagagcacgtcagccaccttctgaggacttgctatgcagcaggcactgtgttaggctctttgtacacatctgctcatttatcaccctgcaatctggacattaattatcctcatcttggagatgataaaatatcatttcggaacggctgataatctgtgtttttaaaagttccacgggtgagtctgctctgcagccaggattgggagcctcygctctggttagtgaaggagtgtaaaggaaaggtgtctgttaagctttctcaggttgcagagaagttgagctcaaaatttaaaaactcagcacctatggcttccaagtgaccttgagcctttccacatggcctcctggatctagtatggtggctgggcagtgatgggtacatctcctctatttgggaaaaaggattattaaaaacactcacttactgacccaaatcattgtttttagaattaacccaggawgaaaaaaattatcctaaaattataaaaattttttaaatgtaaaaaatgatcctggccaggcaaggtggttcacaccagtaatcccagcactttgggaggctgaggtgggaggatcgcttgagcccaggaggttgacaccagcctgggtaacatagcaagacctcatcgctacaaaaaaaaaawtttttttttaattatctgggcatggtggtgcgtgtctgtagtcccagctacttgagagacagaggcaggaggatcacttgagcccaggagtttagagctgcagtgagcagtgatcgcaccactgtattccatcctggatgacagagcaagaccctgtcccaagaaaagaaagaaacaatcttctttcctttgatttgtatcagtgatttcctacctttcaaggatataaactccattgtaatgccaaatagtctcacaggccctcacccacatgataattaacgtagctaattaaaatgtatagcttcatttaaaagcatgacttgagtagattttagccgtattttctcaattacaatagtgtctatttgcttttgaacaacagaagtacatttacgctgaggtcttatatttatgcactctagagaaaatgcaaaaaaaaaaaaaaaaaagccatagaagaaatcatgaatgtatctaatgagttgaaagtccttctgtccccaytgtaaatagcattcagccttttcagttccaaattatagtaatctttaacatactcttgttgcttatagaaatatagtcacctaaatgcatactaatatttatccgaacaggtcacagaaaaaaactatctcacactctgataaaactcacagactcatcatagtcaagagtcttacctaaaaatgatgagagcaagagtaagagtgtgttggtgtcttcatttccaaaacatgacgaagcattagtgatgttttcactgaagttccataaagttttacaaaccaagcaggccagctgccaatcagtaggacccaaatctcttaaacagtccactaacctgagttaataaaattcaaattgagaagttattaggtcagaatctgtctttaattttaatattgttagcataatgattatccttctgtgatatgtaagtataatccagtgatcacttaaaataattccttatctataaatttaagtggttataaagtagcaataatctacttctacacctttttttttttgagacagagtctcactctgttgcccaggctgaagtgcagtcgcgcgatctcggctcaccgcaacctccactcactgcaacctctgtatcccggattcaagcgattctcctgcctcagcctcctgaatagctgggattacaggcgtgtgccacaacgcctggctaatttttgtctttttagtagagacagggtttcaccatgttggccaggctgctctcgaactcctggcctcaagtgatctgcccacctcggcctcccaaaatgctgggattacaggtgcgagccaccacacctggcctacttctgcactattttaagtatccagtggaatctaaaccccctctttagcctcagcttaggggcttcccaatgttgaaatacctttgccccacaggaatgatgaaagggccaaagctcccaagaaaatgatgtccttcaaatcctgagagagtcagtactctacgccctgaaacttactttttaatgccacctccttctttcaagatgacacgcttgtctttatccacagtgagattgaggagaacaccacaggcagaaaagcagatatcctgatgctgagcatccagcagcgccatcatgaacctgtggactacgagggaagagagcaaatgcagaccagtaaaagttcaggrttcccagctgtctcttgttttacagatggtatggggaaacggggagtggcttgcaaacccagaacccctgttaagggacttaactcattcttcctaaggctttatccatcacacagcagtgggttccccaatacccaccactcccagagtyggctcccccaatcgacagatactgcaaaacctgacccaggcagcagctgcttctccacggcagtgaaagagtcccagctggtggaaaggagggagcacaggtgacactcatctaacttccagttattctcaagggtgttcctaaacctccagcagcaactgtctgtctttaaatacacagtcctggagaggggagttggctcctggtgggatcattcctgaagtctcccagggccatgtgtaagactcagactgctaaaaaccaacctggggcaaggcaggccttccagtgtagggacatctcaaggcaggacaggctcctgcctcaggagaatcattttcccttactcctaggaaatggaactgggaactgtttgtcctgttttctcatccctcagcagacgctgagcaaagggttggggaagagtgagtaaagtgtgcattctgcctcctcccacagtacgtgcacctgagaggggctgccctgttctagccccggccctgttaactgggttgggcagtaagcttgacagaggcaacatcacgtacatatgtgctcttaagaggctaaatagtgcccagcaaaatgtgcagttatctgcaggtagtgagaggatggggcatggtttgctgctgctgctttttgtatctgtattattgaaattttccattacgaacatggagagttatgtttttaaaattattgttacatgaaatatttgagacatacaaagagtcaaagtatactaatatttgagacatacaaaaatatttgagacatacaaagggtataaacatgtgggtacttgccactcagtttaagaaataaaacattacattccaaacaatatgttgtacataataaatataaacaattcttatttgataataaataacattataggtccaattataatctttggacatccctttctttccaaaggtgaatgctgtccttttttaatttttaaattttttttattttttagagatagagtgtcgctctgtctcccagcctagagggcagtggcacaatcatggctcactgtagcctcaaacttctgggctcaagtgatcctcctgcctcagcctcccaagtagctgggacttgtgccaccaccacgtctggctaattttaaatttttgtagagacaggttctcactatgttacccaggttgatctcaaactcgtgccctcaagcaatcctcccaccttagcctcccaaagtgctggtattacaggcttgaaccactgtacccagcctgaactctgtcttaaattggagtttactatttccaattactatttatactgtatagcatcactacgtgaatacctgtgcagaagcaataccaatgcagaagcaaaaggtagttttgtatgttttaaaacttatattcaaggcattcctctgcatatatcctcctattgcttttaaatgctagagaacattttattgcatgaatataccataatgaatttgtcctcttctctgttgaggaacatttaggttgtttctactttttgctattataagcaaaatgtaatagacattctagtacataaaagagaatgtcttcttaagaatatgcccccagacagaagtgattactcaagattcactgtttccattagacatacacacaccccatcttggagcacagaaggccattcacaaggcagaggggaacactgcctaggtccatcttggcatcctgagccaggagccttaaacaygaagctttacaaatctcaaaayggaaacaagtataacactgtaatgactcaagctgcaaaaccactcagctgattattggcaaaaagtgaatgtttatgaattctagtgttattaactcaccattgttctgcacaatgaaatcgcagacatcatggtcctgggagagatttccgaaaacacgcacagcctccaggattccatccatgttgttactgacaagaagctttaagagcactggatttggcgaccagagaaattaaatcagtgaatttaagttttaacttaaaggttaatggaaatcaacatcatacttaatactgatgattttcaaatgataataaattacaaactgtaagggactttagcaagaactaagaaactaatttttcccatttctagtttccccatattctaatttcttagaatcatcaggctctaagacatttctgtaccagaaggcagaagatagtaatgtctcctgctctgtgtttagttaataaaatcgaaacttcaaatgagcactcatttatccaaatccaactctgaaccttacattcagcaatatatagctttttgtcttgaattatggaattcttcacttggtagtaagataaattgttgattgtcgctgtagcattgatcaccagctcctcacaatcatcaagtgacttgtattctgaaatgaagtaaggataagggagtcaaagacccactgcaggagtagaaccaactacgttgcaactacagcaacagcagggccaggagccggctgcgatcacgcagggtccctacaaaggccctggagaggcacctttaccacttgatttcccccgactcctcctgcacggaaatgccccaaatgcaagggcctgctcctggccagagcagagaggacactgtcaactcaatcctcgcagccaggaggtctggaaaagtccagctgatctgggacctgtgtctgaagtaaagcaaaggggccaacacggcagtgagcggagccatctccaatcccgcctgttttctgggtcttcaggctctcccaggggctcctccttggagtctgtgccctccttcccacaccgcctcccaacagaacggccccggggtcacgatccgtctgtgactacgaactctagaagacacctctggcctcctctacctccccactagttcatctctcagcacttgctggcttctcttcttccacttttgcctccctaaatctattctcaacacagttatcctttaaaagcaagtcagatactgccacccacctcataacccacgaatagactgcgtcgtctggttcacaagacctacctggcagctccaggccttatctctctggcctcatttgctcctcctactcccagacccccaaggccaaccacaccagcctcctggcctcttggaatatgccagcatgcccctgcctgagaacccgtgcactgctgaactttcttctggaacatactgtcctcccagttagtcacttggctcactccttacgtcctcctagcagttgcttacatgccgccttgttggacatactttccgtaacctccctatttaaaatagcacctattctcttttttctcaccctgctttaattttctccatagcacatatgaccacctgatgttatatatgtgtttaatgtttgtctttcagccctaaaatgtcagcttcctgaggcctagggatgtgtctgttttcttcatggctgcattcccagcttctagaacagtgcctggcacatagtgagtgctggatgcaagaataattgatcctctagcttagcacataaggcccttagtggtttttgtccctgcctcccactcagtctccagactcatctcttgacatttctggccacagtgtgaggatgagaagaggcagggctgcagctgggagtggtcccagtgacctcagcatagcgtggacacgggtgatggcggagatgtggcggagtggagactgtgcttggcagagactggatgggggtgtgagggagaggaatcacccggggtgtcccccsccggtgcacataattgggtagatgttgaccacattgtctgaaataagggcacaggaagagggccaagttcagggacaggtcatgaattcagcttaagatatgctgaggtgcttctgaagcacccccaggagaggaggggtagacagttggatctaagagttgggcaatcagaccggcctgggcaacacggtgaaaccctgtctttacaaaaaatacaaaaaattagccgggtgtggtgtcaggtgcttgtaatcccagcactttgggaagccaaggcgggctgatcacttgaggtcaggagtatgagaccagcctggacaacatggtgaaaccccgtctccactaaaaatacaaaaattagccagacttgatggcacaagcctgtaatctcagctacttgggaggctgaggcagaagaattgcttgaacccgggaggcagaggttgcagtgagccaagattgcaccactgcactccagtccgggtgacagagggagaccccatctcaaaaataaaaataaaaataaataaataaataaataaaaaagagctgggcaatcagagaaagaatcacgagcccggcaacactgagccagtgactgcagcttgaacaggccaccrcctcccctccctcctgcacaagtccacccactgttgggagagcccccagtccttctccacctggtctcacctgctccagaggcccagtcccagcctgcgagggaggccactcagcacctgcacacaacttggctcatgacttgcccacttcccattactgaataggaagtgccttttctttcctgtatgaaaccgaagtttttctttggggagcaagcaggggggctatgagctgaggaagaggactgtgcttgttcttgaattctccaacttaagtatcgccccctttggccatcttttcctgttcattaaagagaacagcctttttataaattactatgttgaaaggaaagctcagtcatttgtaggctgcagaagacatacactgttccttccgccagtggcccctcccgctagagcagcaagcataggcccagtacmtggtagacacttaatggatacttggaaaaagaaagaataaataaagacctgacttcctcttttttagtttaagtatataaaaagggaataaggaactgaattattttggttatcaatatggattctactgtaaggaaatattctagttatggtaaaagaagggacacaggacctccaaattattccctcttgctttggccaggactctggagccagaaccctgtgcttccactcactggccgtgtgaccttactcaaattatttaacctccttgggcctcagtttccttgatggtaaagtaagcatgatcattgcacctacattatagagttgttacaaagtttaaatgcattcaagggcttaaatgagtgcatggcacatagtgggtgctaagtaagtgcttattacatgaacagatgggccatccagaatgacggctcatggggagcagctcaggtgaatgtctaactcttgggcaaagggcctacagccctagtttcctccagccccagactgatgacactaggtcttgggcagtgtttggggatctgttttatttctcttgccttggtaggagaattcgttagcttgtccagaaaatgcagggtagctcttattgtctgacctcccgaaggaccacacatttgggcggcaggaatggtgtctggtatctggaactagagggtaggtactcacagctcctaagcatttatcataaacagcactaggcactttaccatgcatgtaaccctcaaaagtcagctaataagttttacatgcacttacaagaattcacacccacaataattcattctcgaaaggtgcatctgtctcagtcaccttggcctgtcataataaaataccataaactgggtggcttgaaccaacaggaatttattttctcacagttacggaggctggaagtccaagatcagggaggctgcatggtcaggctctggtgtctcttcttgtaagggccctaactccagcatgaggtccccacatcatggccttatctaaacctaattatctcccaaaggccccatctccaaataccatcacatgggggttaggacttcatagatgaatttaggggtcagatgagaacactgaggtttagagaagttcaatacctcacctcacttcacagagcacacatctaaatccaggtgtacttgacccctactatcctactctttccacagaacgctgcggaagccaaggactcagggttgctgagttcccattggagctagttggggcaatagactgcttccaaaaaaccatgacaaccatcctaccctctataattcactcacggatatgagacaatctggaatttggacttgccactaagtcagcaaatctctgagtctggtggcatactgagagggtcagttcttactagaaacattattgatttttaaaagaccctctgcaatgaggctgacctctctaggcaagtcctggggtacaagtaactccttgtgaagggtgcagggctagagggaggtaggaagaaaagagcctaagggatgcccttcccacatgactagggaagggggccatgccacaggagccatcaggctgggaggagtgctcagctctgagggtaaacaggacagcagcaactctgagttcagtgggcacaaccaaaccacgggcaggccctttctatagtcacagtcacagcccagcactggccctgcgttgctctaagctgccaggcctgtcagagggggcaggaggcctttcctggaatgtggtcaccactccacaccgacacagacaaaacaggtaggaaatccacagagaccagtgtagaaagggcttagcagggcttagaaactcacccaggagtcgagctgtgtaaggggaaggtggaggggggtgaccccctgtcaggggtgacttttgcccttctatcaacttttatttggagataaagtctttcaggagagaatagagaagggatcacctgcttgcccaaacaactgcctaaggcatagtaggcaagaggcctgacccatcacaggagagcagggtttcttcacttctgctcaacctcatatggtaccaggctctaatacagagactaaaacatttctcacagggaggcccttgaccacctgtatcaggagcagccagggagctttagagagagagtctcactctgtcgcccatgctggagtgcaacagtacgatcttggctcactgcaacctccacctcctgggttcaagagatcctcctgcctcagcctcctgagtagctaggactacaggcacgtgccaccatgcctggctaatgtttgtatttttagtagagatggggttttgccatgttggccaggctggtcttgaactcctgacctcaagtgatctgcccacctcagcctcccaaagtgctgggatgacaggtgtgagccactgcgcccggactttttcttggagacagggtctcactctgttgcccaggccagagtgcagtggtgtaagcatggctcactgcagccttgacttcctgggctcaggtaattctcccacctcagcctcctgagtagctgagatcacaggcgtgtcccaccacactcagctaatttttttttttttttttaatagagacagggttttgccatgttgcccagtctggtccggaatccctggcctcaagcaatctgcctgccttggcttcccaaagtgctgggattataggcgcgaaccaccgtgcccagcctcttgcctctttctcctaccccaaagcatcactttcttttgagtcaaaagcaagttattcactcttcctttataggtagaaatgtaatttctaagctcataaaatatttataagatgaggagttttttcactttatatgtgaatattaacaactgtgggaaaatgaatcatgcataactctactccttggctgttcacagccatgtgcccccagtccaggtgtttgaggtctggtcctcaggcccttcctgggcagccacagtcaggtaaagggattaattctgcaacagatgagaattcgcccagtcggtttcaggcttctgctagatcctgaggagccagaaaagctaacatggttccctgaagcactgggtctcaacacttaatgggcaaaaggctcacctgggggcaaaggaggcattaaaaggcagatttcaagactctaatggcatkttacagaggcagtttctgggcaggggccagaaaccaaaaagggtattttaaagagtcccacagctgattctgcagcagtcccatccctggtcctgggctgagaagccctgctcrgtgtggtgagtggatctcaggaaggggaaagagcttcagcagacatgggcatgctacagagcaaatgctgaacgttttgaggttggaacagaaactgaatttctctcacagctacgtgcattttcttccacgtggcttaatgtgcagtcagcagcttggaaaagagttcaagcctaaacacagagatttttgagttatttacatggaagtggtaagtcatggtgcagatcccaatcagaagtgaagagtcgtttctcaagacaggtgacacgtgatgtggagtgcggggaagcacaggtcaggggcccggtgactttgccacttgctaactttgtgacctgtgaaagtcactatatctcactgagcccgtttcctcatctgtgaaatgatgaaaataacaaaaacgtgccctgacattgttgtgaggtaacagatatgaaaatgcgttttcaaccgtaaagctccataatgaagcacggccttgtcactcacatgcccgcagccgggctctgccacccgtcccttagctgtgtatgcctagcttctgcccttctcagaaactggggttcttgtctgtgcactcaatgtccctccaccatataggccgaattccttgaaagcacataccagcctccatttttaaaaccttgttctaaactgaatgttggtatcccccagaatgcacatgtaaaagccctatcccttcaatgtgactgtatttggagctagrtcctgtggggaagtgataaaggttaaatgaggtcagaagggtggggccctcatccggtggagctggtacccttacaagaagtagaagggaccccagagtgtgctctcttcagcacatgaggacccagtgagagggcaatcaaccacatgccaggaaggggagcctgcaccagaccctgaccctgccggcatctcggtctcagacttccagtttccagaactgtgagaaaatacatgtctgttgttgaagctccccagtttacgggattttgttatggcagcctgagcagaataaatgaaactgaatgtatagcacagaactggttacccagaaagagcttaggaaatggctcttgagttgactagtgggggcgagggaggccagggagttcacagattgctcctccaaaacatcatttgtgtcagacattagcttccttccaaaacaacaacattttccacaagtatggttagtagtagctaattttttttctggagacagagtctcactgtgtcacctaggctggaatgcagtggcacgatctcggcccactgcggccctccgtctcctgagttcaagcgattctcctgcctcagcctcccgagtagctgggattataggtgaatgctaccatgcctggctaattttcgtattttagtagagaaaggggtttcaccatgttggccaggctggtcttaaactcctgaccttgtgatccacccacctcagcctctcaaagtgctgggattacaggcctgagccaccaggcccacctaatagtggcaagattaatcaatcttgggttgcagttaattttcctacacactagcaggcagaagtgcttgtgggagatgacagacctaaaaagtataggggttgccatggactgaattgtgtgcccaacaaaattcatatgttgaagctctactcccaatatgcttgtatttggagataagactttgaagagatacagcaggttacagagcccataagggtagggtcctaatatgataggattggtgactttataaaaagaggagggggagagacagactgtcccctaccccacaagtgcttgcaccaaggaatagccatgtgagcacacagtgagtaggtggctgtctgcaggccaggaggaagagccctcaccaggagctgaacagtctggcaccttgatcttgaatttctcagcctccagaagcataagaaataaatttctgacaaagttgcccaatctgtggtattttgttatggcaatctgagctaatacaaggggaatgaayaggacttgaatgactggagactgtaattacaaataatgtaagaacctgaagaggaaaaaaaaggaattaattttaatcatgtggattgcccacaatatttgggatttgggattttaaactcaaatatttggaattttaaactctttgtggttagtttagccaagttttcttcatttgctgagtataattttaaaaaattgcaatgtaattcacaaaccataaaattcacccttttaaagtgtacgatttggtgggttttagtaataatctctattactatgttttcttttccttttctaataatctggattacttttaagacagttctgaacagaagagggaatttccttcatacagctaagactttctcatagggagccacttgtgataataaaatcctcatcacaccacagacacagaactgtctttgggccgcgggaaagttggttgtgtctgctgcagccagtgggctgcggttctcacccagcgtggtcaggagcaggcccactatccccgggttggcggccagcaccgggcccacgcccgggtggatggcaatgttggccagcacacgagtcagcttgatgagcacgtcctctgcctctgacggcggcctctgcgccctgtgctgctcgcctcgttggcccaccggcttctgggaatgcagatccagctgatggaacgtctggaataatgacagcagagtttggatgctccctttctctttggaaaattgttcacgagcctggttattttttgcsrtcaggttgccaagaataaaaacaacacggacgactaaatcctgcaataaacgaaagacagagtcaaaagtgcaaagggggctggaacacatcrtggggaagaagakagtatttaatttattcacaattgcattaatagtaaaatggaacacgtctggcttcggctcacttgtacagtatttgattctcaagatcagtgcaaagtgacaaaggagattaaaagcacttggcagcaatgaaagaatacaaactgattgatgtgatcagcaacgtctattaccttcagatccttcatcttaaattctggctcgcctttctttatctccttcagagaacaattagttgagtgggacagcattactaaaaatgagtcatgtaaatctaagttttgacaatagccggtttcttgaaattccaaatctttccttaaaatttcgtctcctgctgaagtatggtgtttttgaatttgggcaggattgacacttgggactggataattctttgttgtggggaggtgtcctgtgcattgtagagcgtttggcagcacacctggcctccacgcactagatgacaacaccyctccagatgtgacagccaaaattgccccctgtggagaagcgctgtgttacgtagctacactactttaaggcagtacctaccaattcttacccagggtggtggttacatgagtgacacctttataattacttgctaaattgtgcatacccgttttatgcacttttctgtatataggctatatttcacaattttaaaatgtttttacaaaccctaagctgggaacattttaaaactaaacaagatacaaaaatcactgtgtttttagtttgacaacaatgtccacatatgagtccagatcagccttccccatgggtgtcaatggaggtgacctgggaggaggagattttaaaggaatactcattggagggctacaactggcctggatggtattatatctatatctatatatacagtgccaggcactatgccattttatagacaagaaactagggcctggagaagctgcccaggtcacatggctggtgaagggtaaggtcaggatttgattccagggtgacccagactctagtgtcctttctacaccaacatctgcttcccacacagggtgtcgtgtactttttctcctcctttgccttcttgcagaacagttaaagaattatctccttttaaaagcaaatatgtcaccagaagggacgaccataaacgtgactttgttgatcagatcagtagttagcagtagccttaagaaaaggggacaaagggccaagggctgggcacgttttcatcsaggagcgcatgtccaggtgcgacgccaggggccccgtgaggggcgtcgggtgtggccaggaaactggggaggattgggggcagagtacaacttttggatttacctaggccttctctgccaataccaacttgttcctgcttgttcttgctaaaaaatccaaaagttttccctgacactcactggcagagaagaagcgaggctgctgcttgcacaaccggaaaccatttgccaaacattaaggaaggacagcagctaatgctacagcaaaaactggagatggtccaggagagagttcattttcggagacatttcaactcacagcattcaaccagccatagtggtcgtccaattaggagaccctgctcctgactccaccccgggaaatagaatgttagtcctcaggtaagttcttaatgccagggcctaggaatacacacacataaccaagtctgaaagtcagtgctatgaagagcttctcacctactgagaagacaaggctaacatatgtggggaaacggcaaagactaaaacggcaaaggaagaagcgagacgtgaaaggggattatgagtcccaggtcacagccaggcaggctggactcacacagatgcttggcctctctgtacatccattaacttgtttgcaaaatggagacaaaattcttactgtgagatcacatgagatacaacaggcaaagcacaaattgtactgagcaatgattcgggcatttctgtgaactcttttcatgtcctatcaataaaatgctaactaatagcaataaactcagtggcacaggcctagtagtctcaccagagttttgaaaagaggatgctctgggaacagtgtcaggttcagcagagttatcatgaaagaatctgagttcaaccttggaagctgtgagatgcagagatatgtggaagggagcatggggttgggcaggcagcagaagacaagtctctctctttttttaactttttaggctcaggggtacatgagcacttttgttacatgggtaatcttgtgtcatggggctttggtatgcagattatttcgtcacccaggtactaagcttactatccaatagttatttttcctgatcctcttccttctcccaccctccaccctcaagtaggtcccagtgtctgttgtccccttctttgtgtccatgagttctcatcgtttagctcccacttataagtgagaacttgtggtatttggttttctgttctygcgttagtttgctaaggataatggcctcctgctctatccatgtttctgcaaaggacatgatctcactcttttttatggccgcatggtattccatgatgtatatgtactacatggtctttatccaatccaccattgatagacatttacgttgattccatgcctttgctattgtgaatagtgctacaatcaacaaatgtatgcatgtgtctttatgatagaatgatttatttatattcctttgggtatatacccaataatgggatttctgggtcaaatggttctaagtttgtttgttttttttgtttttgtttttgagacagagtattgctctgtcgcccaggctagagtgtagtggtgcaatctcagctcacagcaacctccgcatcctgtgttcaagtgattcttctgtctcagcctcccaagtagctgggattacaggcatgcaccatcaaacttggctaatttttgtacttttagtagagacgcggtttcaccatgttggctaggctggcctcaaactcctgacctcaagtgatccacccacctcggcctctcaaagtgctggaattacaggcgtgagccactgtgcccggcctgtttttagtttgaagaggattagtttgagagagcatctgggactatctccttcctgggccaggggtcatcttctcattctttaattacctgactgttccctaaagaagctatgggatatttatgggccttaagtctaaaacaagcacacacaatttgattataatacttgaatcccatttcacataaaacagagggttacttcaagtaatgcctggtggcaaaggccctgccctgggctctgagttggtagcttctcctccaccctgatcagacccaacagagtagcagaaaatcagttttccaaccaggacagagggtatttccaagaattaagcatcttaaagaagaacttcatctgatattttctaagctgaggactataaacagaatttttgtgtgaactttgatacatgtttcctgctgaaagactatatgaattctagttctgaaaatcctaataattaataayaataacagcacagtaacagcagcaactaacacacagtacttattagtactcatgatgtgccaggcattgtcctaagcatttatatatacaaattaactaattcaytaaaaatgataacttccatttctttaacctgaataaagctattcacagtatcttttacaatctaaaccgccatctccctcgcacatttgataacagtgatgttaataagttttggacttcaccatgttcctggaattgggctctcttctcccatttccataaaagcatgttaaacaagacaggaaaggcattatgagtgattttaagtgattgcttatttaattaatatttgcattttgtaccctaaattgttaccaggactaaacaatttacctcctaaaatgtcatggcatcttctaagggtgctggattgttttttttcttcctaggccttgccgtttcacctccatctacctggtcttgcttttctctgagtccagctcagtaggcttctccagccctgtcccacctccagctatccgtgttgatttgccaggatttagatcagatcctggtaaaaaatagatttccttagtggtcatcattcttcaaaattcaaatgacctctccccactgtcacatgcagtctaatctgggaagactaagtgctgcttttctttttctaaaaattccctcaggccccttcctcttctaaaattcttcgattctgtcatctctgtaggtcctaacgtggccgagattagtaagcctccagtgcagaagaagaagctctaggctgtagggcaggaagagttaacactgttataatactgcttttcctgcttcagatggaaaaggagggggtggttcctggcagccgcggtgccaactgaagcatggcatgcgagatcaacaaatgggatggcagattgcgccgtctgcagcaccaaacttccagcaactgctatctctgcttactgtttttgtcctgtttttcagggttagctaaggcactttttcttttctttttttcccctcccttcttaaatatattctacatggacctagggatcctggaagaggccaaaatagaagccatctcacaggaggtcagcagaggtagtgttttcttatctccatgccagggcttgtcttgactcatctggaatcctgaagaaggctgagcaagtcagctttctagggcccctctcctcaccatgggtggcctctgctcccaaaccgtgcactccaaggtcctccctactgaaccaaggtctgcgttgggcaggatcatggagagattatctactgttccacagcccgagccatctcaagtctataaaatattacttaatattctataaagatttgtaaaaattaaaccaaggccaaaatcatctatttagagagagcaccaattccacagcggaaaaggatttcatcaatatgcagctctcctttgaggcacacattctctcctttattcttagacaatatctgagaatcatctataaattaacactccatttttatagcatttttattaaatttaacacaatgttgcatattcatatcataactatgtgattttgaaatagcaaactgaagatgaatcaagagagagctttttttttttttcctaaagaaggcagtctagtataaccagttcatatcgactttctaattttgcttaaaacagaatcagcctagcaacagctacggccaaccagagcttagacaaacagatacacttagaggaagaagactgacctcaacagagctttccagttagagcctgagggatattgtcattagtttcgcagatgttatgccccaatgagcaaacaagttactcaatctgaatgggccccacaagcctgtgaatgaaattactttaactggaataaaaccaggaacagggcactgctcaccaggatggtctatgtccagttccaatggtggcagcattggcagtagctgttgcatgttactttccatgggagagacattggcctaaagccaatgaaagacatttttacccctatttagagatgttgaaactgaggcttcaggagactcattaagtaagcccaaagtcaaacactggtgaagagaagaggcaggacttgaacaatcatctctgtacacacagatggtttccaaaaccaccttcagcccaactcctcattgctaatcatcatcatcttcccagtcccccagccccagcatctctgattcctctctatctcatcccctcaccaagcagtcaccaagtctcctcgactctgtcatctcaaaatgttccccagctccctcctgcccatgccgacctgggctaatctgcctgtagactgttgtcagaggccctttccaggctcctccctctgccatcaaccctaacaccacttcttaaagcacagctcttccctttgctcaaaaacatctactgcctattaaatgaatgtcaaagccagcatctaatgcatcatctggccccacgcaaccacttctttgctacctcacattactctctgcccatggccagccacagtgaacacattcctccccgactcccacacccttcctcccgtaccttaaaataactcatgtgcataatgttractgtggggaagaaacaatatcaagctgtcacagaaagaataaactatgttcagcagactccacttaggagggaactgcttccactaagtaaaggaacacattttagaaaaatttgtaagaatgggttgaaatggaaggggatgtaaatatacttaaaatccgaactctctattaaccagaaaattaatcaaaataccctgtttaaaatatggttacaaacttctcgtgcctgagagctgaatcaggatttacaatttgctttgtttatccaacttaccaccctcaaacaaaactcaaacattaattgagcttgcaggtggcttgaagaacagataaattttagcaaactggaagacagactgtgcactactgcaaaaatgctaactgaccatagggcactgaaagtgggtcaagagtttgcctacgtgtttaactagataaaatcgaagaatctgaaatgttggagactcaaagccaagaatctaagtagaaaatcattttaaaaccagaagagattacgcttgattcctccatccatctatctgttctatcagcaatcatttattgagcacccacgatatgcctctgaatgtcactcaaaagtaccaggccaatgctagaatttcactgtgctaagttctttttcaagccagcagacataaatcaggcatttgggttccgtgctgagcggggtaagagccagttccacaagggcaaagccggcaggagctggaaagaatgaacaagctaagggcgtattgtacagcctgcccggtcaggggcgcagaccaaggccaaggctgaaaaaaggagcaagctcagccaaatgctctcagcacccgctgggaatgtgcctgcagaggggctgggaagacagccatagggcgtgctcctgtcaggcaggaggcagaggacaagctgggagccaagtcgccctacaaaggcaccaggggaaggggtgggggcaccttcctaaccaatccttgatggcccaaagaggatagcggggaagagaaggcacctctctggaatgctgaaaggctgtggtcacattcaagatgaacagctagaaaaatggaggtggttttgctttcagcccacactgttcagacattccagctctcatttctgataccacgatggctaagcattccaaatcagtgttcactgtgcatacatggctgaagacagcagcttatgcctatagaagtctaaacagaatgagagaggtaggactttaaaagcagcacaaccaagaatgagtctggcagttcccagggtttgcaaaggctctgacgacagtcctgctgcatctggaagctctgtggtaaaagaaacaagaaattaaccgtatctaaacgtggagagagttaaatggtcaatggacacatgtgataggaatgtagacaaaggttgttctttttgatcatgacctttgcaaaatattgccagtcttttgaaagtcttatttgaggcattttaccagatctcttgcctagtagatatttacagaagaaatggggaaaatcccttcatgttcttccaaaaaacaaacccaaatgtattttcctgagatgctaaatgtagcaacactgacgtcagaggcgcctcctgaggcaggctctgcctcccaaaggctgatagcaaccccactccctccttcgttattaagcccatctgcttgcacatttgttttgtaccaaaagcagtttacaccataaagcagacaatatgtgcacatttcttaaatgagatttgtcatttaattgaattttggccagcatttttaatagrtattttacctaactctaaagtttagctttcatacggcattaagccgaacgagaggctgtttcatctcagtttttgtgtgtgtgggaactggagttactagttgcatcatggatcttggacaaattaaccacacagatatgagccaaagaagtttcccttgctctccctgcggaagtcatttatgagagctgggaggagtagatgccttttcattgagactgttggtgagccagaaacccaggccatgcacataaccatcacatacagatggaaacggaggcccacttcactgagggccattatgcaaacagagggggtgtaaagcggaccatattctaagtgaactcatcactctcaatttaactgttgcaaactacaacatttagatatgggtatatactgaactgtctcaaaacacgatatctgcaggaattattttaaagatgaaatttggtgcttgtttcactaacaaatgaatcagcaactcgcagcttgtctagccaactgaactgaaggcaccctcccttggacaggcggctctaagggtcctgaggagtagagcctgtgcccatctctcctgagggagccactctggccagtgcttgaagcctcatcagtgtgatgagcacctttttcaaactagatttggtcccaggacttattttgacacaagtctggcagcgaaaatttgtggaaaagactaatgtaccatcctgtgttctccagctaagaaatcattcctcagctgcctgtgcaaaaggcaaagggccagtggttcttaccacttactgggaagcctacattagcacctggtgggtcttgtcaacttggttcctactttgtcaggaagaatcactgtcagctctgctcctgtagagaaagactgactctgtgtggctgatttgattaatcactttaaaatcttttgaggttttatgggaacccctctgctgtcaatactggagaaaatggttttaaagaaccaccttaataacttaaaccatagggtctcaaaacctgctgttcatttgagtcacttgagaagtctcttaaaaataggttcttgggccccatcccagacctgaatcagaatctctctgggtggggcctgagcacctgtatttctatttttaatttaaaaaaatttttaattaaactcaaattttaagttgaaaataggtttaagggttccttttgttttgtcttgttttgtttttttgagacagggtttcactgtgtaaccaggctggagtgcagtggctcgatctcagctcactgcaacctccttctctcaggctcaagtgattctcctgcctcatcctcccaagtagctgggattacaggcatgggccaccaaacccagctaatttttgtggktttttttttaattgttgttgtagagacagagttttaccatgttgcccaggctggtctcgaactcctggcttcagacgatccatctgccrcaaagtgctgggattacaggccaatctgagccacctgtgcccagctaagcacctgtatttttaaagctccccaggcaaatctgatgataagccaagttggggagccactctgatttaaatcaagaaaaaattagaaatctcaccacttgaatacccattatttgtctttataataatgctttttaaaaaataatatgaattcttgtaaatataaatccttattcctcatcaatacccctcacagcacagttgtatagaaaagtgaaaccacaccacaacccctcctgtcgatggacttgattcagactttatatactcgaatatataaagtatattcagacttctcatatgttgaaatcagactttaccttgacaagagaaaaagaatgtaaaaataatggaaaattttgtgacttttggtatcttctcatgtaattctaatttttatcccctttaatggaaaacaacagcagatggggaggaaatattctacttcttccaacagcaaacggccctggtgctacctggttcaaaacaggatttccccctctgtggacggcagcagcgaccggcagcttcctgtgaagctccccatccgctgataagatcagttcaagaggcatgtgtaggtgacatttcatttatcactataaagggtttttttcttttctttcttgttcattttagatttctgtttctatgttttttgaaaacgcgattagccataaacatgatttgatttaaaagtgtgtcttagaaaaatgaaacctatgctgatcctaaatgtagtcctcaggctttcaagacagaagcaatactaacctcccagaacaaaaacagggaaggtctactgactctttctgattgtctaatcacttggcaatggctgtgtatattaagagactacaaagcttccagagtatttctctacaacccaagttagtcttgcagggatgtttccaggagctgaaaaaaaaaataattataggaagtaataattctgtttaaataagttgctggaaggctgattcaggtctccacaatcagttccaagcctcaacattcaagtaaatcccagttgcggcaaagtgtctaaccactgcagatcaatacactcacatcagaacattaagaggaaaaacaaatcatatttgatcggccacctgggacatgggaaacatgaaactaagatgccatgctggtctgaagggattctgttttgctttttatggcagcccacccatgtgaaaattgtgggaaaaaaattcttattatttcttcctccaaactaggaagaagaaagtacatatttaaggaagaagcactcgagtactagaaaaaatattttttaacaccttacaggtgccaaagcatttcacacactcaaaattctttcttccagcacttatgagcttactttgccaagcatcatctcggtctatcaggacaaagtctgtgttgtttaggaactcgcagtagtggatagggcagctgcataatgataaccatttggagaaccactaaagaaatgtttatgaagacttatgggaatttctggttaatgattttaggaagtggttgggacacacaactacttccttrtagcctaaactctttccctgctcttctaaaatattttggttttgaggaaaatataaattatgtatttttcttactggaaaaaaatcaaagtaatgacttaaaactacaacatttcaatctttattataagtaaaagtattgagtcaaagtataattttttaaaagttaaaaacatgactctcatgggctcataaaatgaacacacttmaaaagtatttaactcattaatgagggggccgataccacggtaaactttgttccaagcacaactgaagaaccrggaatttacaagcacttaaaatttctgggttatatacaaacctgacaaatgcctacaaagtaataaaaccataacttttgaggtgatcctgtctaccagattgaaacctacaaattaacrtgtaactttattgtgtctggtatctaaccaaatagtaaacagcaagttcaaacaccaatatgttggcctagggaattaatccctgattgggtcattaaacaatgccctggcatgcctttgtcaggacatgcctccacctattccataccttatcgctaagatttgtatagtttttcttaataatagtgaagtggttaaggccataggcatactgcttgggttcttagctctgagtgtactagctgggggtatcagctatgttaaagtcttaaaaatgttgcactgatgagggagaaattgactggtcttgcttgggaggcctcacaggggagcagacaagagagstacaacttgaaatatggaattggctttgaagaggagaagtcacagagaaatttcatcagagccccttaggctcttctcattaagtctgttcatattcaattttattttaaagtttttagtctaaaatatctgtctgtctgtctgtctgtctgtctagctagctagctagtgatcaatggctcactgcaacctgggctcaagcaatcctcccgccttagccttctaagtagctrggactacagacatgtgccaccacgcacggctaattttttgtttatagagatgaggtctatgttgccagtcttctctctctctctgagataggatttcaccttgttgccaagctggacaactagtttcactagaggcttgcaccaccacgcctggcttatgtgttgatactggagttaaaaagaaattatttaggcagatagtgagggtaaggaggtcctcggtaaggttttccttttaatgaaaagcagcccccaaataatttcttttctaataaagagcagcctgtaaaatcaagctgcagacatagaaaggcaagctagaagcttccacgggtgaatgctgccagctgtgccaataggaaaaagaatacctgggactaggcatgtccactatggcagctccatcttcccttctctttgctagccacatgtacagtaaagagcaggtaacatggtgctggccaagcaaaaacaccatttgtataataagaagattaggttggggtggccaccttccctgcgtgctatgtaaacatcacacctggtccaaccaatctttgggccctctgtagatcagatattgcctcctcaagcctgtctattaatacctgtgcatgggccagaagttccacttgggtgcctctctcacgcgcaggagagagagctgttctcctctctcttttgcctattaaacctccgcagttaacctcactccatgtgtgtccatgtccttgatttccgagatagagtcttcctctgtcacccaggctggagtgcagtggcacgatctcggctcactgcagcctctgcctcccaggttcaagcgattctcctgcctcagcctcttgagtagctgggactacatgctaattttaataagcttggttatgaggttcccttgctaattgcaaacaaataattgcaaaaaagcaggtaaagactaccaaaggtggaggtagcaaccaatagaaaaagaagagagagaaaatctacaaagaagatgcagacatttaaagaacctcatcaacagactcaggcttcacatgtgggacaaacagtctctacagcaataattaatgcttataataatgacctttggtatcaagaggttaagttagttttaatatcttctaagaaggaagagaaacatgcaatatgtttgaatatgatttttgccacaatgattaagtttagtgatgaaagtgataacatgcatttctttgatggttctgaataagcatgttactgtacatggtttacaaggtgctctctattcctctttggaaattaaaataattttaataggtattttagtctgttctygcattgctacarataaatacttgagattagataatttatcaagaaaagagattgaattggctcatggttccgtaggctgtacaggaagcatgctgctggcatctgctcagcttctggggaggcctcaggaaactttcaatcatggcggaaggtgaaagagaaacaggcacatcttacatgccagagcaggaagaagagagagagcagggggaggtgctacacacttttaaacaagcagatctcaagaaaactcactcactaccacgagaacagcaccagggggatggtgctaacccatccgtgagaactccgcccatgatccaatcacctcccaccaggccccacctccaatccrggggattacaattcaacaggagatttaggctgggacagaaatccaaaccacatcaataggaacataaaattgtaatatacatcaacagagaaaaatgtggtttcttaaacatgagttttgcttttcagataaccattggtctaaygtgaaaattagtttagtgaaaagtatagtaaaattttatgccaatttaaactttaggatttttaggctgggcgcagtggctcacatctgtaatcccagcactttgggaggctgaagtggtaggattgcttgagcccaagagctccaggccagcctgggcaacatagtgagacctcatctttattttaaaaaacaaaaaaaaactttaggacatttagttactcaaactagaaaaagcatactcttagccatactgatatctctagtctctcatattggtgaggtaccaggatttttgttggtttattccatatggccatcatctaagctccaatcagagaaacaaaagtatctattagtaatgctagaaaacaatagcactatttgtgagtactcaattaatgaattttcttccttaaaaaaattatagattataacataacttgaaatcaaactgttaaacagaagtattttcttttgtccatatttgaaaattctaatggcaaggcaaataaatcttctctaattaaagacacctaaatcacccaagatcaaagcaccaaagcaaaaaaaaaaaaaaaaaaaaaggtagtaatgggaaaataaaattataattaaaattcataacattaaattataaaataaaatatataaatagatctcttttgagtataacatgtaaaagaattcttttgggccaggcacagtggctcacacctgtaatcccagcacatggcaaaaccctgtctctaccaaaaaaaaaaaaaaaaattagccaggtgtggtggcacatgcctgtaatccctacttgggaggctaaagctggggtwaaatctgacaaatttaataattctcagcagaagtctttggctgggtaaagataagttcaatgctagtcagtaacaaacagagattatgttttggrgtggtcttaatatggttaacaaaacaaacacaaagcttcagattaaaataytgttagtatatacataaattatttggtccataaactcgyaaaacttactataggatgttgaaaatttaccacatttaaaatgaatactcattgtattcatggacaaaatatctcactaagttgatgtcactttaataacttatgaaagtgaataaaagtagactttgctttaacgaatatttaaaaacttataataaaaattaatgcctgtggccgggtgcagtggctcacgcctataatcccagcactttgggagggaggccaaggtgggcggatcatgaggtcaggagatcaagaccatcctggctaacacggtgaaacctcgtctctactaaaagtacaaaaacaaaattagccaggtgtggtggcacgcctgtagtcccagctactcgggaggctgagrgggcagaatggcgtgaacccaggaggtggagcttgcagtgagccaagatatcgccactgcactccagcctgggtgacagagtgagactcgtctcaaaaaataaaaaaataaaaataaaaataatgtctgtatgaaatattatgatttgattaatgagaaatcgtttgtaagttcttccttttttaaacaactatatacatttttgccttgattcattaaaactaaattatttcatttaaacactttacctggaaatgttaccttttaaatataacaatggggtcaaagaattagagaacttaagggctagaagaatcttcagggactatccagtgcaggggaactgcaaaccttaatttgcrtcagaagtccctgtggttcttgttaaaatgcagatggctaggtaggtcctaccctacccatctgactcagtagactggaatgaaacctggaagaaataaccattacggaaataacccttggggtggggttataccccctcccccaccccaaggtgactcccaggtaggttttctacagatcactgggaggaaaaatattgttataatctaccaccttccttcctacaccaggaaacttcctagaacatcaacatttcatttctgactcatataactccttcaactcctataggtaacttactgcttcccaggrcagcccattatacatttaatggaagtttcttatagaaacctatatactcaaracataaagacatttaacatgggcttacacaaacacattagtgtaaagactcattgaagaattaaatgaatgaagaactgacctgcttcttctggtatttgttaattagattcagaaataaggcataacatctggaatagctggccaaggctgtgcagcagtcacggtaagaagtaagtttgctgcagaaatgccaaatgggaaaataaaggtaaactttgtttttctataaaattcaagtacacatagtatcactttaaatgcagaccttcaaaacattgcccagttcaagaaaakgagtctaaaaatactctacacatcagttcagagaagctgcaaggaggcttcctgctctacactctagtgagatggatccggaaaaatttaaaaggtaacttacatgtaggtgtacactayccacgtaattcagaaaacacaaacttacatgaaatttatatgaaatctggttggataccagtgagtcccctgagaccacatcagaagcaaatgtaaaactgctttaataggccaggcgtggtgcctcacgcctgtaatcccagcactttgggaggcaaaggcaggtgggtcacttgaggtcaggagctcaagacgagcctggccaacatagtgaaaccccatctctacaaaaatacaaaaattagctgggtatggtggcatgtgcctgtaatcccagctactctggaggcccaggcaggagaactgcttgaactcaggaggcagaggttgcagtgagccaagattgaaccactgcactccagactgggcaatggggcgagactctgcctcaaaacaaacaaacaaacaaacaaacaaaaaacctatacattcaaaacaaacgaacaaaaacctgctttaatatagtagattggtagtgctatactaatattaggcaaaataaaccaaccttaaggcagaaagccttgaaaacagcttcaaaatttctaaagcaagtaagcaagcaagcaaacaaaacccgtaaggcaatattgacaaacccacaacaaatcaggagatgttcatatatttcttcctaattgatgaatcaataggtaaaacatcattaatatgttaaaaacttgaccacataccaggccataaataaatctcagtaaattttcagagaactggtatctcaaagaccacattctctggtcaargtgcaattaaattagaaatcatttaaaaaataaatttaaaaaaamcttttttttggaaatgtaagaacacctaacttataggtcaaagaaacatgaaaattacaaaagaaatacttaaatacgagtaataaaaaatattacaaatcaaaacttgtaggatgggccaggcacagtggctcacgcctgtaaccccagcactttgggaggccgaggcaggaggatcacttgaggccaggagttcaagaccagcctggctaacatggcgaaaccccgtctctactaaaaaatacaaaaattagctgggtgtggtggtgcatgcttgtagtctcagctactctgcaggttgaggcaggagaatcgcttgaacctgggaggcgaaggttgcagtgagccaagatcacaacactgcactccagcctgggtgacagagtgagaccttgtctcaaaaaaacaaaaaacaaaaaaacttataaatactcatttcctctaattagtatttagaggaaaatttataggtttaaggaggctgaaaagaaaggagtcatgttttttactaaaatagaagaaaaatatgatatattcacagagagttgaagaaaaggattaataaggataagagcagaagaaataagacaggaagcaaacatacaataaagtggatcaataatatatttgttcttggtaaaagctaataaaataggaaagattttgcaagactaagaaaaagagaaacagcacgaacaatcaaaattaggaaagaaagtcaatattaacaatgaagaggcaaggtaacacagtggttcaaagtatgaattctagagccaggatacggtttcaactgcagctctatgacatactagttgtgtgatctcgggaaaataactaaacttctctatgtctcagtttcctcatatgtaaaatgataatgacaataataatacatatcttaaaaagttgttatgaggatgaaaggaattcgtatttggaaagtattctgaatattgcctagcatgttgtaagtgctatacaaatatctgttaaataggaaaaataaataaaaggggacataattagagataaaacagagattagaataataataagagaatagttggagcaacttttatattgtttgaaaacttagataaaattatcaaattcctacaaaaacataactttttgaaactgaaccaagtagaaatgagaaacatataaccatatgggaagaaattgaatcagtagtcaacaatattcacacacacatacacacatatataccctggataaaaatagcattttgagcaagtttttaaaacttttcaagaagccgatcagctttttacaaattcttctaggaaagagaaaaaattggattacctcccaacccattttatgaggctggtataaacttacactaaacccagacaaggacaatatgagaagagaaaaatacaggtcaatgtaactcatgaccaccaatgacaaatcctaaacaaaatattagttaaccaaacccagcaatatataatggcttaacttgagaaactttattagtgtaatttactatattaacagatttaaataagaaaatgcataatcaaaagcaattcaggtaaatatgatttatcacatacacacaactgaagacaaaaaccacaagattatctcaatagacacagaaaaggctttcagtaaaattcaacactccttcatggtaaaaactctcaataaactaggtactgatgccaggcgaggtggctcacgcctgtaatccagcactttgggaggctgagacgggtggatcacctgaggtcaggagtttgagacctgcctggacaacatggtaaaactccatctctactaaaaatacaaaaattagctgggtgtggtggcacatgcctgtaatcccagctactctggaggctgaggcaggagaatcgcttgaacctgagaggcagaggttgtagtgagccaagatcacgccactgcactccagcctgggcgacaaagcaagactccgtctcaaaaaacaaatcaaaacaaaacaaaaaactaggtattgaaggaacagacctcaaaataataagtgccatctatgacaaacccacagccaatatcatactaaatgggcaaaagctggaagcattccccatgaaaaccagcacaagacaaggatgccctatctcaccattcctatgcagcatagtattggaagtcctagccagagcaatcaatcaagaggatgaaataaaggacatccaaacagaaagggaggaagtcaaactatctctgtttgcagaagggtacttatgaaaacctacaacaaatattattttcagctggtgtaaccatgaaamtatttcctttagagtcagaagaaagacaacaggcccaacactcacagatgattctacatctagaaaaccccacagtctcagcccaaaacctccttcagctgagaaacaacttcagcagtttcaggatacaaaatcaatgtacaaaaatcactagcattcctatacaccaacaacagccaagcagagagccgaatcagaaaggccattccattcacaattgccacaaaaagaataagatacctgagaatacagctaaccagggaggtgaaagatctctacaatgagaattacaaaacactactcaaaaaaatcagagaagacacaaacaaatgggaaaacatcccatgcttatggataggaagaatttgtaccattaaaatggccatactgaccaaagcaatttacagattcaatcctattcctatcaaactaccaatgacattcttcacagaactagaaaaaaaaaaactattttaaaatttaacacggaactgaaaatgagctcaaatagccaaggaatcytatgcaaaaagaacaaagctagaggcatcacattgcctaattcaaactttactacagggctatggtaaccaaaacagcatggtactggtacaaaaacaggcacatggaccaagggaacagaacagagagcccagaaataaggctgcatacctacaaccacatgatcttcaacaaagctgacaaaaacaagcaatggaggccgggcgcagtggctcacgcctgtaatcccagcactttgggaggccgaggcgggcagatcacgaggtcaggagatcgagaccatcctggctaacacagtgaaaacccatctctactaaaaatacaaaaaattagccgggcgtggtggtgggcacctatagtcccagctactcgggaggctgaggcaggagaatggtgtgaacccgggaggcagagcttgcagtgagccgagaccgcgccactgccctccagcctgggcgacagagcaagactccgtctcaacaaaaaaaaaaaaaaaaaaaaaaagcaatggagaaaagactcactgtttaataaataatcacggggtaacaggctagccatatgcagaagactgaagctggaccccttcctttcactatatacaaaaatcaactcaagatggatgatggattaaagactaaatgtaaaacccaaaactatgaagaccctggaaggtaacctaggcaatactatcctggacataggaacgggcaaagatttcatgacaaagacactaaaagcaaatgcaacaaaagcaaaaattgacaaatgggatctaattaaatttaagagctctacacagcaaaagaaactatcaacagagtaaacagacaacctacagaattggagaaaatatttgcaaactatgcatctgtcaaaggtttaatatccaggacatataaggaacttaaacaaatttacaagagaaaaacaaccccaccaaaaagtgggcaaagggccaggtgcggtggctcacgcctataatcccagcactttgggaggctgaggcgggcagatcacctgaggtcgggagttcaagaccagcctgaccaacatggagaaaccccgtctctactaaaaatacaaagaattagctgggtrtggtggtgcatgcctgtaatcccagctacttgggaggctgaggcaggataattgcttgaacctgggaggcagaggttatggtgagccgagatcatgccattgcactccagccttggcaacaagaacgaaactccatctcaaaaaaaaaaaagtgggcaaagaacatgaacaaacacttttcaaaagaagacacacatgtggccaataagcatatggaaaaaaagctcagtatcatagagaaatacaaatacattagagaaatacaaatcaaaaccacaatgagataccatctcacaccagtcagaatggctattattaaaaagtcaaaaaataacagatgctggcaaggttgcagaaaaaagagaacactcatacactgttggtaggagtataaattagttcaatcattgtgtaaagcagtatagtgattccacaatgagctaaaagcagaactaccatttaacccagcaatcctattactgggtatatacccagaggaaaataaatcattctacaataaagatacatgcacgctaatgttcattgcagcactactcacaatagcaaagacatggaatcaacctaagtgcccatcattgacagattggataaagaaaatgtggtacctatacaccatggaatactatgcagctataaaaaagaatgagatcaagtcttatgcgtgaacatggatggacctggaggccattagctcagcaaactagcgcaggaaaataaaaccaaataccacatgttctcacttataagtgggagctaaatgatgagaacttataaacacaaagaagaaaacaacagatgttggggtctacttgagggtggagggtgggaggagggaggggagcagaaaagataactcttttgactattggatactgggcttaattcctgggtgattaaataatctgtacaacaaactcccgtgacatgagtttacctatgtaacaaacctgcacatgtacctctgaacctaaaataaaagttaaaaaaaaaaaaaagggggtgggggccgggtgcggtggctcacgcctgtaatcccagcactttgggaggccaaggcagggggatcacgaggtcaggatatcgagaccatcctggctaacacagtgaaaccccgtctctactaaaaatacaaaaaattagctgggcgtggtgtgggygcctgtagtcccagctacttgtgaggctgaggcaggagaatggcatgaacctgggaggcgaagcttgcagtgagccgagatcaccccactgcactccagcctgggcgacagagtaagactccawctcaaaaaaaaaaaaaaaaaaaaaagattcagggcaagcatttgacaaaacttaatacccactaatgagaaaaaaaatcattaatcttctaaagggtagttaggaaaacctacaacaaatattattttcaactagtgaaaccatgaaaatatttcctttaaagtcagaagaaagacaacaggctcaacactcacaattttgtattgaactcctaaacaatgcaataaagaagagatgaggacaggggaaagaattacaataattgaaaaaaaaattatatgtagataatatgcatagaaaattcaagagcatctatagacaaactcctagtcctaatgttcatcaagattcttggatatccttcctgtaggagacagctaaaatacataaataaataagtaaatatttttaaagagctatcaatgcaagattaataagttcataaggaagggaaaagaacaagaagagtttggattcttttttttttttttagatagggtcttgctctgttgcccaggctggagtgcaagtggcactatcttggcttactgcaacctccaccttccagactcaagcaatctttccacctcagcctctcaagtagctgggactacagtcacataccaccatgcctggctaattttttggcaggggttgggggtggggggcagcgctagagatgggatttcgccatgttgcccaggctgatctcagattcttgggcttaagtgatccacccaccttggcctcccaaagttctgggattacaggtgtgagccactgtgcctgaccaagagtttggatcttaaaggagaaaaaaagtgagagatttgaaggccaggcagagtggctcacacctctaatcgcagcactttgggaagctgaggcaggaggatcacttgagcccaagagtttgagaccagccggggcaacatagcaagacttcgtttccacaaataataatgataaaattagctgagcatgttggcgtgcacctgtggtcccagctgctagggaggctgaggtgggaggatcgatcgtttaagcctgggcagtcgaggctgtagtaagccatgtttgtgcccactgcactccagcctgggtgacaaagcgagaccccatctcaacaacaaaaagtgaaggattcatcttatagcaaaactcaaattaaatctgtaatagtaagtacagtgtggtacaggtctgaggataaaccaaacagaatgcccagaaacaaacctgaaattatatggaactttctgtctgattgacaaaatcagtgagaaaggatggcatagtcagtaaaaggtgctggaacaatcaactatccacatgggaaaaatatgaagttggaccyctacatgacactataaacaaaaataaattccttatgattctacaatgcattagataggtagtaattaggtatccagaacaaagctcagggaagtgcagtataaaaagatcagatctggagggaaggagggggctggggctgaagaaccacctgttgggtactatgcttactgcctgggtaacatgattgtcgagaccccaagcctccacgtcatacaatttacccacgtaacaaacctgtgtaccatttaatctataatacaagttgacattcatttaaaaaaaaatcagatttggactcacatccttatacaggggtcctggggtcaagtaccaattcagtcttcaggaaattttgcatttctttacaactacaacattatagttcaagaaaagcctcaggctcccgagaagaatcattatgtaaaaatactgacaaagagcagcgcgggaggaaacagaaatgcataattcaaagacagttctgaaatttaacaacrtcttgcttggaggcaacctggattcaaatgatcattatttctggaagaaataaagtaagtgtagacttgactagtgaaagcttgagccaaagttcaaatagctgaaatagaataaccttctattacaaagtcacatcagactttctaagcattgatccccttttttgagttaaaactcttgtttatttcctagcaaactggaaggtttgctgtgttttgtatacagttttttatctcaaataagctgagaggaagattaaacacacacacgtagctcacaactcaccaaagaactaaaatgacttaacaaccaatgagtttagaatcacaatagaatcatatagacaatgggktcatttgtttgaattgttcatttttaacttgggccactagatttaccctttctggtaggcgaagtaaaaagaaggaaaaggattccttgccagtcacacaagcaaatattaaagataaccccaaatctaagcattagcatttttgtaaggctacttcacgtcttagtctacctacctgaatattctggcaatattggtacagacgtccttgtcacccttgtactgttccattgccgtgcagagctggggaagggcactgatgtttaggaacttacttcttactaatgatgaatcaaccaagtttctcaatgtagcagtcacctaggataaaagcatgcttgtgccattttttttgaactgaaaaaatataaccacacgaaacagcatagtacaattcatttcataaatttccttatatcagtagctaagcaaagctcccgctatgcatctcccaccagggaatgtgagcctaggcacaagtagcaacaaatgaaaacaaagaaagcctaatttggttgaaaggtaaagaatgaaatattaatcttagtaagcaattggtataccccaaacccagggttaaacaaaccatcatctaggtttgctaacactcctaagatcttcagctggccctgtgatagccacatcagttctgcagattagaaacttcttgttctatgtttttctttctttttttttttttaattttataggtattcttgtctgattgttctatgcttttataaatagcatcagataatgaatgatgtggccaaggaatatttaagatctttagtctcattctctcccaagagacaagtattaagatctcacaaatttgtcttattttattaaaaaaaaaattcaggaaagctatctactttaccttcgtcaaagagtcaagaagagaagagtttagtaaatcataaaactaatgttgttatctaataattttaatatgcagtgtgctccttccttgtgggacactacaggaaagctactggttaagagccagttcagcctcaccacccatcagcctgggttagttatttaacctcccagagctcatttttctcattcaataaagtagaggtgatgatacttccctagcagttgtgaggattctatgagataagatgtgtgaatggcatcgctgccatcatctcttcctagtgaagtgcccaggggcagccactccttcctccacttccccatttcctcatctgtgaaaagcagrtgacaagcactgctcacctctcggggggttgtgtgtagcaaatggaaacatgtagcactgtttttattacttatctaatactgtaaagcatcatgtaaacataaagcatccttacagccatagtatataaacttttaaaaacaatttttaagatgacatgattagtttttccttataacaacagcaacaaaaagatacattaaaatataactgactaccctgaaaacacagaaaatgtaaaaaaaaaaaaaaaagcttcaaataaatgtgtacatgtcttttgtaatcaattcaattatacaatgattctgtaaattcttccctgaaagtttcagtatcccaaacattggaagtgaaacaaactacttgagtattccacttaactccatagatctaaacaatgtcacaatgtagtcttcttctaagctaaggaatggactttttttttttggagacagagtctctctttgtcatccaggctggagttcagtgacaggatctcagctcactgcaacctctgcctcccccattcaagcaattgtcgtgcctcagcctcccaagtagctggaattacaggtgcgtgccaccatgtctggctaatttttgtatttttagtaaagacaaggtttcgccatgttggccaggctggtctcaaactcctggcctcaagtgatccaagcacctcagcctcccaaagcgctgggattacaggggtgagccactgcgcccagccaggaatagatcttttgtgaagactaatgaaccattctaggaattccattgctgtcataaaatggaaaattctcatcatctgaccccgtttccacctgttctcctgagacagcccaggcaccggagcactactggtttacattaattcagaggatgcctcaaaactctcttccatggagacggaagagtacagatgcctgtgtaactcccatgcagacagacatcatgggaaaccatgaaatacccattccagtcactgcacaccaacagttccttttccctggtccccaaggcatcaaagatgggacatcccaatccatagtcatcttcacgctccccwcatctaagctctggcaagggacattgccagcagaaaggaccatagtttccttaggagcttttattttcttgtttcaatctcaattttttctccttctcaggccttattctcacctcattagcaaaagtttagacagctcaagtttcttctgccccacatacataactttcatraataacccaagtcaggagagaaagcccacatttatatgtgacatgtcatttgattgaaattcctacccatttactgcacgtgatacacacagttgagtaatatacaatacctcacgtatttccaaatttgtcatttgtggtgctggtagaaataacatgcatgaaacatataccatacatttgaaaamtacacagcaatagctcaatagatgacaccatcaacctagttgctcaagcagagayatcccagaatcctgcctttctgctttctgttactccaagccatattggctttttgtccatagctcccaggataatattcagttccctgaccatggtctacaaggctcaacagatctgttccttctcaacccgtcaagcttcatctcataccatatatgcccccataaactctacttaatgctaggttatttaatattatgktttactatctgtctactcctccagactagacgcttcagtgaaggcataaaccttgttcatccttttcaccattgtacatccagctccaagtccagtgcctggtacatggtgggcgctcaataggcatttattaatggaatgaatgaaggggtggacatctacaaaggaaagactgggatatcagaacaccatgggctaagcagacaatatctctgaggtagacagattttaagattttttttgaaagcagaggagtaaaaaataatggatgaaagaaaaatggactctgtagttacccagctcaggctaacttgtctatgtttaagacctttcagaggccgatcagtcgcttcctcttccgtgttaacaaagcatcctgttcctgcctctataacccccatccatcacagaataaaaaataacggatgaaagaaaaatgaactctctggaaggggaccagcctctgtgtatttgttctctagcctatctcatttctgacagcagctccttcccaagctcctaaactcccgggccccacccctttccccacctgactggtcacacgttcaccccttctctccatcaccagcgtcactggttcagtttaagctcacttcatctcttacccaaactctacagccccctggatgggctccttccacagtttgcccccatagctgctcactgctgccagagggggcatctcaaagctccgccttccctgctcaaaggcctcctgcgacttccggcccagccagtagcacccatagcctaaaggttcctcagtctctgaagtgtggtttatccctccaaactcatctcctttgcctcggcaccaccctggccatctttcagactytgcaccacatgaggtcctcaacccttcatgacgccatgcctttgaataggcggcttcctccgcccagagtgccctcgattacactttgccaccccttctcccccgggccatctcctgctcattttttcttttttctttttcgagacagagtctcgatctcggctcactgcaacctccgcctcctgggttcaagcgattctcctgcctcagcctcccgagtagctgggattacaggcaagcaccaccacaccctgctaatttttgtatttttagtaaagacagggttttgccatgttggccaggctggtcttgaactcctgacctcaagtgatccgcccgcctcggcctcccaaagtgctgggatcacagacatgatccaccgcgcccggcctcctgctcatttttcaaaacccagctcaagataacttctctgtgaagtcctttccgaggctgatcagtcacttcctctscttcctcttccgtgttaccaaagcatcctgttcctgcctctacaacccccatcacagaagcattgtcacttgtcttcaggcatcttctctcccatggtgagctcctctagggtacaaaccacttcttattcctctttctattcagaggacaacaaatgtgctcataaaaagctcttaaatgttcagctactggagggctggaagagtgaatgagaaggggaaggaggaggggaatgaggagggggaagaaagaaagaagggacaggagcgacaaaagagaggtttttccctttaagacacctctggcaagaaagtgcgggagcttagcagaggcctgggtgaaccagggcctaaaaccctgagggagaaggatcaggaaaaggccaccacgcagatgcagctctgaaggccctgtatcttgagagacttgtcaccaacctctgagagccaccaatctcactgtgggatgatggtggggccctgaatgctcagaccagtggccttttctggaaaaaatgcaggaaaaaaaaaaaaaaaagggtgtggggaggagagtctagctaaatcatgtggtcacagtaaaggcaagttccaagtcaacccatttaactgaattttgctcctacttttgaattcattatatacaagtgaaaattaaaaaaaaraaaacaagaactctcagttgaacagagataaatctgtgaaaattatcaatgagttctgtgctctacagcagggtctttatttcccaccctcaagaaaagcccacccactgggccctcccccaaagcaggagttaaccaaagcccaagcttcatgcttggaggtgtgcatccatttctttcttaactttctattctaatttatattatctataaatgcacaaacttaaacacacatttttcttttttattgtatataatytttcaaaccacctcaaatcccttacttaaaaaaagtcttgtttagtctctaaaggacttagtagagaaattctcaacctcttaagtagcatttcaccaagaaatagcacactgaaaaacacaagttttaattcctatcttttcccccatctcttaacttgcaatcctgtgggacttgcaatcctgaaggcagcccataggaagragaaaaaagagaagaaaatgacactgataatccacaaagaggactaatacaaatgtaagtttccttgcttattagcaattgttaggtgatgtttaggacaaaaggggacctaaggttttggtaaatacccaggaagaaacattccattttgcttctggttaccaatctactactgaaaaatgactgagctacacttgacaactttctggtgctcacttttctgagaaagcttctttccatgttccccaaattatttgatcataacaggtaccaccctcagtcagggaaaacacctggagacttggcaaagctacccagctcacattgaattatgtaagcctcaaagttttcattgtgtagtcagtattgggagacccattttaaagggaaaaaatgtactaagaagaaattagatcatttataaatgcacaactacattttaatacagtaaaatgagaactcaaaagctttagcttctgtttttttcaagttgactataggtacttaattatcaatttcaaattgtgttttcaactattaattaattgagaaaccttagcaaacacaggaaatatttgtcttaaaatatggggctgggcccagtggctcaggtctgtaatcccagcgactctcatggctgaggcaggagaatcgcctgaaccccagaggctgaggctgcagtgagccatgcctttgatcgcaccaccgcactccaacctgagtgacacagtgagactctgtctcaagaaaaaaaaaagggtgggggggccctccggacttggatcactggacttgaggacacaacacaggcccagcagctgtggtctcattcctgcgttctctactgcagtgggtgggtgcgaggtggggcaacctccacacacactgatcatgtccagagtggacggccctctcttttccctctgtgcccttcctccatcagagtactctgtcctcaaggaactcaccagattctgctctagaaggcaacctgccatcagagctgccccagatcagaggagcttgtgactcattgaagctcagaagtctatcagctcccaggtaggctagtgccctggcctcagtttcttggtctattgcctccctactctatttggcactggtctctaaaagcattttgcaatyatctggaatatccacaactgaaatccctcgagctttgtctcaacttaactgccaactgcaaaattgttgacttcccactgatgatgtaaaagaataaacgcagccgccagagaccacaaacagtgtgaaatgatttatgactaaagccactattttccaacctcagctaagccatctccctctattaataaaggcagattcatttctttgaacttgtgcccaattgaggccacatatatgccaaaaccagagcctgtgtggtaacccaagaagtttcatattgtctcatatatgatttgtacagttctggctgagacaaaagaaaccaatgacaagatgctgctagacatgtgaaatcactggtaacatgcatgtctaagcttttcttggaatttattaagatatatgcatatgaaggtaatattaattaataatccttgataacactcggtgcctggctacacaggcctacttggcacatccctaccatgggtgtccgacttagcaggaaatgcttctgtcctccttaaacctccaatgtcctactttgagactctatttaacatttggctctgtttattgttgtttctccatttactgcctctatgccagttacttcactaaaatgagtaggtagctgattcttctagttgtggctatgtatgtattcaatacaggagaaattttgaatatcatacaaacaatctagaatggcaatgcagcaaaacaagaaaaaggagtctgaaaaagatagtgcattaagaactaccaagcaatgaaaccactattcacaattatatgctaaagctagtgacatttccttactgccacaactaatagatctacagtgaagagaggaggctgagcagacagagcactaattgagagcaaatggctctcctcagacacagtaggagcctcatttccacccttgatctgtcttttagcataacactcctggccatccaccgccctcacttcctgattggtgagcttgggacaggaatcagacmctcccagtccagcccctacctggtccctctcttcccttcctcttttagaagtgagctgccatcagaacaaaggtgttctgctcctccagggacagacatggtctgtgactgggtgggtaaatctaattctaggactcaggattagaaagcatgcctgcctcagctatcagccacatcctccaaccacggtgataactttatccccatccccagcctccttagcctcttatttccaagtaaaaaacccaaggcattacatatttaggtttctgagtcttctcagatcttcagatctgctgtccctggaaaattggaggagaacatgagttgcctatagacagctccttcctaggaaagggaagagaagggaagaggaagaacctgggccccaaatgcctactctctcgtggcaactgggcacgtgagtggttagttatgctgctggcaattcttttataggaaggaagccccataagtagaaaatagctgtctccttcccattaacaaatacatcattaaaaaagtggcggcacgtgcctgtaatcccatctacttgggaggctgaggcaggagaactgcttgaacccgggaggtggaggttgcagtgagctgagatcatgccactgcactctggcctgggcgacagagcaagactccatctctaaaaacaaaaacaaaaacaaaacaaaacaaaataaaaaattagccagygtagygatcaataccaaagactaacccctaaaatagcttcatctaatctcaaaaacaatatgctaagcaaaataaaccagatatagtactctaggtaactatggcatatccatatcaattcctattgataatgtacaatagttatgtaagatatcaccactgggaggagctggatgatgggtacacaggacatctcggtactatttttgcaacatcttgtgaatttatacttagttcaraataaaagtttaaaaaggtgccagacacaaaagggtmcatgctgtatattccgtttatataaagttttagaacaggcagagcttatctatggtgaaagagatcagaaaaatggttccctctgggaggagggtagaagaatgaggattaatgagaagaggtgggaggaaatttctgaggtgacagaaaccttctgtatcttgataagggtaggggctacgtggctttctacttttgtcaaactcatcaaacgtataagatctaagcattttattggatgtagattataccttaattaaaacaaaaagaaaattaaaaacctcatctactgcttgctattcaagcaaaaccttcaaaataaatgctttaaatttggtttaaattatcaaatctccaaaaaaaaattatctgtaagaacttaggaaatacaatcatggggctatttgctcccattttataggtatgcagtttacttcctccaataatcagagcaaagttctactggtagacactgctaccttggttctgattgcacagtctgaagagttaggcttccaataggyggggtcgcgcaagataaagaattaacataatttccagcataagtacacatacttataattatctaaacacctaaatacaaatgcattaatctctacrtttaaaaactatgaaacataactaaagcaagagttaaaagaccccggccagcctggtacaaccttcattactaataataacttaagtcactgcttgatcaaatccccagacttcagtgaaggcctctcttaaattccccaaatcttgaagcaaagaatagctggctctgagaattggggtccatcatgtacccagaatcccatacattaccctaacaccctcctccaattttagtttctctttggtgctcttctctacattgcttatcaaagcccgaacaaaaagattaaatatttgaaagtcatcttggactctgtcttcttaatttcttgtgattacatttttatcccatcagaaataattgctctttgaagcttcaggttkgggtaattctgatcttattttattgaatggctttctggtgagtgcctactatgtgccttgccctgttatgggcgctttactagacgatctcatttcatttcctagctgccctttaaggcaggcatagtcagcactttagagacaggaaactgaggctcagagggtaaagtgggctcagtgtcccagctgagaggcyagcttatgctgggggctccagtgcggtgctatcctcactggaccatgcagggtggcggcactgggcctgccccagcattgtccagggttgaatgaaccatcagggttcccaacggcaaacaatgaatacaggattgagcccagctctgccaaagtggggagctcactctagggctcagaaatttaaaaaaaaaaaaaatcaagtatatcaaaacatcttttaatttaaaaatacagagctaaagaactatgtaagattgaaagagagcaagagagcacactgttgccctaggagatggccccctcacacccctcgctcgcctattcgcacggctccaaacaaagtggtgggatccctcttctcctacacgctctctgtagcatttgccaaagctgacccatccttgctgagaaaatctcactcttgtacattgcccttcatttcctagtcacttccttttctcttcccattccacaaatgaggccattttcacagaatctgtcatcagtccctctgctctttctctactctctccttgggtaatttcattgtctttctgccttcaaccatcaaatccatgtagatgaccctaaatctgtatttttgatcttacctgctcttccaagcctcagctcatatctcctacttcctactygagaggcctgctggcatctgaaagttttatattcaagctaatttcggccgggagcagtagctcatgcctgtaaacccagcactttgggaggctgaggtgggtggatcacttgaggtcaggagttcgagaccagcctggccaacatggtgaaaacccrtctctactagagacctactaaaacaattttagttttgtactaaaaatacaaaatgtagctgggtatggtggcacacacctgtaatcccagctactctggaggcagagacaggagaatcacttgaacccrggaggcagaggttgcagtgggccgagattgcgccactgcattccagcctgggcgacagagtgagactctatctcaaaaaaatatatattaaaatttaaaaaataaaaataaagctaattaacataattttcttcccacaattttctttcctcctctcaccaaatccagttcctttctgtaactctctaatttctattcatgataccatcatttattattttctgaactatccaggctcaaattgtctgagtcagctctctttgttccatacactttcctattccctaaaccctaaaaacaaaaggaaggaaccgagtgaaggaaggaaaggactgatgaggtgggaggaccgaccttcccgagagacttccatttagaaaaaggaagaacatgacagtggtatggtactgagcaagggggagaggatctggatttgcgggagctgctagggaggtgtctgcaggcttaggggccagagaagcgggggtagggggctgtggagaggaaaagaaaaccatgttacctggggtgctgcagaacagttctaacttcaaaaacagtatatctaaagaaggcaaataatacatttctctaaggattgaattcaaaatcaactgggtcaggctgtaaagaaaaaacagattggaagtacaagtgaatccaaaaaataggcatgcaagttcaagtcaatctgagctttaatagttacattgtacacctataaattacctagctgttaatgtaagtacattgagatttccttcaatcacagcaaagcagctttgtacatgatgttctcaagacacagaggacaaaggagacaccgggagaatttgggcttagttgtgattgtgacatagacagaagactcttctgttctccaggaaagggcacaacagagaccaaaacagactttcagatggaggtgaccccaggagtttccttcagctcctgtgtcatgcctgcccgactgtagctctttaaaggtcacagacgaaccctaacacctcatgataatccattctagagcaacactgacaagtccctctttccatctgtgccacctccttggtggtgcaatttactactggcatttaggggccttgcctgttagttggcctatatttctgtttttccaagttccagggagctcaccctaaattctagtgttctggagttcagtgaacatgcacagtttaacctgctttactcttacgactttacagacaaactcgcatctccagttttgccagcctggggctattcacgctttgacttgatgcacaggtggcagcacccagtttctctgagcatcttgtccttctcaaaatgctattacatttctgacatgcagaactgaatgcaatgttggccatgtggaagtaccataattttgcagaagaataagcattggaatactattatctggatacagggatcaccaaaaagtaggtgcctaytgacagctctcctgtcttactcatcacccagaacatgyttgacacagagcagccacrccacaaaacttgtgaaatgagtgtctcttgatttcagccaccaggtgataaacatatatcaatacatacagccatacgtatacatatatgtaagaaacaacacaaagaagaccttccaaagttcaacactgtgttttttttcctctaagcaacattagtccgtctgctttgaaggagcttttccttcatacccattcctttgtctccattctaatcagtctaaaatctaactgcagcaatgcctcttaactggggctgctgtgtttgagatcttagccctccaatctgtcatgtatcayggatacgttctcctcccatcacttttcagctatttggtctttatcagtttaacattttgtgcacattcatctttctgccgctctgatctcatctcgtccccccatgcactcacctccaactgctccttgttgccccaagtccactcttggcagctggtattcaagactcgtggctgtaccttgtgaatctcaccttccaagattcccacacagaatctctactctagacagccctacctcttcagcacctcccaaacacaccttatttatttcccacttgagtgttcaacatccttttccctttgttctagtttcccaaatcctgcacaatcttcagggtccagctttggaagatgttttccactctttcaatgagcccaacggagctgcttttggaaaacaagatgactctaacgctgtgccagatgttaaagcaagcgaagttctgtaatatgaggtccccagaaagtgggccaaagctcctgaggttcttggggttgaaagtcatagaagaaaagcagtcacgccactagatgttgcctgcttgtatctttttggccctcgtcatgttctctctggctggcagacattattttattcttactacagccacaagtaatttatttattttttcaattgaaaaaagctgcttttaaaaatgcctcctggccaggcacagtaactcacacctataatcccagcactttgggaggccgaggtgggcagatcacctgaggtcatgagtttgagactagcatggccaacatggtgaaaccctgtctctactaaaaatacaaaaaaaattagccaggcgtggtggcgggtgcctgtaatcccagctactcaggaggctgaggcaggagaatcgcttgaacctgggaggtggaggttgcagtgagccaaggtcacaccattgcactccaacctgggtgacaaaagcaaaactctgtctcaaaaagaaaaaaaaaaaaatgcctgctgagctggagttaccaggttctcaaagctggtgtaaacagacacttctgcttgtggccagatctgtctggctgaatttgcacatgaaccggctggtgaaaagtcagtcagtgttacacattcacaaaagcagaggctttcatctgctcttggagtgaagtcttgttgcttacattttatcatttgtatgatacaaaacagcttttgttttcattaaatatgaggaaatgtcccattcaggggattctgcaaatgacaaagactaaaacaatgtctccttccttcccaaatctgtaaacacacaaacagtgatacagttgatacaaatggcatttggtgaccacagctggagtaagttcgggtggatgccatcatgggctccattttctcctgctagacaggggtgtgggtcacccatgccaggccttaggctggttccaagaaaggctttggagacaatgacagagcccactgccatcaggtggtggcaggtggtggtgggcagtgaggaggaacttctacagcgccccctagaggtggggggacacaaatgtcaggaaaggaggggggatccgacctggtgaatcagtttgcacctaaggatgctgaatccaggggaaagggacataaaagagtaacacagggagtaatatactatatgtgcacaccaraggtcccctttcttgatttgatatatttttggtcacagtaacactcaacttcccttcatacccactgatcatatgtgtgtgggtgcacacacatacacacacatacacacacacagacatacacacacagtgatatagttgatgcaaacagcaaaccacatttatatatgtataagatggggttggaaagagattaactagacaagaatcccataagctgttacataaaaatttaaaacagagtgaatatctcaatatgggaatggctgagaatttgagatatatcctaatcacagaatattatgcagtcattaagaagaattaaataagtctttagggttaactcaagggatttttactacatattgttaaatgaggagagagaagggcatagaatattccatttgttgaatcctgtgtgtgtactaaaaggtgctgaacacatcagtgtgaacaatgttagctaaatggataaaccagaaggagaaacagggagggaagagaatgatagcaaacaaacaaaagtgactattaaaagtaacgggttatttaaaaagtgagaattctattaaattatgtatatgtatataaatgaccaccaaaatgctggaggtgttatctcagggtgaaaaaattgcaggtgatttttatattcttccttatacttttcagcattttaacaggaaatataattattctataattagaaattactattttcattgagggaaaaaattaaatgattcgataacactgggagcatggaaaatgtttctgaagtcttcctagccaaaacagggcatacagaaaaactgtgcatcattgatgactaaaagaggttttcacaatcttcttcaaaatggagacagaccacaaagtccaaaattaataatcatcctaaatattttaagcatcttgaaggcagggcctaaatctaatttttaacacagtttcccaatggcttagtgtgctctgagtgctcaatcaatcctcattaattgacaaacacatttcgaatcctatgaattattacatcaaagatgctattatttgatatatgaatgctattaaaaagtaaaatctcatctaaaagagtatccaagccagagcagctccagtgaaaataatttaactatgaaatttaatctgctacaacagaagtaataaaaccctaacatataacaaaattggtctacctgctctgtttatattccatgcgtccagttttgttccctgcattcctacagtctcggggctgcctgatatctacatacccacctcagtgactgtccactcaatcccgttaccttctgtttcttacaagagtaatgacattagctaccaatcatcataaatcatctccaggccaggcccatcttcaacactctaagcagcttgttaaaattttgactctaacatgcaattgttttgcagagaggtacaactttttccttcttccaggcctgctttctctgcagggcagtgaaagcgcatgctgtgtggagagctgctcttgtaatagccatggaatagcctgtccaggacaacaggcaccaggccctcatggggtggaggtgggctatggctgctgcccttggaggccaggcacccacacctggctgtaggggcctcttgcatgccattcttttaaaactggcattaggcaatgtgaaaactaattttacacatctaacgttttcaagtaaaatacttacctggactagcaagtggcccgaattaggcaaaaatgtrccacatttcttgatgttctcatttatttgttttatcaaatttatcagtatttccacagcacctttgctgatcatttcattaagaaatcccagatttccagaaatgaactttatagaccccatacagtataaaaaagcttccatgttagtttgcaggtcttcacttcttagtacctccaataatgattctgtcaaaaagattaattaytataaatgtctgagtataacagctggagagaaatatattaaagcacttgtgtgtgaacataaaatacacttcgtaaaatatatttatcaaaatctacattcaagtgcttgttaagagttatatagtataagagaaaagcttacttttagctaagataartctctgtaatagtaatttcagcagaaggatgggattgttaataaataaatgagaaagtattcttttaattaatgtcattccttgcctcttactaattatttattgacctttattttttgttacaaaaattttgagtcatagaatactaataatttaacacatctaagagttaaacttcaacaagcctttaagaatatatttgtaactgtattcttagtgggaaatccatgaaggggcttaaaaaaaaatctcaatcaccctagaaagataacttgaatataacgcctatccttttcccaagacaacttaagaacatttattcaaataacataccactacttggttttacgagtaatccaggcaaatccaataacgttaataatgcatatctcacatttaattatattaaagtcaatgtaataatttgacataatttgttttcagtcgacaattcttaattagttgattcaacattagacatttctttcagtactggttttgtccctatctgccaggggcaaagaaagatgaaaagataatttatcctatgttgcaaaaagagaactcaatgtattttccatgttgctgcatggaaaatactttgtattttcttttcttgtatcagcaatattaattaataaaaagatttccatttaggtaactagatatcttaattacttagaagtacaacaaaaattaggcattagctagataaggtataataaaacttccttacctacaaatttgaaacatgttgatgtcaggtttctataacagttatagatgtctttcaacttttagtcatccctagtatattaaaagactaaaattttcaactatgtcaaatactattaaatgcatttttctatatattaaatccaagtccaggaaatgaattcttaaatggggaacactttgtaaagtcacataatgttactacaggtgttgaaggaaaagagcaaactaccacaggatgcattcaactgaatgtggaaaacagagaaggatgaagtaaaaatgagcatcacataacttctgcatgtttctagaaaacaaaatattcttgctatcattgattatatattttctctccagacttctaatttttactcaagtacagcatttgctcaatagtagcactgaatgacactcacccagaatgctgtcattttgaatcaaagaatcattcttctcattcctgctaattttaaatataagtttgcagacattaagaagattctttctactcactttaagctgcagagaaagaaacacatctctattgcagaaggaaataaagacatgctgtattaaaaaaaataaaccacatctatttttaaagtacagcaacagtatttttaaacatgaagaaaagttctaaagaaatcaactttgaaaaatttagaccacatatttgccaattgtggtatctaattaactcaattagagtaaacacaatataaattatctttagaataaacattttaatgacagatcttagcgattgtgaatactgtggaataaacataggagtgcagatatatcttcgatacactgatttcctttcttctgagtatatacctggcagtggggttgccagatcatatggtagctctctttttagttttttgaggaacctccaatctgttctccatatttcttacttcataaagtctctctctctcttttcttttttacagagacagggtcttgctctttcgcccaggctggagtgcagtgatgctgccatcacagctcactgcagccttgaccacgtgcgctcaatcaactctcttgcctcagccgccagagcagctgggactataggcttgtgccactgtgcctggctaattttttcaacattttttttgtagagatgttgcccaggctggtctcgaactagcaggctcaaacaatcctcccacctcagcctcccagtgttgagattacaagtgtgagccaccacgcccagccaagtctcatatttatatatgcgattattagttacttttaaaggagtatatgaggaagaaaggggtgcagtacactgttaataaatttgattagagtaattgcattaaaacacaaaagtagaggaagatgaataccaaaatttcacattaatttagaaaagaacacatagtagagatgaaggaaagaaaagaaagggggaaagttttggtcttttttatcatttgtataaaagaaaatttaaaagtaatactgcttaatttgataatatacatatatttctttttaaggtctatttctggaatgctttgagataatcacaagtaacatctaaagttgaaaattaccttctaggctgggcgcagtagcccacgtctataatcccagcactttgggaggctgaggctggtggatcatgaggtcaggagttcgagaccagcctgaccaacgtggtgaaaccccatctctactaaaaatacaaaaattagctgggtgtggtggcacgcgcctgtaatcccagctactcaggaggctgaggtaggagaatcacttgaacccgggaggcggaggttgcagtgagccgagatcgcgccactgcactccagcttgggtgacagagtgagaccccgtgtcaaaaaataaaaaaagaaaagaaaattctcttctaaatcatacaaaaatatctaagtaaattaaacatggggtgataaggaaatatagtgtttttttttttaaaaagcaaagtataggattactgacggaatcaaatggtctaagttagctgtgtatttatctaaagtagtaaaaaagaaaaataaaaaacatcctaagtatctaatattagggaatagtttattaaattgtgggacatcaatactatcatattaagcagtcacaaaaaagcataactgtgaacattatgtctaaaaagggaaacatttrtaacctactgttagatggaaataatatgtgccctcattacaaaggtgtaaaaatgtatttgtaggaataaggtcatctgaacaaaaaattatttctgtttgaaaaggatggcatataggtgattagtttattattaaaaactatctttaaagttatttaattaatttattttttgagatggagtttcactcttcttccccagcttagagtgcaagggcatgatctaggctcattgcaatctctgcttcctgggctcaagtgattctcctgccccagactcccaagtagctgggattacaggcacatgccaccatgactggctaatttttgcatttttagtagagacagggtttcaccatgttggccaggctggtctcgaactcctgacctcaagtgatccacccaccttggcctcccaaagtgctaggactacaggtgtgagccaccatgcccggctacgacatttctctctctctctcttttcttttttttcagagacagggtcttgctctttcacccaggctggagtgcagtgatgccgccattacagctcactgcagccttgacytcgtgggctcaatcaactctcttgcctcagccgccagagcagctgggactataggcatgtgccaccatgcctggctaattttttcaacattttgtagagatgttgcccaggctggtcttgaactagcaggctcaaacaatcctcccacctcagcctcccacattttattaatgagttttcagttactttaaaaaaataatagaatctgtcaggcatatttgttaagtatttgttctgtgcttgatccacaagtatttactgggcacctgatgtgtaccaggcgctatgctgctcactgcagaagacaccaaaacggccatggtcagccccmagctggaggggcctggggaggggagcactgcctgtggggcagcttctgcataccctcctgcactaggccacttacaaaagttattctggaaatttggtgttgtcgttcacactttgcacttgaggagtgcgtgcctcagataggtcacagaaccatctcagcatcacctgggcatgtattaggaatgcagaatctcaggccccccccagcactaccgactcagaatctgcattttacaagatccccaggggatgcatgtgcacagtgaagtctgggaaacactgttgtggaagcttcagaaactgtaacacatggcagaatggagattccttctgttcccaggaggaaaataggaaatgggaaccttaataaatgtttaatgattaggtatttaaaataatattgtttaaaacccccagaaaataagcgggcttaagaaaacagaagaacacagcggacaccaggactctaagatagcgtcagttgtaccagtgaaggacaagaaacttctggaggtcaaactgggggagctgccaagctggatcttgatgggggacttcagccctagtggcattttcggagcgtttcaaagaggttactactggtactacaagtacatcaatgtgaagaaggggagcatctcgggggttaccatggtgctggcatgctacgtgctcttcagctactccttttcctacaagcatytcaagcacgagtggctccgcaaatacsacwgaagrggacacgytctgcacccccccaccccacgaccttggcccgagcccctctgtgaggaacacaatctcgatcgttgctgaattctttcatatcctaatggcaattaacctccaaataaaagatgactagttaaaaaaaaaaaaaaaaaaagaaagaaagaaaacagaagaacatttctatattgatggaaatatatattattcctaatatctggaaatatatttgaattggttgactaccttctactagattgtgagtccttgaggtcaaaaccacaatttattactctttctatatgtagtatgtaggatgtgttccatacttaataaaacttcatgaaaaaaatgaatacaactcactttccttttccccaacaaatcttacatttttagtaaaaagtggcaaaggaaaacaaaacaaaacaaaaccttgtatcagagttttcattaaaacaataagaagaaaaaacaaaaatgaaaacaaagaaaagaaaaaagacaactacaayttccaggcctgctataatgtcaatttacagtcagtgcaaatttgtaccgcttctccattgttaaccgtaaaattatgactttaagacataaaaagataataaaatcttacatttatgcaagggatgtagacgatcttattttaaaaattccctgttactctccctttcctttgctctgctttatttttctcccttagttctcattatctcctttggtacctgctgtgtttgctgtctgtctgccctgctactgtggcaaccccagaggaaggagctagtttattcacttgtattcccagtgtcaagaggagtctctggccaggtgcagtggctcacacctgtaatcccagcactttgggaggccaaagtgggagaactgctcaaggctaggagtctgagaccagcctgggcatcatagcgagaccccaattctataaaacattttttaaaaattagccaggtgtggtggtgcatgcctgtgrtcctaagctcctsgggaggctgaggcagaaggatcacttgagcccagaatttgatactgcagtgagctgtgatctcgccactgtactccagccctgggtgacaagagcgagatcttgtctttaagaaaaagaaaaaaaaaaaatgttggcacaaagtaggttcttgtggtagggtagttttcttcttatgttaaaaacagtagtttattctatttaaagtaaatttggcaaattaaagaaaagtaagaaaagtttaaaatcactcatactagtaccactatatagcatcacagttggtaattggtatttcttttctttttttaccctgtacatagggcgctagattttttccctcctaaatatagtcacattcatactgtatatatttgtttgtactcctttaaaaaatcttaatatagtaacatttaagcttatatatttttgtatattattttgtaagagtttctgacacaaagattaaaattaagatgactgtctggaaaactttcatttgccagtatttgccaataaacaggcagagagaagttgtaaaaaacttcttagtcccatatagctttagtttttgctgattttttcttcttcaacagttcttatgatgtagtcttttaacattttacatagaaccgcatcaccaaggcctaagctaaacaagatcttgtctggaatgttacaggagatccaggcagtagatgggaagttggccttgatggatttgaaggtcccttctgaactgctggttctgtagctagtcagaaggcaaacctacccagctctgcactctggagtttagcctagcatcttgctcctgattcagcaaggccgtcaatgtcaccaagagggctttatctaatcatatgtttagttcaaaacatgttcactgcctggcagatcacttagccttttgccctaaaatagttaaatttgtgtcatatatataattaatttgaatgacaccattaataaccgaaataatatttactctgcaaagcattaaaataattcatgttccttccttcctccttcctttccttcttgctctttctttctttttttttttttcctcactctttctctctttctttggcttggtatggaacaaaatgtctaggattcagattaaaatagcaaaggcaatctttgggcagctgctgcaccgccagagccctggagtgatatcactatttcaaagaagtattgctttcttgaccacatatcacaatttttaaaaagagagttaatagtttgagagctgaataagaatgtagcctccccctgatattacatagatayatgctcagaaaattctgctttatgaaagacttcattatcagaataagaaaaggtggcattcttattaactaacagtaagtacgccaacacttaccttcactgtgtactgtaagattttaaattctgtaaattatggggtgttagcacaaagcttgtacttgtatgaaaccaagaaaacaaagcttcattcatttgttttagcggctctcttagaacattctataataattgtggcttatcttttggttccaactgtttatggctgtgacaacaaagtgctcccctcaaacagtgatatcattttgtttgagacagagtttctacagactttttttttggtgtctggccttttyttctcacaccttgtgaaagccttctatgaccactgaggtaccttcctgtgaccacacgcagctgtatttcggtttcacactggttcctaaagcacctgatttattatgactgtggcctaaattacttagttatttattaaatcatatgacagaatcaagcatccaagagaaaccactgcctgcaccatctgctactgatctccagtcaagttatttgagcaaccattttgaatgtatttgcctacggttatttctttttctttctygcctttccttccttccttcttcttcttcttttttttttttaacttagttgcagtccaaaaacgttgagtttcttttaacattttctatgtactcagccttagttccttagataatatttcctagtcaaattctgagatgtcagtttattaccttaatttttttccaagattctaaacaaatacactgcatttctaatattctttgtaatatttaaaaataaagcattaaacaaagcttttatgtgatatagtctactagaccagaggaaagaaaaacttactgctagaattatttttgcaagtttaaggctgagcgagtctgaaccaacatcaactagtttacacagggtcttcaggagaatacttcttcccttaaatttatttccaagcatgtttccttcctctaaagcatgatgaagttgtgtgcaagcagcacaaaccgtttcaatgttttcttctgtcagagcaaagagagtaaagcaacacttactaattaaggttaagtttccaagtgtgtcaaacacagacagtgtaagtaaaaaccccataattatttccttggatatcttcaaattcctgacctctatttttttcttatcttatcacttccatctacctgatttttttcatccctttgatccatctcctaccatgttgacttattgcttatcagtcattagcttatctagaatacacagtctttcaaagaggtattgaagaatgggactgctacctgcttcagttggcctcctttactccagatgccctccacctcagcccgtgatctgctcagtctcacagatgcatgccacttgcatcttgaccttcaactcttttttgcatagctctactggcctaaaatgttctccataaccctcattcctactgtttttggtccttcgaggctctgtttatgttgtagctgcttcagaaaagatgcactattccacattcaacaaacattaccttaggttacttatttttcatgtacgtatgtgtgtgttgtgttatatgaccagtgccctcaaatagatgtcatactaagtgagccagtcttacatttctttctatcaatagcacatggtacagtgagaatattgtatagaatactgtatatagcataacttcacacatattcattttctaatatatctgttgacaaaaacaatgatcagtattttcctatgagaacaatgctcattacctaagaaaagagggttctaatagaacaaaagcctgaaatgtcacaaaatccaccattatctggaggtggttattaaaaaacaggagaataaaaatatttttgtaaatccagcactttgggaggccgaggtgggagggttgcttgatgccaggatcaaggccagcctgggcaatatagcaagatcctacttccaaaataaaataaaataaaaaataaatttaaaaaaaaggagagtattttagttaggaaacagggagatcttgaacctttcatcttataattatgtttgtgaggaaagtaatacctatatttttttgagatggagtctcactctgtcacccagaccggagtgtagtggtacattcttggctcactgcaacctccacctctcaggctcaagcaatcctcctgcctcagcctcctgagtagctaggactccagacgcttgtcaccacacctggctaatttttttatttttggtagagatggggttttgccattttgcccaggctggtctcaaactcctaatctcaagtgatctgcttgcctcagcctcccaaagtcctgggaatgtaatttttggaagtggcagccacactaattgtcatacaaagaagaaaaatagcacaaaaaaatggaacatgaggggaaataaaataatctaatgtattctgtcaaataatattatctctgatagattccttcatgaaatttaaaagtaggaaaccaatcttaaataaataccataatgtgctyttagaagcccacatagaggaagtgtgtgcctgcagaaggaagtgactcaggccatttttagctcttttcaacaataacatctaagaaaaaattttaaacctcaatagctaagtaaccttcaatgtcttttggttatgcacttaaatgaatgaattgatgggaaatgacttagcctaactttaaataaagggaaaaacctgaactcctattgtatgaaacacttgtgttttgttgttttattcttctgtgactggcagtttctttacaaaccctaagtccaggctctgggccactcattggcagtgggtggtcctcaaagtattttctaagacttccttccacaaactcttcagcctggtaggttctactcaagaatacttgtttttagctttaaaaaggggttagaaagaaaggctcaagggtcaaattttaaactattgatcaaatcaatcctttataccaaatagtttgttataaatgytctatagcttcaaaagacaacttgaatctacaaactatcaagatttgcaaggggctaaatctagtgggtaaaagtttgattgtaacagagagtaacataatctcagagtaacttctatccccaagatatgtattcattacaaaggaaagaataaaaacctgacagtgggtacagctgtgggacacgaccagcaacagaaygcatcagcatcgtgtactcctggcaggaggtgctgagagggacacagcagcactcatgtgctctgcctgcccaagatgctaacctggagctcatcacgggaaaacatcagacaaacccaatttgcgggacagtctgtaaaatattcctcaaatacatcaagatcacgaaagagacgtgacaaatgatgagaacttgtgatccaggcttttattttttctacaaaggaaattattgggacaaattggcaaaatttgagtaagatttttatagtattgtatggtaatttccagatatataagagaatgtttttgtttctaagaaatacatgccagccggctcagtggctcacacctgtaatcccaaaactttggaaggccgaggcaggtggatcacttgaggccacaagtttgagaccagcctggccaacatagcaaaatcccatctctacaaaaaatacaaaaaattagcagggtgtggtggtgcgcacctgtcatcccagccactgaggaagcagaggcacaagaattgcttgaacccaggagatggaggttgcagtgagctgagatcgtgccactgcactccagcctgggcaacagagcaagactctgtctcaaaagaaaaaaaaaaaattaggccaggtgcggtggctcatgcctgtaatcccagcactttgggaggccaaggcaggtggatcataaggtcaggagtttgagaccagcctggccaatatggtgaaacccctgtctctactaaaaatacaaaaaaattagccaggcatggtggcgggtgcctatagtcccagctactcaagaggctgaggcaggagaatagcttgaacctgggaggcagaggttgcagtgagccgagattgcgccactgcactccagcctgagtgacagagcgactgtctcaaaaaaaaaaaaaaaaaaaaaaaaaaaaaaaaaaaaaaattccttctttcctgtaggaaggcttcctacaagaaaggccttcacaatactgactcagtgtccccattcaatgttgtgcaatatattttcttgtgtaacccttatccagactcattgttcttctcactagtgtttgcacatatctcctgaaataaagggcccaaagctaacgtggcacgctaagatgagggtgaacatagtaactctagaggggaaaaagtcatcacattcatatccttaggactttgggctgcagaagcctttggagataacctaatctccacytcatctggcaggtragaacactattgcacacagagtctaggtgactcctcatggccatacgcttggcgagtagcagcaccgggaccagaaccccgtccagggctcccacattaaccatgaacacagccaagcaccaatggggagcagaggaggggtgaggtcatttgaacytttcagtaatcaggtcttttgcagcacatctctgtttggttgctggggagggttcatttaccctgcttctcttagagcatcttcctgtggctaccaagctggtttgctcatcaacaactcctagcaaaggcttactgtgcactgtgtgccaggccctgggctctccctagggctatgaccactgctccagaggagcctggttaacttcagaaagagaatccttgaggagctagctgcaaagagggagaaagtggagggccatcccatgacacgctttccctacccttgcagggacccatcgatggtgggccttcacttctggggcagttcagagcgcaagggtgggacacatcccaggccatttcccatgctgtgggtggcattcctgacggatgtgctcccttcaagagagtaggacagataccagttggaccaaggaaaccacgggcacacctgtcaaggacgccagtttatgagactcagcttccaagcctgaaatctgttttaatcttttactttcttgagtatgaagagccacctgagagaggttaaaccagcatttccttggacagaggaaatgctaattaatttatattacaaagggaagttttagaaattggctctcttggtgcatttaaagcataatcttactaaaaattatgtgtgcatgtaatatttaacacacacagggtaaataaatagatgacttcatttgtttttgaacatgttcacagaaatgatagtgaaaacttactaaaaatatcagggcaatggggaacacataaataactacaggtatttttwaaaaaaaaaacaaaaacggttttttgtttgtttgtttgtgttttacccttttctaattcacgcaaaatcggtacaatccttgtattccaaaagacttcgtctacttctatttctgcgtcctcttcttgcaggtcagcttttgggactgcaaaagaaatccagagcaggagaaaaagctatgaaaaaggagttgtcaygaagcatggtcaaaascctttactattcatcactacaattaataaactagagaattaaattaccctttgctctccaagcctgactatttctcattagaactacaggtcttctaatcaaattaccccaaattaaactcagactggataatgtaaaaaatcagaactttaaaatgtgatctggtcacttcataaagtagtaagctttgtaaatactgatgactgtcagtaaggcaaacagttttgagtacatttttacttaaacttatccctctgtaatgtagaataggtaactatagatatataaagaataaggattttaaaaatgtgtaatgaaaaattttctaaaagggagacctaaaatggacattttctatagaaataaaatgtctacactaacatggggccagtagcattaatgccaagtgattttgtgtggtgtagcagaaaagcctgggccttcggggctgacaaatctcaattcaaatcccaactccactatggacatggtgagtgatggggtccagtttcttatccttcctgagtctctgtttcctcatcagcaaaacagaatatttgccttcaagggtataagaattaaaagacatggtataggtaaagctctgagctcagtgccaagcctttagcaatatacagtatataattaatttcatttccctgattaaacaagtatacaaacatgttatcacccctgcagtatctcatgcctgtgtgatactaccaagccatcaagagtagatgctgcctgtgaatatgggttgtagggaatagcaaccattgactgtgtactctagatgcaggaggcctccatttcatttttgcagtaacactatgaggaggttcccaaactgtctccattttgcaagtgaagaaagtggagcccaggtgtattaagttatctgcctggggtcatataactccccagcctctgcatttgacctcaaagctatgctgacttgcagcaaactagccractaaagggtaacactggggggaaatgtaactcatattagaaactgcaaattatgattatatttcacacaggcagtatctcaagatctaaaacactgactgtagctagaggtggctttgctgtgctgaggcattactgaatagtcctgagatgtattcctcagtctctcttctctgaagaccaccccttaagtcctttatccggcacttggtctacatcaagtcagggagtccatgccctctcggggcagggtggacctggtaccaattaagtgtccacacagaagatgcctggaccctaaaaatgtcacacaaagagttagaaatcaggaaggatcggaaggtgagaggttggaagagagagagagagaagagacagagaaagacagagagacagagacagacagaggagcaaacgggtatatggcccatgtattttcaggttactttgcacaaaggacaagttgagcagggggcctatcaatagcacaggtttggagtcaccatctgggtttgaatcctagctctgccacctactagctcgttgactatgggcaaattgctttacctctcttctgtaaaatggggtaacaatggttatctctaaatattgggattaggattattaatttcttttatgcgctcttctgtattttccaatgcctctaatgcattcttattattcttgaagagaaaaatatatacaacacatattgaatgtgtgtaataccttagtaaatatccatattaatattttttaatattaatatggattaaaataaaattctctgcatcaagaaatccaataaagtcccttgatgattatctgtgaaaatagcagagaaatccatagataacacataatggcatatatttaagaattcatttgaattcagagatgtatttgaattctgacatgaatcctcaaaccatcaaatggtgctgatgtcacccaggagaagcagggacgctgtgcaatctacctatcccacccaacacacaggccttcccattatactacatgstagaaatggccactcccagttgcagcaagtccaggcttgccttttatcaacccttcccactgccaagagcagctgagccacacagggcatccaagatcacctaagcagcaaaagtaaatagaggttgtcaacaaagctattattaaacatttgcagtgcagtaaatagccttaatagcaaggtttcagataatctatctaacccaatgcaagacttcaccatcagatactaaattgaattgtctttaggacaaattagtccacatcagtacagattcacaatcccttatccaaaacctttggaatcagatgtggtgtgggatgcaggaacatatggattttagaaagtcaatatggtatacacattgcatattacgtaccacccctgtagggtcttctgcggcagcaccctgtagcaaaatatatgaatattcacaaaaccaagactctaactgacttcccatcaggctcagggattctggaactacagatagtttgtagactaccatctcaatcttttgggtcattgtttttatgaatctgccttaactttgataatttatggatatggaytctaaaagtaaacatgaatattcaagtaatacaaaaaacatacttgctcatatttgtggataactaacctattcaaagtccaaagtatataaaaaataaaataaaatcaacattatcaaggyaagtgaaagccagaaaataagtcaggcgagttatttaattgatacatatttataacacacttaaatttactagaaaccagactttgagtccaataagttcaagtctgcattttttacctcctatgcaatatgctgcttaatagagaacttctatgagaaaccatgactatcaacctgtttttcaggacaaataaaatggataacttattcaccccagaaagagctgaattataggggtgaatcagaaatcacagaacaatttatttaacccttacgggcccttctgaatgtttctgagatttgcttcttctcagaaccaaagttactcagtcactggtatgagggtttccttccaaccctctcccaggaatttcaaagggcacagttgtgtctggctacagcctttccacctcttcattcacgctgggcctcctcctgcctccattttatacacaatccctgagttactctagaaaatgaagcatggaatcatataattgctttttaagatacacacaaacacacaaataataataaggttgtttcaatcttgggcaacaatctaatattttagaaagcactttcatctaggttcacagtttgctaaatataaacattatgattcaacaggaaattgggtaagtcaagcaaaaatttcagcatgtttttgaagattttgctgtctcagtggttatagttgttaaccacagctttgagttctggacacaaaaacctgacacaatgtttggattggctgatgtttttagcacgtaaatgtaaaatccttagcaactatgctggctcagaaattagtatatctaagattttcctgagtaaagaaattcccaatgacacagaagtcattttattgataaaaaactaaattttgaagataagaatttttaaaatctactatttagtattgtaaaatctcatgggtacaaaaatatatgaagaatataacagacatcagtgtaccccacactagtttggtcagatattaacattttgccatatttttatcctttcccttattttaaagaaatgaaacattacagatatgtggctccctgcatccattcccctcctcctctccctctaggggttaccaccatcctaaatccactggttactatgactacacttgacttcgcatgcttaccacatggctgtgtatccataaacaatatatgtctttgcttttgcaacttgtttcatctcatattatgtttgtactgaatttactcaatattacaatattacaaaagcccatgagttcacttttgtgacaactatattctattgcatgaatacattttgtatcatttctagactgtggtttatrttgttatatattttctcaaacactttaaaggcccaaaggacggtcttaataaagttaatatagtttcatttaagtgagcaattatctttttttttttttttttttgagatgagtctcgctctgtcgcccaggctggagtgcagcggcgtggtctagactcactgcaaactccatctcctgggttcaagtgattctgctgcctcagcctcccaagtagttgggattacaggtgccccactccctcccaccatgcgtagctaatttttgtattattattatttttttttggtagagatggggtttcatgatgttggccaggctggtcttgaactcctgacctcaagtgatccgcctgcctcagtctcccaaagtgctgggattacaggcgtgagccaccatgcccagccaagcaatgccttgaactcaagctttgaacccaagaactatgttaatgtcaagttttgcaactttccaaatgcttttacaaaatgatttctataaaaccattaagactgtcatctaggccgggcgtggtggctcacccctgtaatcccagcactttggaaggctgaggcaggcggatcacgaggtcaggagattgagaccatcctggctaaaacaatgaaagctcgtctctactaaaaatacaaaaaattagccaggcgtggtggcgggcgcctgtagtcccagctactcaggaggctgaggcaggagaatggcatgaacctgggaggtggagcttgcagtgagccgagattgcaccactgcactccagcctgggcgacagagcaagactccatctcaaaaaaaaaaaaaaaaaaaaaaaagactgtcatctatagatgtttgaggcatcagagttgggtagtggtaagatggtaacattgtatgaatataataaaaatgtataaaaataaatgttgatttgtgaccaaattggacaaacttccttaagtttccagtggccaacatagatatcttcagtgcaaacatctttccttcaagtggagatgctgtagatgaaggagtgtggggacccctcacctgctttggtttgcagcctgctcaggtctgagctactggggcatgatgaggccctcgcatgtctcttcccctggtccctaggaggaatacataaaacactcagcgcaaacatgaaaacacttctaattttgtaaatgacaagagtctgctatatacagtttcttatttattattttgagataggtctcactctgtcatccaggctagagaacagtggtgctgtgatcatagctcactgcagcctcaaactccttggcacaagtgagcctcccaccccaggctcccgagtagccagaactacaggcacatgccactatgcctggttatttttaaaaaatattttgtagagacagggtctcactatgttgtccaggctggtgattcctggtctcaagtgatcctcctgcctcagcctcccaaaatgctagtattataggagtgagccactgtgtccagccgatatacagtttctgaagaaaccatcgagaattgtttaaaagatggggtttggtgctctatatgtgggttttttttgtttttgtttttgtgtttttgagacgaagtcttgccctgttgctcaggctagagtgcagtggtgcgatctcagctcactgcaacctgcctgagcctccccagtagctgggattacaggcacatgccaccatgcccggataatttttgtatttttagtagagacgggggtttcgccatgttggccaggctgttctcaaactcctgacctcaggcgatctgcccgcctcagcctcccaaagtgctgggattacaggcatgggccaccacccctggcctctatatgctgctttaatttacctttgatttcccggtaagatttatctttttaaaacaagtcatatttgcctaacaacatgaaatacagttactagaaagaacaaaaaatccagtttactttgcaaatcaaaacaaaattggttaaggatatataccacaaggggtcactgttacaataagaaagaactctgggatgcttggattacaaaagcttagcctttgggagctgggaaagacctctgtctctttttctctcttcctcccttccccgatccctgcagataaagaaactgtcccagctggccagatgtgcccaaggtcacacagtaaagacagatttggaacttaggtctcataatttacaaatttgcttctctttccactacataaaaatgtgccctgattccatttttaaaattaaattaatattctctgacaatatttatttttagaaatattttaaacattaaaaaactgaaaataaatttggacagtccccagatgataaatattttgtattccaaataaaagagcagtggctggccaacagcaggattacatgctcaggtttttaaaaagttttatttaatgtagagaacatctctgaaggatacagcttctctttagccagagctgacacttagaagtacttacttttaaatatgtgcacaaaattccaaggtaaaaaaacaccaggaaaagaagagtgcaagttttatatcaaaatttctttttgtccatcaaatataatagttgctccaaaaaactcacaaagaaggcttatacatgtgatagtccctgtgaacatctgtatgtgcccgtggcttctccttcctgtgtagtgagccccccagtgactatgccatgttgcagcttagcccttggcctttcctaccgccctgaagattagcttctccaaataccattttttacttcattaacatgttccccccaccttttttttttttttttttgagatggagtttcactcttgttgcccaggctggagtgcaatggcgtgatctcggctcaccccaacttccgcctcccaggtccaagggattctcctgcctcagcctcccgagtagctgggattacaggcgtgtgccaccatgcctggctaattttgtatttttagtagagatggggtttctccatgttggtcaggctggtctcaaactcccaacctcaggtgatccgcctgcctcrgcctcccaaaatgctgggataacaggtgtgwgccatggcgcccaccagccaccccattttttttttaaacacttaacacttcctttaatcataaaataggaaaaagatgaagtcaattttccaaaaattgtctaattaatattcagaaataactgctttatttgtacataataaaaatacgatagcaaatgtcactagccaatcgaaaatggctacggggacagggacctctcaaagaaggcagaaataaaagaatcaaccttgcaaaaaggtaaaataccaagtttgtcagggtgtggagccaaggaagttctcatatttatcactcctagaaataacaagaaggtttgagactagggacaaggccttgctttcaatacatacacctgccctacacaactattaaaatcaagcaagatacttttcaactaatgggcttccaaagtcactggtccactctccctcaagtcatggtcagtgatgaggttgcctacataaataccacacgcatgtatccccacttctaggggaaaaaatgaagtgtccttcttatatgcaaatgcttagcagtgctgggtctcccagttctcaagcagagcacagaactaattaactcaagatggattaaagacttaaacataagacctaaaaccataaaaaccctagaagaaaacctaggcaataccattcaggacataggcatgggcaaagacttcatgactaaaacaacaaaagcaatggcaacaaaagccaaaattgacaaatgggatctaattaaactaaagagcttctgcacagcaaaagaaactatcatcagagtgaacaagcaacctacagaayaggagaaaatgtttgcagtctatccatctgacaaagggctaatatccagaatctacaaagaactaaacaaatttacaagaaaaaaaaatcccatcaaaaagtggatgaaggatatgaacagacacttctcaaaagaagacatttatgcggccaacaaatatattttaaaaagctcatcatcactggtcattagagaaatgcaaatcaaaaccacaatgagatatcatctcactccaggtagaatggcaatcattaaaaagtcaggaaacagtaaatgctggagaggatgtggagaaataggaatgcttttacactgttggtgggagtgtaaattagttcaaccattgtggaagacagtgtggcaattcctcaaggatctagaaccagaaataccatttgacccagcgatcccattactgggtatatacccaaaggattataaatcattctactataatgacacatgcacacgtatgcatattgcagcactgttcacaatagcaaaaacttggaaccaacccaaatgtccatcaatgataggctgaataaagaaaatgtggcacatatacaccatggaatagtatgcggccataaaaaaggatgagttcgtgtactttgcagtgacatggatgaagctggaaaccatcattctcagcaaacacaagaacagaaaaccaaacactgcatgttctcactcataagtgggagttgaacaatgagaacacatgaacacagagaggggcacatcacacactggggcctgtcggggggtggggggctaggggagggatagcattaggagaaatacctaatgtagrcgatgggctgatgggtgcagcaaaccaccatggcacatgtatacctatgaaactgcactttctgcacatgcatcccagaacttaaaatataattttaaaaaagtaataataatgttagaaataaaaaaagagcacaggactggtattaagtgctgttctacgtgatccttacgttgtggtgggtatatgtaggttctgaagccaagctgcctgagtttgggtcctgggtctaacttttatcagcattgtgatcttgggtgaactacttagctttggtttcctcatcattaatttttttttttaaatagagatggggagcttgctatgttgaccaggctggtctaaaattcctggcctcaagcaatcctcccatctcggcctcccaaattgctaggattacaggtgtgagccactgcgctgagcctggtttcctcatcttaaattgaatgcaatgactctgcttagtacactgactgacactggaagaacttaataaacagattaattttctctttccttatgagtcagtaatcacttgtctaagcagtccagagtcaaatcttattgagctaaagaatgtgcatggcattgccctgatgaagtttaaaatctactctgaggaactaagaaaccactgttttttttttttttttttttttttttttttttttttttttgagacggagtctcgctctgtcacccaggctggagtgcagtggcgggatctcggctcactgcaagctccgcctcccgggttcacgccattctcctgcctcagcctcccaagtagctgggactacaggcgcccgccactacgcccggctaattttttttgtatttttagtagagacggggtttcaccgttttagccgggatggtctcgatctcctgacctcgtgatccgcccgcctcggcctcccaaagtgctgggattacaggcgtgagccaccgcgcccggcccggaaccactgttttttaatggaaaagtccaatagagttgttaataaagtactagaatgtgaaattcaacagattgtaagaactagagggtgctaagaaggaagtgattagtgagtgggagaagtggactacaaaatgggccttaaaagaataaaagttggccggcatggtggctcacgactgtaatgccaccactttgggaggcctaggtgagacgatcacttgcacctaggagttcaaggagttcaagaccagcctgggcaatatggcaagactttccctctaaaaaaaattttaaaactatctagcatggtggcacacacctgtagtcccggccactttggaggctgaggcaggaggatcgcttgagcccagaaggtcgaggctgcagtgagctgggattgtgccattgcattccagcttgggtgacagagtgagaccctgtctcaaaaataataacaggcagggcgcagtgggtcacacctgtaatcccagcactttgggaggccgaggcaggcggatcgcctgaggtcaggagttcgagaccagtctggccaatatggtgaaactccatctctactaaaaatacaaaaattagccaggcatggtggcgggcgcctgtaattccagctactcaggaggctgaggcaggagaatcgcttgaacccagggggcagaagttgcaatgagccgagattgcacacttcactccagcctgggtgaaagagcaagactctgcctcaaaaaataataataataaaagaataaaagttaaaccagcaaatgacaacactactctcagaaggggaatagcatgagtgaaaataaagacaggcataagcagactgatactgagggcaggggataagtgcccagggcaagtaagacagtcatagaaggtttccatgggtttactcaacccacactatgggctgagtaaatgaatctgatttgacaggcaataaggaactgtcatgggttcttatacaaggaagtgatgcgatttgggggtgtgcaatgtcaagagtatttaggagacttggagagaaggaacaaggactaatctgagggtgacagtggaattggagaagaaggaacacattcaagaggttccgtaagtcaagggttgacaggatttcaggcagaggaaataacagaatgtagccatggaggaataggatagcaggggaagcctaccagggtttccacacagccatagagctgaagtcccacagtaagactgaatggggaagagaggcatcaagaaaagaaaatcactccgttaaggagaaaaggaagaatagatggacttatgtactcaaaagaaatctgtttctctgtaaattctgctcattggtcttcgttctactaattggaactgcatgaaacaaatctttattctttttctycttgataatcctgcacatatttaaagatgttgcattccccacataaagtcatctcctatggtttaaatcccatggtccgaccacttacagccgtgtgacctcgggtaagttttggtttcctcatctgtagaaaggtgtggtaaataacactatcccccaatgtgagactgttgtgaggactaaatgataggatgtgcgattgcttggcacagttccaggcacatggtaactaatacatgtttactattatggctgtggtcatcactgatgtcatcagcaaactcctccagtcccttctactgttcctcacatgatgcggtttcaaatctcttccaggacaatcagttactcaaagtgagtgttcgcttgtctggatcccttttaaagtctggaacccagcactcagccaaaggtagtatggcttgaggacagagaggagatgttctacgtaacgctgcagcctaaaatgacattagcggtttggtggtcacgtcacagtggtgggtgtctctaatcttttcctgcatgttcactaaggcagattttcccatccaggttgggcctttgcttgttcttcctaaattccacagtgccgcatttggcaaagcattcctgcctatcagatgtttttggatcttgattcagtcatccagcaaaattgttcttcctagtttcctgttccatattattaaagactgtaattaaattttttgcaatgatttttcatgtaccaaaaataatttcagaagttatttcttaaagctcctctgtgaaattcttcgtacaggcagattggcactgttttgttctttatgatatcttgatcgacaaataacaaaaacctaatttcaatggatttaaacaataaatgcaatttattgactcacataacctgaatgtggacaggtagggtgggttttaggcatggtgcaatcaggcctttggcggcatctttctgcgattctctcagctctgcccttccctcagttccagctgtaaccaggttggagttctgattaaagcaaaatgggtctggcattcccaggcctctcctcagcccacatgtttaagagcaaaagcaaagtcttctcttgcaatcagtgaggagggtcctacatttcactctgaacagccagaaccaatctgtggctatggcactgctacacacggactgacttgagttaccactgcccatccatgagtcaatcatgtggacaatatctacttttggaccacatgcaccccaaagaaatacaagtatatttctttaaaaatactataaaattagccaggcatggtggctcacatctgtaaccacagcactttgggaggcttaggaaggcagatcacttgaggtcaggagttcaagaccagccagcctggccaacatggcaaaaccacatctctactaaaaatacaaaaattagctgggggtggtggcgtgtacctataatcccagctactcgggaggttgaggcaagagaattgcttgaacctgggaggcggaggttgcagtgagccaagatcacaccacacaccactgcactctagcctgggcaacagagtgaggctctgtctcaaaaaaaaaaacaaaacaaacaaacaaaaaaaaaactataaaattcagactttgctataattctgacagttcttctaattattatgactaaggttctttagtcagaggtcagcaagctttttccctaaagagctagataatatatattgcacactttgtgggccaagtgggaaaatccaggtactacatggttacatttgtaaccatttaaaatgtaatgatttaaaaaagtgtataaaccattattagctcaagggctgtaaaaaagaaaaacaaaacaaacaaaaaccagatggatggccagatttggctcctgggctgtagttatattgtttgtttgtttgtttgtgagacgagtatcgctctgtcgcccaggctggagtgcagtggtgtgatctctgctcactgcaacctccacctcccaggctcaagtgattctcctsccacagcctcccaaaagtagttgggattacaggcatgtgcctgtaattagccaccacacccggctaatttttggatttttagtagagatggggtttcaccatgttggacaagcgggtctcgaactcccaaccacaggtgattcgcccaccttggcctcccaaagtgctgggattacaggcgtgagccaccggacctggctggctgtagtttgtttattcctactttggaggaataactaaacaaatattaagaagtagattaaacagaaggatttggaatgtttaaaaagtcaataaatttatttccattttggaaaaaatgacgtaaggaaattgtaaaggatgcttatggataagagaaaatttagcaacttttgaactaaacttatccttgccataagaaaaagacacttcgtttttcaaactagattcaagttgtgtaggatcaaggcaggtagtaaatgttttaggctttgtggccacacagtttctgtcataagtactcaattcttgctgcagtgtgaagatggccatggacaataggtaaaagatgagtgtggctgtgttccaatacagtttatttacaaaaacaggcaatgggctggatttagctcatgggccttagtttgctgatcctgctttatagtctcttccatacttcgactgcaatttggtaatgccaacagaggggtggacaatggagggagggtcccctcagcatgtttcatagcctaaagcactagatatacagtttccagacagattatcactttttcttttcttttcttttctttttttttttgygacagagtctcactctgtcacccaggctggagtgcaggggtgcaatctcagcttactgcaacctctgcctcctgggttcaagcgattctcctgccycagcctcccaagtagccgggactacacctggctaattttttgtatttttggtagaaatgtgatttcaccatgttgggcatgctggtcttgaattcctgacctcggcctcccaaagtgctgagatcacaggtgtgagttaccgtgtccagccagattatcactttttcttaattactaaacttaaagcattctacttaaacagctatacacaaacacttgaaattaaaggacatggttttaaagggatgtctgtaagatcaaaattttaagaaagtcctccaaggtacttaatagtgttggcttgggcacaagactaaaatacatacacacacacacacacacacaccccttggcacctttttyaataatcactaactggttattattaaagttctatatatatatacacgattagatatattgctttgtagctatccatgttagcttaacttagttaaccttaaattcccttagcttaaaggctcatggtttcatactccccttaacattcaaagccccacagtttcaaggtactgcatgtgaaaagcccttgtaacttgtcagtgctgtacctgtgaggatttcgttcagtacagggagcagtggctgtgactggcctcttctgcagcatgctactgtgttaaccagtgccatgcagggttccatctctgctttccattctgaatgccctggtgccgtgctcccttcacaccttacgccagaactgctacaacagcttcccaatggcttcctttgtcccaggctctcctctccccattcgtccttcacataactgacagcgaaagtcacctctcagtggtgcacctttatttaaacaatggacccacatacctgggagtagcattgaaggccatctgtcatgtgtccctaacttcccttccagacatgctgctcagcgctatggcttgcagcctcaggatgcctcctgccactgccacgtcaaatcccacttctggcttatgctcctcctttagccaagaacacagtgctccatccctcacgaaaatcaaccttcaaaatgcacccccaaatcccaactactctaggaattttcccttgatcctcaagtcagaattagctgctctgacctctaaattttcagtataccttctttcagttcccctttctttcctccagcatttgagttcatctttgaacagtgcttctagaccttgtgtgtgcattcaaagcacttggagatcttataaaaatgcagattctaatttggtaagtctggggacttacatttctaacaggctcccaggggatgctgatgctgctggtccagggaccatacttgagaagcaaggcctgacacgctggtaagctcttcatggacagggtccactcttctatctctcaacccctcagcacagggcattgcttaccaggaaacgcttatcggacagaaaggagggtctctacaaaatcaggccaatgtctttgtcttttccaaatggaaagtttctcagccacattgctcttaaaatcttaaaagaataatgacttcattgtttttgaaaaaatgatatatttattattttttaaaagccaggcaatataataaagtacaaagaagattttaaaaaaattatccaggatcccaccacccagaaataaacatcataatatgtggtcaacatcattccagacatatttctgcagatgttcagaggaaaagatagaagaatgaaagaacagaagggcaggagggagggcaggtaaatggatacatataaatggaatcataccatacatgttattgtagtgaaaaagcattaagtataaactttgcttgaacttaacaaagaaacagaaattgaggtgaaactgaaggaattgtagaacttcagatgaatgggtcttcacaaagagagaatagtttctaaaagatctctctaaagttaagaaaaaagtaatgaaaaacattaggatgctgaaatcattattttttcaactatatattkcaatttcagactttagctactgacaaatctattccccattatgaaagtaaagaaatcagtactcacacttcctcccaagtactggttttggttatttatattactaccacattgtcaaggtttctgttccataagcagagttgtttagttttaatccaatacgaaaacaaaatcattactgtactcaccatgaatgcttttaccatagcttcttcatttctaggttttgaattttgactcatcattttgttgtctacaggttttctggaaagtgcatgagtagtatattccctcagttcattcatattgaaagtgtctatctgttgcttctgtacaactggactggcaatacaattcttcagttaccccttattacacttaggacttcatagacattactgccttctggcactgagtgattctttaagaaaaccagaagccagcctgtcttcttctccttttatgtgacttgttcattcagccgggagagccatatgaaactttcttccatttgcccgcccaatcaacaattattcactgagtgcgtactatgtactgggtagtgttctagtgctgagcactggtggaaatgtcttagtatggattattccatatcaaatttttcttggaataccatgtgtccatttgagcttcagatttaagtatttgtttcagaaagttttcttctgttatgtcttaatatttttcttctttctgctctgatctcttccattcttcatgagttgttgtgaatattaaatgacttaatataygcaaaggacttagaaaagtgtctgacaattcacagtaagacagcgttagcagaggaagtgaaggaagataattatcttcttcaggaaaacaagtttcattcttccatatctatctcaataatcattttcatagctttattattcatttctttttgtaagatttcttctagcctgtccaccatgtcctactgtattttcacctgttttattctaattttttattcctaatgtagctttcctcttgatacatttttctttcatttcttttttgcgtactgtaagcttatttttcatctccttatatgggcttagaatctctmatttaaattcttataacccaaagaacagtgcttttttccttttttttttttttgagagggagtctcactccatcgcctaggctggagtgcagtggcatgatctcggctcactgaaagctctgcctcccgggttcacgccattctcctgcctcaacctcccgagtagctgggactacaggtgcctgtcactatgcccagctaatttttttttgtatttttagtagagacagggtttcaccatgttagccaggatggtcttgatctcctgacctcatgatctgcccgcctcggcctcccaaagtgttgggattacaggcgtgagccaccatgcctgaaccctttcttttttttttttaagagaatgatcacattatctataatttctctgagactatggaaaattgtttgaactctttccatgtttttggaaggtaataccttctgtgatccacttccttcatcttttttttgctatgttccttatatatctaagctcaagtcccacgttggttcctatcttaatagtatttatctttaaacagagccatttatttattaacgctgaataaggatccatagagagagcgaacggaggtattctgtagcttaaattttagtctgttttcttaaacttgcaatcaccaaatccattacctttgctgacctgggagtatatgttcccttggtttgtgtggagcaggtcgctgtgatgcacacaaaagccctttcacatgctgggttccttaaattctaatgtatcaagcccctcccccaaaacacacacayacacaaactagctggctcacatgtaaccaggagtgtgtgtcatcctcagctccatcttccccctcacttcttgatctggatcttgaatggagtccttacacagggcatactccctgctccygcagcctgcctacatcgttagatctcatatctttaattaaatattgagtacatctttctgaattaaaagactcacttttagtgaaatctgtttcttgctcaaggtctgagaaggtatgtgtccactttcaaattaccccttgttataatctagatttcttagggcctggaaggttaactagattcttatgaatgcaatgttccaagtaacaaaacctaatctaaagtaccataaaccgtccctgttggaaggaaggaaggaaggagtggaaggaagaaggaaggaaggaaggaaggggaggggaggggaggggagggagagaagaaaagaaagaagaaagaaaagaaaaagaaagagaaagacagaaagaaagaaaagaaaggaaagaaagaaacaaagaaagaaagaaagaaaaaaaaaagaaaaagaaaagaaagcaagccagccacggtggctcacgcctgtaatctcagtactttgggaggctgaggtgggcagatcacaaggtcaggagatcaagaccatcctggccaacatggtgaaaccccatctctactaaaaatacaaaaattagcttggcgtggtggcacatgcctgtaatcccagctacagggcaggctgaggcaggagaatcgcttgaaccagggaggcggaggttgcagtgagccaagattgtgccactgcactccatcctgacaatagagctagactctgtcaaaaaaagaaaaaaaagagaaaaaaaggaaggaaggaaggagggagaaaagagaaaagggaacacaggaagaaagaaagagagaggaaggaaggaaggaaggagagggaagggaacggaaagggggaaggaaggaaggagaagagggagagggaagggggaaggaaggaaggagagaagaaaaagaaaggaaggaaggagaaagaaaaaggaacacattggttcacaaaacagtattctacaatgttgatgtggtggcttcaggcacagctggatctagaggtttatatgtcatcctcgaacttgatcattatcttcgttccttgctctttttgtttatgtaccacttccctctcagcatctctctccataaggctgtgaaaaggccactgtcagctccaagaccacatcatctttatagtttgtgaacctggagaaagagcactttccccaaaggccttggtgaaagtcccatgaaggaatgcaactggcctggcttggatcatgtgcccatctctgaatcaactgctgtagctggggttggcaaactctgattagccagccctgggccacataaccacccctgggagggacacagggaagacagggctaacccttctccaaatacggactgagcagcatttattacacaatgtgagaaggcctgtttgctagacagaccaacaaaaatcaagcctatactgcagtgtaaagtttgcttcatgttgtgtagttcagggtcgtagccatttttttgttgttgtttcattgatgaaatttacttctctgtttttcattctttgctgctttcattggattactggagaatgcctttgtgcctttaaccagaagccctcttttcttatttttgattccaacaatactaagagcactcgatagtttattagtaaggctttcaagccttagtcatcattccacaatctacagtgagggctagaaggagatgggagtaaaagagcagagttatttccattttatacattagaaaactgagcccctgaaagtgttaagatacttgccaaatacagctaaatcaagtggctgagagagaaccaaacctaaatccagagattctggctcctcaggaacagtccctgattctccataacaactggctgttcttgggctttcctcctaaagatcccatttccaaaccatgatagtttgaacgtttacatggaaagccttaacagattttttaagcaggtaaagagattcatctgctttgaaagagattccatggatggatggatggatggatggatggacgaacaggtgggtgaatagatagatggatgactgcgtgggtgggtgggtgggtgggtggatggatagatgggtagatgggtgggtggataggttaatgaatagatggatgaatggataaatgggtggatggatgggggatgggtgaatgggtgcatggataggtggatgggtggatgaatgggtagatgggtatatggatggatgaatggatgggtggataggtggatgggtaggtgctagctgcatgggtagacagatgggtagatatatggatgggtggatgggtagatggatggatagatggatggatgaatggatgggtagacaggtggatggatgggtgaatgggtggatggatggggagatatatggatgggtggatgggtagacagatggataggtggataggtgggtggatgggtgaatgggtggatagatgggtagatatatagatgagcggatggatggatggatggatgaatggatgggtggatgacagatgggtgggtaggtagacggatgggtgggtggatgggcagatgagtggatgagtagatgggtgaatgggtagatggacaggtggatgggtatgtggatggatggatgaatggacagttggatgggtggatgaatgggtgtctgggtggatgtatgggtagatatgtcgatggctggataggtagatgggtgaatgggtggatggatggatggagaatacacacattttgttaatggcagctgcattactttcaatccatatagtaatacaaagcaagtgatggtgaagtattcctgaggagcaagtctgccagaccttaaatgaatccctaaatgggcatatggagactatcataactgacacaaggtttgaggatgacagttccgtaagtgcttgacagtgtgttctcttttgtaaagttaaatagtcctctaaagcattgtttacaatgatactttgtttagcaaatcctttttccaccataaccagcataaagttgaactccattccatccatattcagatattccatcaatatctgaattatccatattataaatgagggtatacaattattgcagtttcatggaaacaaaatgctccttcctctcccagccagataaacacacaccacacaggtgaccgctgtcacactggacaagcctgcaaggcccccacactgggagtgtggcctcacccactctctcccctttccacggtctacttacacactccttctcaaccctccctgctcctgccagcccagctcactgacaattgccactttatggtctaaagatgaaaaaatgttaattgagggaagggctctaccatcaaaactgggaatactccactgcatagcaaagatcatttcttggaattagtcacttaaatgtttacaagaaacaattatcaagtgtcccagactgattcattaacatcattaatgaaagaattgctaagagtttctgttttttggtttattttaatcctactacgtaaacttttttttggcaccactccaataaaattccacccaacgattaaaggaggtaaagattcataaagcaaaaaatgttactgraagttaaccttgccagggtacattgcaaacccaacttagacacaatccttatatgatgcaaaagccgtcctaacaaaacacaaagaaaacaattagtgctattgccaatgcctcataattttggacagtgaggaagaagtgctaactgatttgtcttttgctgtttgtgggataaaatatataaatgaaaatgcccctgctgtcccagaatgaggaagacataatgaactctggctttccagattattctgccacatctgaaggtttgcaaataaacaaattaaatagctcttgtctggtttttctagtcaactttcattactgtaaggatggatgcagcaagataaatgtttcctttttacttcagtactgaaagaaacacaagttttcctgctgccttttatgtttaagctctgaggtccacagcctattcttattcaccaactggaaacgatttgtctgcaatggccagtttgatgttttctactcaactcccaaagtcccaatttgaagtcgttctcttccacttaaggagacatttcatttttcctttaatttaaaaaaatgttctgaatgtgaaatgacattacaaggactactagattgcttaatataaattccgtatgtgtgacactcttcaggctgtgtcagcagacaaggtcggttcagctaaacaagctggcaagcagccacttgggggaaaagttttaagcatgctacatgtgtccaagccaaagtcagacccgaaatctaacgtgagtgtaagaaatacttgatcttaaaatggcccatggaatttaatcttgttaagcaaatctgaaccgggcagttatccatgatgacccaatggaaagtcctagaaaaaaatatcttaaactgagtgaccttgtccagttcaagacattctgcctctcttagcatcattactggctgggactggaaaacagagcctgttctctccactgtttcccccattccagccaccaaatactcaaggtttcttcagtaaaataccagggtaagaattcacagtccaaacagcaagcatttctccacagatccttaatatggtaggaagattgattctcaaggaaaccctatctaggaacatggtatgaaataaagcaattcccaatcattcatttatgaggggccaatggagggatctcacagataactgaaatctacaggactcttctgttttagccattagtttgcaaaataaatatttaatccaagatctactgaagaataaaataagtgtccactcttgtggagttaaggactgtgaactaacccaaagggagataataggagattccaggccatgcaagaatcccaaataacatacaaacggaatgatcagtcatcactcaagggatggctggaatagtccaactaaatcttattctgatagtcctacagaagcagcactttgacagtcatgaataaaagtgttcttgagtattatataaggaatgatacaaaaatcaactccatttggccatgagaagtagtctctcctattcatgtacccttaacataaaatttgcttacataaaagagaaaaagcaaaccaatcatctatataaaatagagaagaaactggtaaatgataccattatcctgaccagaaaattaaataaaaagaatactgaccctccattcttgagatgagatggtaaagatgttgttcctttgaacatttcttgctcctttatttcactgaagcctccatcatcagttagctgaagtgggtgactctttaagtggcaaatagcatttgattttgttaaataaatcccatttattttcaccatagagtcccccatcrtaactgtttctttggattccactgtcttctttgctgcaatataaccaagaaaatattttgttgaagtattcttattttaggaatcactacctttcaatgttatttttcaatctaagaatttatatgatttaaaagttatacattgcttataattaagtctggaattttatggccaaagcctttctgagcatacacaagaccagtatcttaagtctggcaccatcaattctgcaggtaaaaatgtatagaatcttatctctaccagcttagagtctacttgaaggcaaacacgcaacttcaggctcataaactacctagtccacataagtacttccgtgtcccataacagcagctcttcctcctgaatttgatcacataatttttcattcaaaaaatatttactgagtggctcccccatgtcaaacactgtcctaggtacttggtgtgcatcaaaatagatctctgatctcacagggcttacaacctaatcaacrgaaaataagcaataaccataataaataaggtatacgacwtgttataagataataagtgctatggaaaaaaagcaaagtataaaagtasggaaggctcaaggggattgggaatagggtgggtacagcagggtagggaggacaaaccctttatggagtgaggcatccagccaccagggccagtattttcagcacagagaccagctggtatggaggctctaaggtaggctgaagtgggggactcttcagcacccactgtgcctggggtgctcaaggaatagcaggaatgcagtgtgcaaggaggcaaagaggaggagaggtgattagaggggtgaggggtggattgtggaggcccagcctagtagaccacactactctgcaatggaaaggagagggcattgaaacatacctctaaagaggtataagacagagttgcaagaagatatcctttttgctcatgactgcagattcttagacatataataatataacatttcccttatcagcaaattggtattaggaatagcttattgtccatgctgctacaaggctgtagtctgtgagaaaacattttgttaaaggggaagagagtaaatctcccataatacagtgtgcgggggtggggatgagctgcatgtagaaaaatacttactgttttgcaagatttttcaaaatgactcaaggtttcctttccttttctgtacttactaagaaaccaacaaaccaataaaaactaataataacaaaaccacctattctacccctctgaccaaactccctgctttcaaaacgctaaattttaaaactgaaaggaaccttagagattctaggcttcttttttttttttttaagatgagaaaattgagaacccaaagattaaatgtcctgtctaaggtcacagggagagccaggaccacagggtgggaagaacacaggctttggctcagacttgggttcgagtgcaggccccccggggcacccactctgtgatgtggatgctcaattcacaccaccttccatggtccccacctcttggggatgtggtgagattttaaatgatgtggcctagtaaagtgacttacatggtgctagcacgctcaaaacctagaagttattgtcatgattattggaacccaagaatcctgacttctgggctagggctctctccatatcaccacaccaccttaaatgactttactactgaattatgaagcacacattctgtttccgattacaaagtatttttagcctaccgttatcttttagcattcgtttctctcattcattcactccctgaatatttattaagcacccacgactatgtgccaggtgctrtttactgcacgggtgaagccatggtgaacaagtcccagccatcatggagcttctagaagggaaacccaaccatacctataggtcaaggagctatacctgtctatcttcaaatctactggagtaagcttgtcaggtattactacaacgaagagctgccctggggggctcactctcattcctgatgaatgtcctcgatgaaactgagcatgtgtaactatggtctgtatcttctcggtagacagttgcagcacattatatgaattttgtaatggatcgtgggtaaacttcaaaaggagacagctcccagcagccttaccacacaggaccagttcaggttyacaaatatttatttgatacctgttatataccacaccctgtaataggctcttgggcaacaaacagagaaaaacacttttcttaatgacgttgctctatctagcaggggagacaaagggggcagatgtgtaaagagataaatgaagcccagtgtgaccccagccaggtaaggagggggcagagagagtggagaaagcttgaggggttgggagttggtcagagaaagcttcacagaggaggtgggggctgagaagcattttgaatggttaataagacgtaaacagcttgaagaaaagagaacaaaagtctggagtgaaagccagcttcaagtgtgtattgccagtacagtcaggcagggccccagttttagaagggcctatacttgttttaaggctctgctgtggctatcttgaaactcttaataatttttgaacaaagggccccacatttccattcagcattgggcccagcaaattacataggttctccctgaggcttgaaacagcagggtgggtgtggtgaacaacaaggrgttccaccctgccggtgcacccaccgtgagggggcaggcccaggacaggcgtgagcagggcctggaatgttacgctggggctggatcacaacacagctgtgcacttggaggtgctgggatgtcatcccccgccacccccaccagagctcagcaaactacaaaccccaccaaatctgccctatctcattttcgtatagcctgcaaactaagaacggtttttgtatttttaaatggttagaaaaaaaatcaaagaaagaacaatattttgtgacaagtgaaaattacatgaaattcaagtttcagtggccataaattggtggatggctgcttccatgctacaatacaaaacggaggaggctgagcagagaccataaggaccaggtctaaaatattgactatctggccctttacagaaaaagtttgccaacttctacagtaggctagtgtttcccaaattgtgttcccaaaagacagatcccacagtccagcaggtttgtgaaatgctgtgttgaattaaaattaaacagatttctccaccaacactttaatacgctcatgtgcagagactctccaagaagatgaggggtaggcagtgtttccctgacctatttgagcactgaaccctttttccaaagagaagctattaacattttgccaaaagtgttccctggagttccctggaactcagtttrgcaaacacttctgtaggcacaacagggcctctgaagggttttcagcaagagggtggtgcaatctgatctttatttgcttcccgacctcttgtgctttatggaacacacagaaaatgatcatttttcatggtcccctgggataaagggataaggctgctgctcacagccatgtcgtgttgggagctcagcatcctcaggctccactggctgttcctctggctgagggcctcgcatccacccacctgcagaccatcacagcaccccagtgagcagacggtggtttaagagcagcaaaacaggatgaggcaagagggatggaggcagcatggcggtggtgagggagaatgcagactygagagctagtcaggaagcacgtgtagggcttggtgacggagagtgtgacagggatggctgaggaggtggtactgctctcaggcctcttgtctggcttgaataactggggaagcattcacagcagtgccacctccagccaaaaaccctgtgtgaaygcaaagcagttatactgctggccttttggagatgactacacaaatctcttcctctttcactgtcttgaagcaggaattccaaacctgccaccacaccccggccctgcctgtggggtagcatcagccacaaatgacttcacagcaaacaaagggatgccctccatttctgcagcctcagttactccacaaagcctacctcttctaaacaatagagaagatctgaaatgaaacccagggagctcttatacaaatgacaatgattccaaggctggagagctcaaatattttttataactttataattggatgacatgtgcttttaaaataacaatgactttttgytgccagtatttcctgaatgctggcccagacctcagggatgacctgaatggtgaagaggggtgactgcaaacagggtggataaaagaaccacgatgaaaacatgcttcagtgcaccttggaggtgtgaagctggcctcagtgctgggaaatcacagctgcagagggcacctcccagagcatgcagacaacaggcaggtaccccagcggggaaggagctaagccactggggaagcactgaggagggggatggtgggcaaagcattcatctctgtggtcactttcacatcagtgtgtacctcagcaagcagcagggttttctagcrtgcactcccaaaagttaaaaatacatgaaacacacagtattcaacctcacaagcaagaacacagaataaaaaacaaggtatgagtccttgcaccaatcctgccatcctgttcataagaagtgcccttcacctccaggtcccagcccctctcatcttggcaaacsctttgttcctgcaattaccaaccctttctgatttacctgagctgacacgggactcgggttgcggggggagcgtttgaaaagctcctcaggtgattctcatgggcagctacagctgagaactgctgttggtgaaaaaacctacatcacattgtctctccctttggtaaaccctatcttttcactacaagtaaaacacagctgggtgtgttttccatattctgaggccctgggcagttctgtggcctcagctctctccaacttcccttgatcagccactttccagccactggacctccaggtcctccaccaccagcacttgctctcgtgcccggtcattgcactcgcttttccttccatgtggacacttggtccatggatttttacatggctgcctccttctcatgagkcaccttcctattcagctgccagctcctcaaagatacctttcagagccacctgagctaaagcaaattaccccaccacagtcactctcgagtccattatcttgtttatcttcttcagagcattcatcagcactcaaattctcttacttatttgttctcctgtcattgtctatctcctctcactagattgtaagctctctgaggacagaactttgttggcctagaatggtgcctggcacttagtaggagtttgataaatatcagatcgactggcagtgtaagaaaggaaacaaatcgggacatcaaggtaaagcaagttgcctgatgatctacttggtcayggcatcacagcatgaggtacacaccctgcacatcctcattgtcttgtcttttctcttctcttttcttccttccttcctccctccctctcttctttttctttccttctttccttttttctttcctttcctccttccctctctccttccctctcttccttccttccttcctaccttcctttctctttctgtctctctctttctctctctctttctttctttttctcctttattctaactcttcagccacatcagggaccacacaggcaagtgaatggcacaggctggggacatggtgactgcagatcatatcctggccacagaatggaggtaccactcagctccgatcatgccccattgtggctgcatggaatggggacccagtgttgccagattttctgatttttcacaagaagtcataaatctggattcttccatgagattcttctaccttttaaatgttggaaatgaattaaaaaaaaatacttgtctgtcaagtatgatgctcaggtgggggctgtgatctttggtatgtatcttccaggctctccccaattctctgtgactgtaagcctatctctcttcatcaaatcttgttgatggagggagaaccagttctgtcagctcctggtaaagtggtttccactttttttgaccacacacagtcagaaatcagtttgtaatatgaccctgaacacacactgaagaccgaagtaaagtctcttgaagcaatacttacccctatcgtgtgtcatgtattctgacattttctattatattctattctacttcattttttaaaaatgctggtgtgatccactaaattgattgtcatcccacttctgggtccttttccacagtttgagaaacccttagtatgccctggatggggagtgattccaattgttggtgggactcctcaggctgtgatctttagcctctctgttcccaggtttaggtgcctggcagcaattctcaggcagtagaagtcccattcaaattttgcttacatgctcacacgggatcagaagggcattctcaaagaaataagcttaatgtgcattataagaatcttatcattttcattaatttctaataaaattaacaactttttgaactctaatttaaaaatcatttatttctaatatacatgaaccatccactagggaatacttatcctaatattcttttttttcttttttgttgagacagtcttgctcgtcacccacgctggggtgcagtggcacgatctcagctcactgcaacctccacctcctggtttcaagcacttctcctgcctcagcctcccgagtagctgggattacaggcacgtgccaccacacccagctaagttttgtatttttagtagagacagggttttaccatgttggccaggctggtctcgaactcctcatctcaggtgatctggccgctttggcctcccaaagtgctgggattacaggcatgagccaccgcgcccagtcacttatcctaatttccttttcctaccaactgtaatatttaggtattccttataagcacccagaaaaatatatgaacaatgtttcttagccagcttttgcccaatattaactaatcttagttaatataaaaatcatccagggttaggaaaaatcatataaaawtagcttttgtgtgcaaattcaagaagcatgcctgtccccagagattacaggatgttacatggccttacagtcggagggaggaagggatctgtccggcagaagggcccgctgggaggcagccctgaataagcgagccctggcgttgcttactcttctaatcttcgcagggtccactgggggcttaggaaaggaaaagcaggaatcctcctctctggtgggagatgctggaactttcggtttctggaaagagatttttttaaataactggaatgactttctgcgtctcaaataacacttacctcagagctggccacaacccttccagaagagcacaaggcctatctgcctgccttcatcttggcttcctgattctaccaactcactggcccatcttacataatgtgatatatgtatacataaagcactttttaattgtttttcttaatcatattgtattaactactctgctgtgctattaccatacttgagtaaaacagtttacccatgctagcaaacagatattatctgtataaaagactacaaaattggccgggcgcagtggctcatgcctgcaatcccagcactttgggaggccgaggcagctggatcacttgaggtcaggagttcaagaccagccttaccaatatggtgaaaccccatctccactaaaaatacaaaaataggctgggcatggtggcgcatgcttgtagtcccagctactcagtaggctgaggcaggagaattgcttgaacccaggagttggaggttgcagtgagccaagactgcaccactgcactccagcctgggtgacagagcaagactccatcccgcccccccacccccaaataaaaaaagactacaaaattacatatagcatattcaacatgctttaaaaatttctgagttcaattcagttcagaaaacatttgttgagtacctacatgtaccaagaattatgtggaatgtaagtggtacatttacatattttggatgccacaaatgtatttttttaatgatatcaaaatttttaaataagttaggtggaaaagtcataaaacataaaagcaaaaagttgtcttggacttatgaaagtgttttgtttctatttattgatttatttatttattttgagatggagtttcactcttgtcacccaggctggagtgcaatggtgcgatctcggctcactgcaacctccgccttccggattcaagtgattctccggcctcagctcccgagtagctacgattaaaggagcttgccaccacacccagctaactttttttttttttgagatgaagtttcactcttgttgcccaggctggagtgcaatggcacgatcttggctcaccgcaacctccgcctcccaggttcaagcgattctccggtctcagcctcccaagtagttcggattacaggcatgcaccagcacacttggctaatttttttttttgtatttagtagagacagggtttcaccctgttagtcagactggtcgcgaactcctgacctcaggtgagccacctgccttggcctcccaaagtgctgggattacagccgtgagccactgtgcccagccgaaaatgttttattttttacatctcagaaattctatgctgatactccctattttttcccccatcttttcttaagtgtcgatgctgatactcttagtagaggaacattactaacaaaattctaattccttaaaaactttaaaaaaaacacctgcaccaagttctgtgccacccagaactccctctaatctgagtggcctccgacctgatgccagaccctcacagggtgactcagctcctagttttacagttgcctggtggtcttatccttcctgcctccaatgtcagcacagttatttgcctatgaaagaacaaccttatggcagcaagtgtttttagctctaaccaaaaataatcaagttaacattcctaaagtcacttctataacatgtgaatgagtgagtcactatccaataagttaatcaacaaatttttgaaacatccagtgtgaaattcaagtcatataatttggaaaattgggtgatgtcatttatcacgtatgacgcataatcccaaacacttgttttcccacatacatgaatagaacatagacatctatattagggtgttccttccaagaagttgttcatttcaataatgatgacattcttcaaaatgtttatttcctcttgttcatttgtatttaggatcgatttataaaccagaccaaaaaaattgttctatgatattaaagacacatttttctaacacagttagaaaaaaacagtaaataaaataatcatcataatatggaagaaagcataaatcacttttggagacctggagaaggacccactcactagttatgtgaacttgtgcaggccatttacttctctgaaactgcccagctataacacagagacagtagtctccttcttacagggccattcccataaacacaattcctattatggaagctcaagaaatgccagttcccttccccatgtaagttgctcaccccttatttatcaggtttggttccaagttacttttaactcctctcatagtcaaggccctagcctctgacgcaggcttgttagaattaagatattggattctgaggggtctgttctgaaggaggtaacacttgtttgtctgcataagttgcactatatttgtttaacaagtaatcactttactttttagcctccccactttgttgcaaaataatcataggaatgttacttaggccatgaagctaataggaacagaaaagctaagactgtaatacaggaaaataggtgttttctgtgcaattatgaaaaatgaaatatagagggtaatctcaattttgaagatagacgtgtggttttcttaactcaaaatgtctgtattctgcaggtaccctgaaactgaaacaaagatcaagaaatctgtcaactaacaatcatgcagacaaagtaaacagctccttctacagacacccaaactgtactaaatgagagatcttttttttttttttttttttttaagacagggtctcattctgtcacccaggctggagtgcagtggtacgatcatggctcaccacagccttgacttcctggtctcatgcaattctccagcctcagcctcctgagtagctgggactacaagcatgcaccaccacacccagctaattttttattttttgtagagacagggtctccctatgtggcccaggctggtctcaaactcctgagctcaaaagctctcctgccttggcctcccaaagtgctggaattacaggcatgagctaccacactcagccaaaagattttataaagagtgaaaatatggtttggaaagcaaatttccccaaaagagagtcaccgaattttctctgcagggcaagagcaaagtcccacaaatgctcctcaataaaaggcattattttcttagtgcaaaattagtaactgtatataataaaaattcggttccattttactactgacatttaataaattatgtgtcccatttaaacacgcatctcatgggactacttagaatataaagtgacatatgtaaagcatttttaattctttaagagaaaacaactaaatgactcagcaatttcttttatgccaagttctacaaaatgttctttcacgctgtggagtaaaatgacttttataaagaaaaacagcaaacatgtttctcttataaaatttgaataattttagaaatcagaaaatgttgcaagtaagtttaaattttcacctgagggctaggtgcggtggctcatgcctgtaatcccagcactttgggaggctgaggcggggggatcacctgaggtcaggagttcaagaccagcctagccaacatgatgaaaccccatctctactaaaaatacaaaaattacccaggcatggttgtgcatgcctgtagtcccaactactcaagaggctgaggcaggagaattgcttgaacctgggaggtggaggttgcaccactgcactccagcccaggtgacagagggagactctgtctcaaaaaaaaaaaaaaaaaaaattcacttgagaatattaactacctcacattttgtttcctgacactaacccatgacttgagtataatcaaggacacagacacagtcatattttaaggtctgttctggctggtggacctgttagagtccattgaggacacacagtctatttccataggacaaccccgtcaaagaagacacaatacatagaacgtttaaggtatccatcaggctgaccacaattcttccaagcaccgtcaccttggccaatttctgccctggctcttccagatcacccaacagggtctcccccgatcctatgtgacaactggaaaagggagttcaggacatctcaccccagaaaggtgctcacaatttaatctgtaaagcagcagaacacacacacacaaacacacacacgcaacaaaagacaccttgaaagtcagaaagcaaatattaaacattctcgcaagccgccaggcgtggtggctcatgcctgtaatcccagcactttgggaggccaaggcaggtggatcacaaggtcaagagatcgagaccattctggccaacatggtgaaaccccgtctctactaaaaatataaaaattagctgggcatggtggtgggcgcctgtagtcccagctacttgggaggctgaggcaggagaatcacttgaacccgggaggcaatggttgcagtgagctgagatcatgccactgcactccagcctggtgacagagcaagactccatctcaaaaaaaaaaaaaaagaaaagaaaaaaaaatcacacaagcacagaacctttgtgacgcggcagttctgtgtgcatttctattaactatgattttctccacaggtacactggggtcctctgtcactcttggcatgtgactcactgttgtaatgtcactgtttgcttcagcaattgtgaaagaaaaaacactgctttggctctactctacttgtcttaccctggatcgcccatccccaaggtttatatgagttcctaggtccctttcttttaaaaatattaaattttgtttcacttatcaattacctggagctcagttatgtggctcaaactaatccacgctgttagaagtggggctggtagttgcccagaggaggcagtggctgagaggggccatggtggcggattctgagcccagaaatgatcaatttgatgatgttggcagygatctattttttccttttgaatgctggttactgagtgtgtttagtttgtgtaaatgtatcaagctgaattcttctgtgtcaataaaaagttgaacgaaaacatttggggtttacatcactggactcggtaagtttaggaaaccaagaaaattctattttgttgactaaaataatgatgaaagacaacacttcctgtgtattcacatggtcacacctcttttctgactttatacaattcaaagcaagagagcagttatctctgtgtgaacgaaatttgaacaccatctaactagagtagaagaaaaatggagtaactatcacccaactgccccaggtctcagtgctcttgtggagcagctgggagctgctaagaaggaaaaaagacgtaaactggcacacctatatagcaggtagatataaacgttaatgaaagacaacaaatcaggcggacatggtggttcatgcctgtagtcccagcactctaggaggccaaggtggggggatcacttgaggcyaggggtttgagaccagcctggccaacatgatgaaacccaatctctactaaaattacaaaaattagccaggtgtggtggtgcacacctgtactgagccaagatcatgtcattgaactccagcctgggtgacagagcgagactctgtctcagaaaaaacaaaacaaacaaacaaacaaaaccctacaaatcagagtgtttctgctaacaggaaccccctgggcaagtcgggctggagggcagggcctgagcaatcaggaaccacaagcgtcagctcttcctcttctcagaagcactgggcagtcctgagtgtgggcagcccattgcccgctggagggtgagtggggagcacatgccagataggatggggagaaagagagagggcagctgtacaaaagcagcattgagctaatctgctcaatgtaggagctgaaaggctgctgtctgagtccctgttccctgactgactgctggtggaggacttgttaaaaggcaaactggtctgaaaagtgtcctagatccaaaaagcactgagattcaactggttaggtcctcacaaactctttcagcaaatgtgtcccttaactgtgagacactcctctgccactctctctccctctctctccagttatctccttctctccactccctctcccttcccctatctctgccctttgccaatttagtggttatcagaggcaaagagttctttaaaaaaatgaagtgataaagaagaaaaaaggtggaaggtcaggtagcatggggacattttcagaattttttgactgggggccccaaattttaattactatttaaaatgaaatgtacttaagaccctcacataatccacaataacatcaacgaccacaatctcaaattaagcagtcactttccttaaaatgggaacttcttagactacttttactttgctttttggttttgtttgtttttttttttttttttttttttttgagatgagtctcactctattacccaggttggagtgcagtggcacaatcttggctcactgcaacctctgcctgctgggttaaagtgattctcctgcctcagcctccagagtagctggggttagaggcatgcgccaccacacctggctaatgtttatatttttagtagagacggggtttcaccatgttggccaggctggtctcgaactcatgatctcaggtgatctgcccacttcagcctcccaaaatgctgggatcacatgcatgagccactgagcctagccgtctacttttactgtgaacatagcacccaaccattcagaggtatggaaatttaagttcaatgaccctaaacagataaatgcctatcttgtcttagcccaatagctaattctgcagtccaagaactgtaccagtttgacaaggaccaggttatctctagaaaatgagattctttttaagggaagggtaaacccaaactgagtcccaaactgagtgagtccccaaaaaactacagtaatattaaaagcaatttacaggagtcaaacaacagaatcatagaataaagagccactctacaataaggtagagccaccgagctgccraactgggtcctcaggctgtagctggctcaaaacccaagtggttcccaaggttgtagacgttaacaagccatgtgtcaacaatagctggcaaattatttcttgcaatattggttcgtgcttgctatcttgggatcttgtttttgtcatctgcaatacatgaacaagtataatcttcctcacagaggcattctgataaatactttaaaaatataagatacattttgaggcaattggggtcatttggacatggactatacattaaatgatattactgagtaatgttaattttctgagctatgatgatggtatcatggttatgtaggagactgtccttgttcatatgagatgcacacttaaatttttgtggatgaagtatcacaatgtctgcaacttactttcaaatggttcatccaaaacaaacatacatacaagcacatgcgtgtgcacgcacacacacatacaaacacacatacacacaaacacagagtaacagaaattgagaagcgcttgactaacataccaatctcataaagcctagggaactggtatcaccaagtacttttggtagcagaggtagaagggaaggagtggctaaagtaaggaggattagctgaaattctgtgtaattccatccttcccagctccatgcagtcaggctaccaaagccagaagaagatgggtttattctctaaagaaggtaaaacagagggtcttccttaattgaggtcaataagtaagggtactattactgtaagtacccttattgttgaggtcagagtacttattataaacatggatgttaattgaatatttatatcctaaatgctgggcattctcaccttcttcctgcacctggaagctagcaaccagactttaacatccaggaaacagcgtggaagatacttctttacagagaatataactagcccataagaaaagtcctaaagatactgccactggggtgtcatcaacaacacagcccagtcagatccccctaactacaggtgtgggtagataccacctataggttgaccaacctcaatccacatgccactactcttttttttttttttttttttgagatggagtcttgctctgtcgcccaggctggagtgcagtggcgcgaactcggctcactgcaagctccgcctccccagttcaagccattctcctgcctcagtctcctgagtagctgggactacaggcacctgccaccacactcggctaattttttgtatttttagtagagactgggtttcaccgtgttaggcaggatggtctcggtctcctgacctcgtgacccacccgcctcaacctcccaaagtgctgggattacaggcatgagccaccgcgcctggctgccactactcttaagaacagccaaacaaacagcatgaggcatcagaggaagtctctagtgtaaaaagcagagacaaaaatgcaacagagactataaagggagaagaaaacttagttaaaaaatcaaaactaccactaatatactcagataacatgctacaaccatgaaataagaacagactactatacaaagagataatgtagagggaaaaaaacttttgaaaattaaaaatatgacagcagaaatgaaaaaaaaactcaataaagggatcagaatacagtctcttccacaaaaagatgtaaaacagaaaagagagaaaataagaaaactgaagtgtcagtccagaaagtcctacatcttttttttttttttttttaagacagagtttcactcttgtcgcccaggctggagtgcaatggtgcaatctcaactcactacaacctccatctcccgagttcaagcaattctcttgtctcagcttccctagtggctgggattgcaaacatgcaccaccatgcccagctaattttgtatttttagtagagacagggtttcaccatgttggtcaggatggtctcgaactccggaccccaggtgatctgcctgcctgggtccgccaaagcactgggattacaggcgtgagccaccacgcccagccaggaagtcctacatctgaataataaattctagaaagagcaaacagaacaaaaaagtgggtaagacactatgatgatattaaatattcaattaatatccatgtttactgaaaggcatgaaattccacattgaaagggcccttcaagtacccagcatgattgataaaaatagactcacacaaaggaccattgttattaaatttcagaacactagaaacaaagagaaacatcctacaaacttccagagaagaaaaaacaggaatcaaggtttcaaataatttacttcccatgtaccctttctcaagaaactataggagggaatgctctaccaaatccacagtaaatcaagaaagaggacttgagacataagaaccacgaaaaagccagcacaaggagaagccgtctccccaggaggatggtgaggggcaccccaggagagctgtgcaccaggtgctcagggaaagtggttgggcaggacgtgtgaagagttctccaaggaggtaaatccatagaatgcctcatgtgcctgaacatagaaggtgattaaggccactggggaagagtttggggttgaaatactaataatacaaaactttaaaagtaaggcaattattaatgccagggaaaacaaaaagtggtacaggaaaggagaatttatcattaattcaagtctcagctatgaacagggtttatgtaatcacagtcagagaaaacagatctaaccaaagttatatctatatgggagtaatagtggggatagaaaaggtgaacgcattgtgataagaggcaaaaagacagacagaaactaaatcttcatcttccttagaagtcattagataattcctcaagctcataagtcagaaagcagcaagacagtgtggcattgggaagtctggatgtaaawcctaaaaggatgtgtcgaaagagcttaaagtgaaagccactgaggagggaacaatgaagaacaaggggacaggagaccattggatttttgttagtttttttgtaataaatctttgaatacatatatttatatgtaaatgtatatatagagagactacatataaatatatatgatttttatatatgtataagatatataactttaatataaattatacatctaatttttgtatatataactgttaagaaaataatacatatgtataactaagaaagcaaaaatattgtgaaatattgcttaccaagttattatatattttaaaaattcttctttattatcaaactataggtaaattatagaagtatttcattagatattacccattacatttgaacaatataaaagaatctgttttcatattaaattattagtctatttaggtgtacatgataattatcatagcatatataagtactgattccaagtgtttttggccaatttcatttcacaacataatataaattactggtggttatacaaagtactcaccagctctagtggactaagacgtgtgccagagataggcctggaatcagatgactcaaaactggatgcatggaggctagcataaaagatggtgcagagtgttagtttgtgaagaattatttctttatttatagtatatattagttaaccctagctaaaaaacaagtaaaaggatgcaatgcataaaccatgaggaaaaacattttttcatgttattgtacttaaaacagttgattaacaagtcttttgattacttttaggaagtttaaaaaatactgaataatgaaaagaagaagtgtatagagtaattttttaaaaagctttgttcatatcactttataaagctggtatgggacaactgctagtaaccatttcattccaaagtaacttcctgaaccaatgtttgtaattacttttaggaattttgaacaaaagtcaaatttaaaaagacaactaccttgaaaatcaatcaatgtaatctatcacaccacaagctaaagaagatacakaaaatacaagctaaagagaatacatatcagcagatacagaaaaagcatttggcaaaatccaacactcattcataataaaaattcttagcaaactgggaatagaagaaaacttctaagaatatctacaagaaacctacagctaacatcatattttatgataagagttttcccactaagatgaggaagaaggcaaggatgtcccctcttactactgcttttcagtatcatacagaacatcccagctaatgcaataagacaagaaaaagaaattaaaagcatacagattgggacggaagaaacaactctttccagataacaggattatctatgtagaaaatcctaaagagctgacaaaaagctccaggaactaataagtgattatagtagggttgcaagatacaaggttggaaactgaaatgaaaacacattatcatttatattagcactccmaaaactaaatatttagttataaatctaacaagatatggataaaatctagatgaggaaagctataaaactcagtgaaagaaatcaaaaaactaaataaatgaagagatcgtccattttcatggctaggaagactcaatattgtcaatatgtcagttcttcccaacttgatctatagattcaatgcaatcgcagtcaaaatcctggcaagtcattttgtagacattgacaaactgattctaaagtttctatggagagacaaaagacccagactagccaacacaatgttgaacaagaagaacaaattaaaagggctgacactccctgactttaagacatattataaagctacaataataaagacagtatagtactggtgaaagaaaagacaaacagatcaatggaacagaatagagggcacaaaactagactgacataaatacagtcaactgatatttgacaaaggagcaaaggcaatacaatggagaaaacatagcttcttcaaaaaatggtgctgggctctttcgctgaggtggaggctcagtgtattcaagatccaccttccctcataacccattgccatggctgaggaagacactgctgctggaggtgcagtggatgttaatactgctttaaaagaggtgctgaagaccactctcatccaggtcagcctagcacaaggaatttgcgaagctgtcaaagcgtcagacaagagccaagcccatctttgtggctttcatctaactgtgatgagcctgtgtatgtcaaattgatggaggccctttgagctgaacaccaaatccacctaattaaggttgatgacaagaaactagggtaatgggtaggtctctgtaaaactgacagagagggaaaccccataaaatggttggttgtagttgtgtggtaggactatgggaaaagtctcaagccaaggatgttatcaaagagtacttcaaatgcaagaaattaacaagtaaaactttggctcatattcctagaaaaaaaaaacagtgctgggacaactggacatctagcatctacatgcaaaaacaaaaacaaaaacaaacaaaaaacaaacctaacaccctttacaaaaattaactcaaaatggatcacagacctaaatgtaaaacacaaaactataaaatctctaaaatataacataggacaaagtctagaaaaccttgcgtattgcgatgacttttaatatacaacaccaaaagcaagatccatgaaagaaagaattgataagcttgacttcattaaaattaaaattttctgctctgcaaaagacactatcaagagaagaagaagaaaagctgcagagcaggagacaacatttgcaaaagacatgtaagataatgaattgttatccaaaatacataaataattcttaaaattcaacaacacaaacaacccatttaaaaaatgggccacagaccttaacagacacctgaccaaagaagacatacatatgtaaaataagtatataaaaagatgctccacatcacatgtccagggaaagtaacttaaaacaatgagataccactacacacttattcgaatggccaaaatctagaacactgacaatgtcaatgctggctaggatgtggaggaacaggatctctcattcattgctggtgggaaggcaaaatgatatagcccctttggaagacagtttggcagtttcttacaaagctaaacrcaatcttcccatatgatccagmaatcatgctccttggtgtttacccaaaggagttgaaaacttggccgggcgaggtcgctcacgcctgtaatcccagcactttgggaggcagaggcgggtggatcatgaggtcaggagatcaagaccatcctggcaaacatggtgaaaccccgtctctactaaaaacacacaaaaaaattagctgggtttggtggcgggcgcctgtagtcccagctacttgggaggctgaggcaggagaatggcgtgaacccgggaggcagagcttgcagtgagctgagatcgtgccactgcactccagcctgggcaacagagcaagacaccatctcaaaaaaaaaaaaaaaagaraaacaaaaagaaagaaaacttatgtccacacagaaacttacacatggatgtttatagcagctttatttgtagttgccaaaacatggaagcaaatgagatgtccttcagtaggtgaatggatagataaactgtggtacatccagacaatggaatattattcagcactaaaaagaaatgagctattcaagccatgagaaatcatggaggaaacttaaatgcatattactaagtcaaagaagccaatctgaaaaggtgacatactgtatattccaactatatgacattctggcaaaggcaaaatcatggagacagtaaaaagatcagtggttgctaggggatgagggaaggaagtgaaaaataagcagagtgaagaatttgtagggcagtgaaactactctgtataatactataatagtggttacatgtcatcagaaatttgtccaaacacataaaatgtacaacaccaagagtgaacgccaatgtgaactacagcctttgagtgataatggtgtgtcaaagtatgttcgtcgatggtaaccaatgtaccactctggtgggggatggtcataatgagatgctgcagatgtgttgtggtagggggtacatgggaaatctctgtaccttccactcaattttgctgtgaacttaaaactgttctaaaaaataagtctatttttaaaagctaaccttaagtagaattaagggaaggtataacctggtgcttaaatatctgaatgaacatgaatgtgaaatgccatatacctgaaggaggaaggaggtctattttctgatgttcttgaggatgcaggtccgaatagttttctttgagcctcctgtggtgtaaatggtctttgggttctaactgttcttaatgcatttcttgcttcacttatgatttctgcactggtcttctgcttggacactgaaggttgataaaatggatccagttttcctaacattttatcatttggagacagcatctttcctttgaaagtaaaatattcttcagatagacaccacaccctgcaaatacatggtacaaaaaccatcattatttttgtccaggactttataaaaaygaatgcttaagcccatccatatactaaatcattcctctatattaagcttttaaaaatccaccaagcagttagaaggttaggatctgagaacagctctcaaaaatgtagagaggaaaatttcctcaaaaatatacaactgaggacaaagatgtgcaggaaagaaaaccaggatgaaagctaaacccagagagaaagactaatcatgaaagaagacagaataggaagagcgaatcatctcatggtcttcagcctacaaaaaacactgagggttctgttaaaatgtttacagtttccttttcttccccactgccctccacactagtgatactataaggttacattttagacagaaatgttgtatttctaaaggacacttgattttgcaacaaacctcagagaatagttcagccccacatttgtccatgatataactgaatgaattgattcaactcacctataatttgaggtaatgacctaagtaaataaataccaaatatcaataccaactgatcctttcccaacaccccttcctgaaagagttaaagtcattacaagggccatgagaatgcagatccttctcaaatgttggtgtgttccatggagacaaatctgaactttaaaataggacagatttttaaaatgtaattctaatgagtatatagcattaggtgtttcttaaaaaaaaactcaaagtccataaaatgtcatatctctaaagagacagagatctatgaatttttcacctatttcagctacccaattttagaataacttctgcacaacagaaaactgctttgtgacacatgccccaggaaactaaaaagattccatttctataagtagaatcaacaggtgattccttagacaaataaagatttactatattatgattctaaacattgttacataacaacagacaataagaacatttgtttccttctacacaggccccaccccaagagtttctgatgaaaactataaacaatatgtcatacttttcatatggaaatgccaggtgttgagttaaaacagtaaaaaaattacttgataagcaatactattttaggaatttttgatacaggattttgaatttaagcacagtctctacaattacattcattaatataactatcaaaaatgatgagaggcctagtacattttatttccaatacttttgaaatgattggcttttactttagaatattcaatcataattatttaaaatatatacacaattttttatatctacatattgtatattatttttggatgcataatacaaattcagtcccgtaacatctaacttaagcagccatgacaggtttgttggtctgtttctaaaagacctattgcagtaagaaattatgccactaagtgagaagaggtttctgtataataaacaggcttcttccagagcctaaatcaggtttgccacccctttggcctcacatggcactaataagtctaacaatgtccaaaagtaatctggcaaatctaataaagattagagaaagttctgtggggagtaataatagactctcactcctgacctaaggttctctctggctatctttgagtttgcattaaaaactatactctttcagagagtgatgaagcaggaacatttactcaggtcaaactctaaaaattctgtgaattacctgggggcatataggaatttagactgaccaaatactatactgatagaaacaatgtagatacagggctaaaaatatttttgtctacaaatttttaccaaaaattctaacacaattttctctatccttcttcttttttccaccaaatctcactttaacaattatattgtgagaaacttgtacaataatgtaaaatctgcacaatgttatgatcatatattaatattcactaaatcaatcatggaaatatttaataatacatgtgaactgacttagaagaattagaagtggggctttggggggaggatttttaaattgatatttgttaaactacaaattattatagatggtttttgccaacttgaaaaattaatcactcaggacctgaaagcttatctacttaaagtayacctgaaccataacacaatagtcctacagaaattctaactttacaaaattttccttccaagtagagcaaatccactcagctagaagtactgattaactgtttcctatgtgcaaagccctctgcttagatctctgggaaacacagaagaggaaacacaaagargaataaaagaccgtcttcactctcaagcaagaagaaccactaatgtgagataaacatttactttaacaccaagcactgtgctaagtactcttgactgcattatctcaattaaccccacaacaattttgcaaggtggatagaatcttttaaaaaataataataataactagagatgaggtctcactatgttgtccaggctggtctcaaactcctgggctcaagctatcctccttggcttcttgaagtgctgggattacaggtgtgagccaccatgtaatccatggtctggacagggtcttaagcaatacaaaaaaaaaagctatgatatatgcccacagataatattcaaactcttacccactagatggctggtaggaggtggggcacttagaggcattggggctgcaactattaacccattcacacagagaccccaatattttcccaacaggagcagccttcctggtacgtacccagtgagtatttaccctgcttatactcaaatgatttaaatacaaggtagaaactgatggcagcaataaaaacaatagagacaaattacttatgtgatcacaaaggaagaagagatttctgatygggggaagacatcaggtagacttcctggaagaggtggtgcttgagctcggttgtgaaagaagggctgaatttgagcaagtggcagtggctggcactggagctggagtagagaaggaagttccaacaaagtcggcaagtgagccagcgcagagcatcaagacatacagggtgtgtgtggacaagagggaactctgaaaatggccattggggctgaaccaaataaattaaatggcgagaaatcaaaagttgatgagcagatcaaatacaacattttgagggatgatgtgatctggcagagatgggcaggaaggaaaggagggcaaagatcagaagtagtgaaatcagacagtttttatgtaatcacccagctaactctcaaaggtcatttcctcaaggaagctttcctggacatgcctctcccaccctgctagcctgagttaagtgcccctcgtccagactccaaaaggccccgggctggtctctgccactccactctcccactgtgttagaattccctgtrcatgtggtgttggcccgagactctctgccccaaccgtccacgtgaggcacagctgaaggtcaacacttacgtaatcactagactccatttttaaatatagacttgagctaagacattttcagatgaaggctgcatagtttctctaactggagatatttgttacagtgaattatgaaatctggaccttatttcaaatctgatttttgatgttatgtggtcagatgagttcagatttagcctcctttccctgtcttgcctttatttcaagttgcctggcacagagtaggactcaatgttgtgacgaatgagtgaagtacggaaagcctgagatacaggagtcaaggtgaagcagaggttagaggagagatgagaacaagtgaggtgcactgagaacagaattaacaggatttggcatccatgattccaggaagaggccagaaacaacactaggtatgcaaacctaggggagccagagggcaagggaccttttaaaagaaacaggaggagaagctgatttcaagaggaaagaagaaagaggctgagttctgtcttgcatcacactatcctgagtccatggtatccacaggacctctagagggtgaacaccaccagcagtaggaaatttgaaagtgaagaacttttttttcaacaagatatttcctactggtctgggtgaaagctcagagtcataatttatagaagtttataactaattataaagacctgtctttatcgttgctgctaatagccactggaaccagagccttcttgctaaatgcaacactgcactaccaggatgtctgcaacaggggaaaagcaggccagcttcacagtcttccctgcaaatcaaatactcaggacccttccataactctgaatcatttttgtattaatatgagcatccaaagaggcagtggttaagtgcttagatgctggactaagggtttaaatgctgacaattcacagccatgtgaccttaggcaatgcctctaatatctctaagcatcagtttcctcatcyataaaaggtggatagtaataataattgccccataggattgtttgaagaattaaatgatataatacatgtaaagtgcrttagcacagtgctttaaaaatgttaacattttaaaatatggcccttaaagatgttaacaattattgcccaagtgctacatgataaaaggatacagcaaaatcatttccacgaatgaaaaactacatttaaaaaaagaaattgcaaaagagagaatgacgtttgttcagtgtttctatacataagtttttttttattattatactttaagttctagggtacatgtgcacaatgtacaggtttgatacataggtatacatgtgccatgttggtttgctgcacccatcaactcgtcatttacattacgtacttctccttttaaaaggygggtggtggtacttgcctttatgaaaacagataatttttattaagcattttattgaatatcagctatgccaaatcaacatcaacaaccagaatcccatagattaagaaaccaggataaatataataaatggtgcttgcttttcaaccaaattaaagtataattattataaatcagggtgggacgtaagatctgttgtgttacttgtgggaatggatcacaaaaggcattatgtatacactccatgattttaaagtatgttaaatattgttacacatacgtttttatttattgaggccctgttgcctggaagtgcccagatataaactgtatgactctggcccggtcaccgcctgcctagacaaagccccttagtctaccactctcattcaacaaatattactgggcttcttattaagcaccacgcacttggctaagtgcgacagtacataaataaaagacaaccgctccggacccctgacagcatgcacagggcactcatcgtctctctaccccatccgaggacacacaggcggacgacggcaggaagggtccctggggagccgctggggacacctcacctcccgctcggacagcggctcccccacccacggcagtgcccgctcctccacggtcccggccagggcagggcgcagcagcatcctcaccccgcccggccaccctcccacttcgccccgcagccagcgtctccatggtaaccgtacacaaactacctcccgccgccgccccggcagccagaccgcagggccaggccgctgcagggcgggagaggcgggccggggaatgagcttggcgagggctcagggaaggaggcttccgacctgacccaaagcacctgtgatgagcactggagatagcagcggctgcgaggttcaattcatcctccggctctccccgggtagcggccagggatgcagcgctggcgcgggcggggtaaccccacgacgccgctcggccactgggcctgcgcgggtcccgccaacgcatgcgtagaagctccgaggcgtggcgacggccggagcgggtgggaggagcctggagagggctgtaggccgggaggtcagatcagagcaggcgtcgtgggcgggtgtccgcttttcgtttagcaatttgccgaaccacatttgttgctcccctgccggatcccagcacctctgttaaataacagcaggcaggacggaagcttaatgcttgtgggtaagaaggatttactggctcaggttagggctctgtataacctggagccacttgctgagcttctgtttcctccgatgtcaagtggcaggaaatattaataatagtacctaggtaggtcttgggctgttatgaagactgcatgagaaaatagatgtaaagcgctatgcacgtggcaatcaacgaatattaaactgttggctgttattaagcccttgcatttgtacagcccttcagttcgcagagtgtatgcacgtaatcgtaccttctgagtctgaggtaggcagcctggcgtccccatccacaggagaggaactgggggcctgaggtgtagtgagcaggagaaggagattccagtctaggtctcccgtggccaatcgttttttgttcgtgcatcatcacagttgaacggcaaaaagcactccatttatgtgtttctagtttaaattcccttttctcctgttagaccatttagcaacactgtacagtgttaaataaaagtgagatcataagcactctccattcaggtttgcaccacgttttataaatatggagattttccagctgaagtgctatttgtcatcaacactgggaaaatgccacttcccttggtgctaagcatcttgtaaagaataattaaattgaaaatatttttgagcacatactatgtgtaaggcatcgtgccaggtgggaaattatactaacctgaactaaaggaatgtaaatattcttcaaaatactcaagaggatttcaaacataacagaaaataaatacctattcgttgattggataattttaggacccgaaacagccctggatttttctgctcattcttagataactgacagtcttgttgtaactaaatctcaaccacagcttcatttcaaaactataatgttgggtgcaagatataaacaaatgcatcaaacttcaaaaagtcttcctcccccattccagccccaggcttaaggtctctagctggccttccctgaaggggtgcactaggcttaggcttgtccccgacccccacccgcccctctattcactagaggttgtttaaggcccagcttggatcaaactggcagtgaggaggaggaggagaaggaaggagatggagcatttcttcctggagttgagcagcttcaagcttgctgtactggcttatggttaaagcagctcatgtaggtctttcctggtcctttgtagtctcccactgatggggacctccctcctgggggcttctggaaatcctaaaaacccagggtttattccacctttcagtgcccctttagataggtcccaagggaaaccctacacatctgttaccctagtgattctgagagctcaggcttgtctgggtgcagccccttctaggctgccataggagggagctttagcttacccaggagtgagtcaggctccagttctccaggccacctaactacagtctctggcagtcccaggcccctggggaagcccctctcgctggcttgagatgaagggcatagcaccccacactcctttctccaaagaagtttccccacacatcttccctttccactctctgaccccttatttttagcctcagcctgggtgagaggctgagggggttttaggtttctttgtaacctgccctatggagactctgcctcacctcacttggaactgatgattacataattaccatctcagtggaaacatcaacctaaaaacctctggtacagccaattactagctgtggtcttgcaccctaggatcttggtctaaaatagaccataagcaagctactggaacccgatgctacccaactcagctggccaggaaatatctgccgggcaaattagcacaattgaaaagaatgacatgggcagaattagaggaagcagttatttgaagcaatgaagctccccaacttacctcactgaaggacgctatatgagaaaatacttaggctgtcaacagcagtggcgtattatactgacctggctgtttctccacagctacctgatggctatttcacatcggttttgtaagtggcattgctttagaaacaaaactgttgacatgtttcacacactttagagagattaaagaggaagacaaagtattataagtatctgacatttataaagcactttatggttcccaaattgcttttatttggaacacttcacttcttttgtctaatttggagtttacaataagcctggaaagtaggtatctcaatttgagatggaagaaaactgaggttcagggaggtgaagtgatcagcccacaggcacatagctagtaaaaggaccttgagatctgggattcttgatgcccaagttcagtacgccatgctgctattatacatgcattttgcccccagcatggaaaggtactttctaggctactgaaggtgtcaagctatgctctttatttcctcctctcacttatcccagagctgcatggggctatagggatcaagaggaactgaagaatctttacattcacttgaaaatggcttctgaatttctggattttgaattaaagcaagaattatataggcaggagattgggtaatgatacaatcttatgcagtctcagatgcaaaaattgtaacagaatgatgaactcatagatgctttttatccacagactctactagtagattttacagtttatatcatagtttctatcacatacacctctgtttaatatctatagctcatcctaatttacctattagatatattcttgaaaagatacaggttaaataaatacttctttaatgttcacaattccccccactcccccccaccacccagtgatttttatgactacaactgagctgtgactcacagggggaagaaatacttctggcatggaatgaaaattgccaatttagaatgctaatattcacttcaagacactttctgcttttgtcaatatagaatcttggtgctttaattatatatatcacacaatatagtgtgaggagttcatcaaattgacagcctatgcaatctttgcatacaaatttaaaggcacaaatacattaaaatgcaactcgctggaaatttacaattcaatgaaaattaactaacttcatggaactggatagacatgagactgtggaattgtcctaaaacttatcagctaaaatgtttatgtaaatcctgtctttattaggcctcagctgtgacctgtacacctaagtattactttacctttaagtacattatcccgtaccacccctgccaccccaggccacgtgctccaccaagctgccaagttgttgacaggagtgctaattaatgagggtccatttaattaccagtagattacagagtctctaaggaccctgcatttcactggaagggaggaggttctagttttcagggagtatgtcagtgtcagtaggattgtaactatgaattacttcatcctgaacaactcttggatgttaaaagggaccaattaagacaatcagaaacccaatattctttgtccaactcacctatgagacattactaagtgagcatgcctgtatcttttggaagcttttgcctgcaaataacagaatattccaccaaaagtagcttacacgccaaggacatttattgttttgtttaacaatcactggaactgggctgcttcaggattggccctgcagctcagggaccaaggaagatcagtcaagtctccccacatggtcacaagatggtggtggctgcactgagctgggaaagggcaagggccctctctatgtatatctctacactgagaaggaaaacatttcccagaagccccttggtcactttgtccttacatcttattggccaggctgtgtcacatggccacataccaggccctggcagagatggatggggctaccactactgtgactgatttcaatccatcaaggctcatccctcgggttttggggggaggagaccactttgagccctttgctgccacaacctgaagcaaactggatctctgttcagcaggaaggaggggcagcggctattggatagatctggaagaccgccacagtggtctggtgacaggtctctccagtctgaatgggcaactgtcacaatctcttgatactgtaatagagagtagtcctgagaatcaagagattgtggcagttgcttgtcccacctggagagagctggaggtgtaacacaaggcagggtgctctatcttggtactaactctcaggtgacgcctggtccctggtctcactgtggctccatcctggctgcacagcggagtcacctggagagcttcagcaccatctcggcccagaacccacccagatgaactgattcgctgcctgggataggtgggagtatgggagagtggagccagccttttagagctgctgaggtgactgtggtgtgcacagccagcctggagaacctcagccctggtgaagccagagctcccctgcctgagaacctcagccacaacccagcaagaggcagagctgcctgaagaaaccctggctttcagaacacaagggatggagaggagcctaatttatgcatgacccagagatgaaaaaccccatgtcgcagactcatggtgctctccaagacgtgtacccccccatgtccacccccaccaacccccaccatcaccgggccatcttgggcactttttgcatctcgtctccaactggcccctctgaccccactccactcccttcctgctccaagagtgttgttcactctacactcagcaaccaaagtgagtgtcataaaccacagttctggatatgccctcccaccccctctgcccaggagctctcaatgtctgcccactgaccaccaagtcaagtctcagatcctccgtgatatgcatgatagtctgtagttctctgttattctaagaactaggacttatttgggggttagatgtcataggctctgtgctaagtgctttgatcactttaaatcagttcccttccaaccctaaagtactattattatcctcattctacaagcatagaaattgaggttttgtttcttcccttaaccaggtcgacatacaggtggtgaaagtggtgaatctaggattcaagcccagcttgttgggtgtattatggttctctagagggacagaactaatagaatatatatgtatatatacatatatgaatatatgtatatatgcatatacatatatgaatatatgcgtatacatatatgaatatatgtatatatgcgtatacatatatgaatatatgtatatatgcgtatacatatatgaatatatgtatatatgcgtatacatatatgaatatatgtatatatgcgtatacatatgtatatattcatatattcatatacatatatacatgtgcatgtacagatattcatatatatacatataatacataagaattcatacatacatgaatatgaatacatatatacatatatacaggaatacatatatacatatattcatatacatatatatgaatatatgtacatatatgaatatatgtacatatatgaatatatgtatacatatatgaatatatgtatatatatgaatatgtgtatatatacatatatatgtgtatatatattcatatatatatatatatataaaggagagtttattaagtgttaactcacatgatcacaaggtcccaccataggctgtctgcaggctgaggagcaaggagagccaatccgagttccaaaactgaagaacctggagtccgatgttccagggcaggaagcacccagcacaggagaaagatgtaggctaagagcctaggccggtctc

SEQ ID NO: 98012 - DNA, 26011 bp, Homo sapiens
gtggaaaggatcttgacaagtgagatattctggatacgttgatacaatcaaatacgacgaggctagagagtcacctgcttggggattaaagttctgagagttgatgtaatctcaaattagagagtctataaagagacaggaagagatgagaaggtgtatatttcgaggtacaaagcagaagcagactcagtaaaggaaaacaagagagatgggacccaaaatattacttgagagaagccaaaagtacaaagagcctcataaagcagcaatgtcaaatgctacagaattaaggagatggtgagaataaaccaaagaattttacaagacagcaatttcaagaagcttagacatcttgattcagagctataaaagggttcattttttattaccaagttttaattagttttcttaattcccaaatgggatcccaaaaagttgactctgaattaactgaaaaggaggtcatccaggtgggcctggtctaatcacataagccttttaaatctgggtctagagaggaaagaccaaagtaaaagaaatttggaagtcagagaggcaagctcctggtagcctgcacgaaagcaaacatcaatgttatgaatggcctctagaggccttgaggcaaggaactgtaggcaggctgtagaagctgggagcagtggctggcaagaggcagcaagaaaagaagtacttcagtcctgtaactgcaagggactgaattctgccaacaaactgcatgagcctggaagaggaccctgatctccaaataagaaccacagcatggctaatactttgcagccttatgtgacctggagcggagaacacagatcatccgtgcccagacttctatcctacagaacccgtaaggtcattcatgggtgttgttttaagctgctaaatttgtggtatttgttacgcagcaatagaaaactaacacaggttcgttccactttcctatggaaggggctgcttctgttacctagcagcaaataggaagagaagcgaacttgaaaaaacaaagcttgacttttatgatctctaactcactattcctagggattctgttcaattactgcttgagtcacagtacttggtttgctatctacattttgccaaaatatcaacttcctgaaaatcatgagcagtggaaacaggctttttaattttcaattttagaaagtaactttggcaattacgcaaaactagaagtaactgggtatttaggctccttgaatgtcaaagtagtcccagcgcctggagacacagatccctgccctaatctcagaaatgagccacaaggtcatgactcctgtctttccttgaagaccaggagtttcagctccacaaatgaaaatctttcgcttttgtttggattaagaataactcagaagtgttctcagctgcgaaaagaaaggcactccctcccagataattacaaccttgacccctaaaatgtggactctcgctagaagtccaggcacctccttattaaggatgcaacaagccgccgctccgctcgtcctgacgggaactgtagttctcgcccgtcgaccttcagcactgaaaacctatcgcgcgcccaaccggcgacccagacgccagcagccaggattggtcctggacgggggcagcgcggccctgattggactacatgcccacgaagccgcgcctcccgctactctccacaccccaccccgctgctgcaataacctcaagtcatcccagtccggcgaactccctggtggctgcctagctgcccgcccgggcctctcccgacgagggtggccctgaggctcgcctttgtcctggaggctaggcagcgaccaaggctcccccgtttttcgctgacggttctagttcagcctcctcacgcgcctccgggagccccagtgctcacctgggcggcggcggtcacacccgataactgacaggcccgcagcatctcggtcaagcggacggcgctgctggtggactcgagctgccgcggcggcgcgagttaagtggaggcgtgcttgcgtgtgtgcgtgcccgcgtccgcgcccggcgcaccggaagcacagcggacgccactgcgcacgcgcggccccttctaccgtccccgactccgcggctcttagagggtgggctgtgtcccggctgcggaaacgccaactccaggcgattggcgcgaaggaggcgaaaagggcggattccctttccgggtcgcgcccgggctgcaggtccttatccggaaggggttactaggtgaacactgccggagggagagcgctctgaaatccattcttcagccgcacgtggaaaatggacagctgtgactcttaaagagaattaaagcaacaaagcatctcagcctgctctatgagctggatatttcgtaggaaagagccgatttggcgaaagttacgtaaacaatggaattgtctcagtttgcgcctttgtttcgtttgacagcccttcagggagtcatcgtgattgctggagacggtgaactaacactgtggggacccttgtgctaaacgtgtcaagtggcacaacaaggataggaacacgggtcctttggactccacagcttctgctccttccagattaaaccacactgctttctccaagttgttactgtagtaacatcattttggctgcagtttgtggatgggttggaaaatgggaagtcaatgcagaagcaccgttgaaagtattccactgggcagggcgcggtggctcacgcttgtaatcccagtacttcgggaggccgaagcgggaggatcgcttgagcccagaggttcgataccaggctgggcaacacagtgagacctcgtctctatatagaaaaataaacaaacaaaaaatttaaaaagaaaagtagggccaggagctatgactcacgcctgtaatcccagcactttgggaggccaaggcgggtggatcgcctgaggtcaggaattcgagaccagcctggccaaaatagtgaaaccccgtctttactaaaaatacaaaaaattagctgggcatggtggcgggtgcctgtaatcccagctactcgggaggctgaggcaggagaattgcttgagcccgggaggcggaggttgcagtgagccgagatcacgccattgcactccagcctgggcaacaagagcgaaactctgtctcaaaaaacaaaagtattccattgattctgtaatcaaaataaaacacgttaaatattaagcatggtattaatactccatgtatactccagaattaatatgttcgtattaatactattagcatcttattgcaatatcgtggaaactaacttttctatcttctattggatttgcaaagtattccaagtcttaactgggtaatttattacaatatgtattctctctagaggtagactgcgctatgacttgtagcatggagagatggacttgaaaattatctgaaagcaatagttatgtttgtatatgttctatgttctatggtttttaggggactacagtaattacatatgtttcatatctctttcacttagcttccagagcagtctcccgttttctttagtaattttagcaattgaattgctgcctccctgcccactgctgtcatgcccagtggtgccggtgtgatgacttttctaacacccttgtctttgaacttcttaatgccagtgaacgctttcatcctgcttcagtcatgtggtgccagtgtgatgacttttctaacacccttggctttgaatttgtcaatgccagtgaatgttttcatcctgcttcagtcatgcacgtcacagccacaacttgcgcctgaacatcattagcaacctctctagcttcaagatctcaaacctcaaaattagcctcccaacccctcataacctacgtggagagtcctcactctccacttggaagttgtcaatatttttgctttaaaatgttatcaggcaggccaggcgctgtggctcacacctgtaatcccagcactttgggaggctgacgcgggcggatcacctgaggtcaggaattcgagaccagcctggccaacatggtgaaaccccgtctctactaaaaatacaaaaattagctaggcttggtggtgcgcgcctgtaatcccagctatgtgggaagctgaagaaggagaatcacttgaacctgggaagcagaggttgcagtgagccaagatcacaccactgcactccagcctgggggacaaagcgaaactccgtctcaaaaaaaaaaaatttgttaccaggggctgggtgtggtggctcatatcccggcattttggcagactgaggtgggaggatcacttgagcccaggagtttgagacctgcctgagcaaaagagtgagacctctcccagcactttgggaggccgaggcgggcggatcatgaggtcgggagatcgagaccatcctggctaacacggtgaaaacccgtctctactaaaaaaaataataataatacaaaaaattagctgggtgtggtggcaggcacctgtagtcccagctacttgggaggctgaggcggagaatggtgtgaacccgggaggcggagcttgcagagagccgagatcgcaccactgcactccagcctgggcaacagagcgagagtctgtctccaaaaaaaaaaaaaaaaaaaagtgaaacctcatctctataaacaatttttttaaattagcaggggatgattgtgcatgcctgtggtgccagctacttggaaggctgtggtgggaggatcccttgagctcaggaattccaggctgcagtgattgcaccactgcactcagaccctgtctctaaaaaacaaaatttaaatcaagtcactcacttgttcaaaaatgtgcagtgaggccaggctcagtggctcacacctgtaatcccagcactttgggaggccaaggtgggagacctgtttgattccataccaaataattgagaccaccctgggcaacatagtgagacctaggtctctacaaaaaatttaaaaattagccaggtgtgtgcctgtagtctcagctactcaggaggcttaggtgggaggattgcttgagcctaggaggtcgaggctgcagtgagctgtgatcgcaccactgcactcaagccttcgcaacagaccaagacctagtctcaaaaaaaaaaaaaaagtgtgcaatgactcccgttgccaattcaaagagcttttatgaatgtttcaatatacttgtctagcgtatgtgcctgtttttggactcaaagtggccaccataggtgggagatcaagttggcaacaatagtgttccaaggtaatacaccctatatctcgctctgtaccccaggctggagtgcggtggctcaatcttggcttgctgcaacaaccgcctcccaagttcaagcgattctcctgcctcagcctcccgaatagctggaactacaggcgcgcgccaccacgcccggctaattttttgtaccccttagtagagacggggtttcaccctgttagccaggatggtctcaatctcctgacctcgtgatctgcccgcctcggccgcccaaagtgctgggattacaggcgtgagccaccgcgcccggcaagaattttttttttttttttgagatggagtttcgctctttcgcccagactggagttcagtggcacgatctctgctcactgcaacctccgccttccggtttcaagcgattctcctgcctcagcctcccaagcccggctactttttgtatttttagtacagacgggggtttcatcatgttggccaggctggtctcgaactcctgaccttgtgatccgcccgccgcggcctcccaaagtgctgggattacaggcgtgagccaccgtgcccggccccaagaattttttttaataagaaattttgtagaaccttctataggcagtcgttttacagcggcgaagaacggaacccggcagatgacattgaataaatgttgagtggacaactttgttcttttcctcttccttgactccgcctccttgctttcccttcattctcttttgctcttgtgcttttaaacccaaagcggccgccgtaggcgaaggtgaagatggctgcctctgcckttgctggtgcagtgagagcagcttcaggtcagtgragagcgayatactccatgcatgccttcacagaaggggaaactggtgcgggatggaatgggcgtttagactggaggttaacaagcaaaaagggtcattatttaagttaagaaggttgcgcccaattttctctggggcggtgtgaccggcagcccgtaccaagtcccccgactcggactcacgcgggcctgtgtgtcacgcatttgccgcttccttaccagctttttttccctagaaaagaagccagagaaactggaacggagggggcgagggaaaccaaaaagtctcacctaactttctgatttagaggctacgacctgccattcacgacctttaaccttgagaattaatgtctcctaacttaagattctacacctctaaaatgggggtcataaccacctacctggggattaaatgagataatgcacgtaaagcgttttgggcagtgcctgacacatggtaagcttgaaggctaatttaatttttaactacagcccccggcacaagggctggtatgaggacttcttgactgagagatagcagaagtaaaggcgactaaattaagttgccgtcacgttaagtactttttgcaaaaagttaaaaatcatccaaataccataggatgctcagtaagttactttcacacaaaatatattgttaggataacattttgtgggagaatatacgagatcagtcaagaaaatgcagcgatgtaaattttaccgttagagaaaagctttttttatgtggagtattttttgtgttcgcgaaatataatacatatgaagaaaattttatatagtatgcatgaatgatttaacagttctaaagcaaacacctgtttaacactcaggtcaaaacagtgcactaccagaagcctcctctcccctatgtatcaaaattctctacttcccccccagatataaacactgttctcatttttatagttactgttaggttgcctatttttcctatagtagttttagcatccatatgtgcatctcaagaacatagttttgcctggttttgaacttcacatgaattggttcatacagtatatacgctttagtatcttcttttacattgtgagattcattcattcattttgcgtagctgtaatgctttctcattgctatataattctttttttttttttgaracggagtttctctcttgttgcccaggctggagtgcaatggcacgatctgggctcactgcaacctcctcctcccaggtttaagtgattcccttggagtagctgggattacaggcatgcgccaccacgcccagctaattttgtatttttagtagagttggggtttctccatgttggtcaggctagtctggaactcctgacctcaggtgatccgcccgcctcgacctcccaaagtgctgggattacgggtgtgagccaccctgcccggcctgctgtataatattatatgactgtgccacaattctccatttccagtttggggcaattatgtacaaagctgattgatctcatcctggcgcatgagtccaattgtttctgaggatgtgggtatgtgtgaaamtcgctgtggaattgcctggtcagagaatatgtatatattcagcattgcctgatattgccaaactgttgaggcyccacatcctcaccaacacctgatattgatattgtcaatagatattgtcagacctacaaatttttgttaatctggtggctttgtaatggtatctcattgagatttaaataagcatttctctgattaataacaagctatagtgtgtttcacatttttattggccttttgaatttcctttatgaaatatccacttaaatattttgcccattttcctattggattgtttgtcttatttatttagagtattttttgttttgtttttgtttttcatttgtgtgtgtcctttagcttctcccactcaggcttgtcttttttacattattttggagtgccctttgacgaaaagttgtttttcatctacttgaatttatagttcttgtaatttttaaatagatgatgtaggtagttatcaacttactattaatttagattctactgaaaacaatttaaagagtgatgtgacagcttattttaaaatgtcagtattttaaatatgctggaaattatagcctttttaacaatttaaactatttgatattttagatattaagaatttgtgaaagggtagtttttcaaaattcttttaggaaacataggatcagaaatcttgaagactcctggtttcgatactgtcacagtctcctccactcccatccagtgcagttcatgtcccccattcattcctttgattcatgccacatagggccattgtaattccccaaatgtacatcgtcacctttgtacgtcctattccctctgtctcttcgtactctktcaaaactctggttttgcgttacctcttttgtgaaaacatctgtattctctatacaacagtgtgtttagagtagactagtctgtatgaaaatgcccagacggggcagaggactgaaggaaattagttactttccttgatgtactgcacttttgttaacaaagctagactgttaggtttccctcacaggcttaatcacatgattgatccaccagaaggcgcagtagatagagcctccccacatattttcccatgaactgctctcaaccaagatcccagttcctgttgttcccgtaaccattttttctaacttcagtgtatttattcctgatttcatcttgttggttttgatctgtttttctctcttactaagatcacttggagttctgatactctgtgtcttcacaaatacattaacaagccattgttcccagcttgctttttgggaaaattgataaatatgtcttatgcagcctcaggatcttcataaaaattgagaacaaaagaatttcrtaggttttaattttttaaccaagagataccaaaatctgatgacgtgtgaaaattggaacattttcttgtctacagtcctccaatgcacttaatcttccaaagattacctcctgccttattacatctgcacatcttttcagttctttgcgatttaacttatttatttgatttccaaggccctatgtaagggctctctcatcagttttctgcaccaatgtttatgctacccttttcagttgcaaattgttatctctttttcttttgtggagacagagtctccttctgtctcctggagtgcagtggcaagatctcagctcactgcaacctctgcctcctgagttcaagcagttctcctacctcagcctccgagtagctgggactacaggcgcgcgtcactctgcccagctaatatttctatttttagtagagacggggtttcacatgttggccaagctggtcgcaaactcctgacctcaggtgatccgccggggcctcccaaagtgttggggttacaggggtgagctaccacacctggccctgttatcactgatggccacatattaatatacaggttaggtatctttaatctgaaactttttgagtaccaacatgacaccacaagtgggaaattcttttttttttttttttttgagacggagtcccgctctgtcgctcaaggtggagtgcagtggcacaatctcagctcactgcaagctctgcctcccaggttcacgccattctcctgcttcagcctcccaagtagctgggactacaggcacctgccaccatgcccagctaatttttttttgtatttttagtagagacggggtttcactgtgttagccaagatggtcttgacctcctgatctcctcgtgatctgcctgcctcggcctcccaaagtgctgggattacaggcgtgagccacygcacccggcccacaaatggaaaattctttacccgatctcacgtgatcggtggcagtcaaaactttgtttcatgtacaaaattatttaaaatattgtataaaattaactttaagctatatgtgtaagatttatatgaaacaaatgaatttcgtgtttggacttgagtcccatctccaagatatctcctttatgcaaaattttaaaaaatctaaaatacttctggtcacaagcatttcagataatactcaacctgtatcatctttgctaagtatccctcttctttattatctgccattagcattcattaaatgttttctctgtgctacccttccaagcactatacatgcttcatctcattcaagtctcattacctctccataattaacttcatttaaatttgaggaaactggggcacagagaggttaagtaacttgcccctggttacacagcaaggaagtcatagagctagaatatgagcccaaatcatctcattcaaatcctagcacttctatatcaacatggcccctcatttgttatctgaaatcagtgcagtagaaaataggagagtagttctaagtcccagccaagcatcagactcaggtggagtatttttcgctttttttttttgagatggagtttcacttttgttgccgaggctggagtgcaatgttgcagtctcggctcactgcaccctcttcctcccaggttcaagtgatcttcctgcctcagcctcctgagtagctgggattataggcgcacaccaccacacccggctaattttgtattttcagtagagacggggtttctccatgttggtcaggctggtctcgaactcctgatctcaggtgatccgcctgcctcggcctcccaaagtgctaggattacaggcatgagccaccatgcctggctggagtatttttcttaaccaactttattgaggtagaatttacatgccataaaattacccattttatgtgtacagctttatgtttttttattaatttagcaagctgtacaaccattaccacattccagctttaggacttttttttttttttttagtcttgtattagtgcatttttttttttatactttaagttctgaggacattttcatcatcctgyggaacttttttaacacacaattttgagtcccaaactggacttcagtcagaatttatgggtggagtcggagctccacgagtgattccgatttgcagccatgaactattagtctggccatagtgggaaggactgataagaggactgcatccggaccacacatctaggctctctgaaatctgccttctgacctgttccaccccactgcccactacttctccccaggcgtctctgatagtcaggcgaacagtctcagcctctgaggcaggtctggtcctcaacccatacatgtacagttgaccctggaacaatacagcaggtggggtgtcaaccccaagcagttgaaaatcaagttgaaaaaaagtataacttttggctcctccaaaacttaattactaatagcctactgttggccagaagccttaccaataacataaaccattgattaacatatattctgaggccgggcacggtggctcacacctgtaatcctaacactttgggaggctgaggcaggtggatcacttgagcccaggagttcaagattgggctgggcaacatggcaaaattctrtctctacaaaaattaggcatggtggcacatgctgtagtcccagctacttaggaggctgagrtgggaagatagattgagcccaggaggtcaaggctgcagtgagctatgattgtgccactgcattccagcctgggccacagagtaagaccctgcctcaaaaaaagaattttaaaaacatatatcctgcatgttatatgtattatatactgtattcttaacaataaaacaagctagagaaaagaaagtcataagaaaagaaataggttactgttcattaagtggaagtggatcatcataaaggtcttcatcatctttacattgagtaggctgaggaggagttggttttgctctctgcgattgcagagaaagaagaggtggaggagttagaaggggaggctggaaaggcaggcatactcggtgtaactttttttgaaaaaaatctgtgtgtaagtggcactgtgcagttcaaacccatgttgttcaagggtcacctgtatttgtttcagtccccatgcctttgcttatgttgttcgtcctacctgaaatgtgctcctcctcttctaagggcctgctcactttctagagaactcaagtgcctcttctcttttcttcgagaatctttctgtcgccactcttgtctctccaggaagggtccatgctcttgcatccctcacctgccattgtactgtgtgtgggaattctgtctcaccagagtataagatctgggaggtgggaataaatgttacacacatctcttttcttagtactggacatagagctagcagacatccgacttggttgtgatgatggttgcacagctctctaaattttccaaaaattgttgaattatatacataaaatcagtaattaatttatggttataccttagtaaggtggtaaaagcttcacagatgagtctgatgctcagggcacgttaattatgtttaatacttggtggcagtgatacatctcttaatttttaatatctggatgcatattttggagtattaaatatatatgctcctatctttacaggaatcctacggtccctgaatattttggcatcttcaacctaccgcaactgtgtcaaraatgcctctcttatttctgcattgtccactggacgttttagtmatattcagacaccagttgtttcctccactcccagacttaccacatctgagagaaacctgacatgtgggcatacctcagtgatccttaataggtagagtatatttctttgtggggttttttttgttttttgttttttgtttttttttgagacrgagtctcactctgttgcccaggccagagtgcagtggtgcattctcagctcactgcaacctccacctccggggttcaagcaattctcctgcctcagcctcctaagtagctggraagttctgggattacaggcgtgagccactgtgcctggctggtagagtctatttcaataaacatgatgcttagacaaactttccaagatattcatgcctgcaggggtatcctagaagtaggtggtattctttgcctacctgcagttaattatgtagacatctgcttgattgagtgggagactgtgactgacatccatgtatctaggcgcctgcagcaggaaaatgccaaacacagcatgcttctgatgttgtatgtgtgctttcctgcatggaggctgtcatccaaagtggagggtgcacaagacgctcagcttataaggatgggctgcatgtgttggtcattcagtcagcaaatactcagttaaatacccctgggtgcctagcactgtacttggcaaaaaggacataagggtaaacaaattgaagtcctcaaggagtttgcaatctggtgggaagatggataagaaataaagcgatgataatagaatgaattattttacagggattgagggggtaggttttagaagattgcgagttggtgatggttgctattctaatttatgcttaatgtcatgggtcattggaagtmatatkgtatatgaaaagttagttccagtccattggagcagctttactcatttctcagtatagataatgaattttaatcctttaatcagtctgattacaagctaaaaattttaaaatatatttttagaatgscccccrtgcttccaagtgtcctgaagctgccagycagatctctaacatacttcagtgcaagaaaaggcaagagaaagaccgtgaaagctgtcatcgataggtttcttcgacttcattgtggcctttgggtgaggagaaaggtgagtcttcacactgttactaaattgaaaaaggaatgtgaggccgggcgtggtggctcaygcctataatcccagcactttggcgggtggatcataaggtcaggagttcaagaccagcctggccaacatggtgaaactccatctctactaaaaatacaaaaattaggcgtggtggcaggcacctgtaattccagctactcgggaggctgaggcacataattgcttgaacccgggaggtggaggttgtagtgagccaagatcgaaccactgcactccagcctgggcgacagagcgagactccgtctcaaaaaagaaaagaaaaaaggagtgtgagcagattaaaatcaaacagaattcagaattcagccaggcactgtagctcatgcctgtaatcccagcactttgggaggccaaggcgggcagawcacttgaggtcaggcgttgtggcaggtgcctataatcccagctgcttgggaagctgaggcaggagagtcgcttgaacctggaaggcagaggctgcagtgagccaagatcacgccactgcactccagcctaggtgacacagcaagacttcatctcaaaaaatgaaaagaaagcagcttaagaccagttttgcaaaaccatttttgagatttagtaactgcccaaatcctaattccctttcattacttggaaattaaatctttaaaaatcaaaatttggttccctgtaaaaataaaatagttggtagaactttcttgatgtttgaaaggttgaaaggattctcccgttttataaacagtactaaattagtagataaatgggttggttggaactctcagctcatttctctattgaaacactgtggtgggtagtttcctacaccagtcagcagaagctcatataatccataaagcagctaaactaaaggtctaatgttctgagttttgtgaatttgagaccactggaaacatttcttcccttttgtgtgtatgtgtttttttttttttctttttttgagacaaagtgtcactctatcgcccaggctagagtgcagtggcacaatcttggctcactgtgacctctgcctcacgggttcaggccattctcctgcctcagccttccgagtagctgggattacaggcatgcaccaccatgccaggctaatttttgtatttttagtagagacgggttttcaccatgttggccaggctggtcttgaactcctgaccttaagtgatccacctgtctcggcctcccaaagtgctgggattacaggcatgggccgtgacgcctagccccaccctttggtttttataccagttatttccaggtcctcttctagccctaggtaaaatgaaatgggtgggtttccttgccttcctttccatgtccctcttactgggctctggggccctcatgttactgtaaaggacccgatcatactctccagtcataatacctagcttcagttcagggctcccgaaagtataccctgtatagaatgccctgcctcttcaaaatctaattttcagagaaaaaaaaaatctgggtagatgaattcaaactaatgtgtaaaacaaagtattttccatgacacggtttcatccagcagtccttggtatttattgttcattmcctccttccatttttgaatctagagattgtctaaaaaatttcaagcattttcatagtggttccattctgtgaataatctttaaaggatactggtggtaatgagcagggcaataaattaggtgtttgtacgtcagagatccatagtaacccagtttggcctgcaaactatgaaattattacacaaatgtggagatttggctttaaatgtttgcatttaaaattgtaagcagtgagtagcaaaaatctaacctctagcattctaaaaccagaactcttaaataacctttccttatttcatcactgtccttatagaagttgatggtcacagtgatgatactaagacatgtcagaaatgcaaggcacattctcggcaaagagccatggttttgttcagttggtattgtgccataaagagcccttggcttgaaaggacccaagggctcaccrtgtggttttagccagatgttaattaagctggatggcacctaagatcccttctagtttaaacaggctatgattatagtttttataatcaatcaaattttcctttcctgtctttaaaaataaattcttcaaaatgaataatacctgtatgggtgtatatgaaagttctgggttaaatatgtgggttaaccattccttcaccactcctaataatagtcttaccatattcataattccttagaaaagtacttcctataaaaattggtcccttgtgtgtgaaaataataaatgaagcaatatatttgagaactgtgcttctcagctcttgtaatactcagcctccttaataaatattaatgttgttacctcgcctgcactccatcctcctctacattaggaaagacagtggttaagaactcttattagcctgggcaagatggtgagaccttatctctacaaaaatttaaaaagtagctgggtatggtggtgcacacttgtggtcccagctatacgagaggctgaggcaggaggatcacttgagcccaggaggtagaggctgcagtgaccgtgatcatgccactgcactccagcctgggtgacagagtgagaccctgtctcaaaatgaaacaaaaaaagaactcttattagccctcagacctctgtctgctacttctctaatcaatggtttctttttttaaagatgtaaaatagaataatagtatgttgttaaagattgctgaagagatagtaagatcatacctgttaagttagtgattataattctgtcattatcttgtactttcccagccacacacatttagttttattttctgtgagtttaatttaaataatttttttctaaaatatgatttattactaattcttttttaaactacacatgctttctccatccccctccccgccaccctcccttcccccggccattgagaatcacatctttccaagaaatagtccagcccctatggaagtctggtttttgttcttattgggtctataaaccttgagttgtgaagatacckgttgtttcatacatagtatgatgttttacatttctttgtaatatctgacaggctggctataagaaaaaattatggaaaaagacacctgcaaggaagaagcgattgagggaatttgtattctgcaataaaacccakagtaaactcttagataaaatgacgacgtccttctggaagaggygaaactggtaygttgatgatccttatcagaagtrtcatgatcgaacaaacctgaaagtatagatcagaagtttcacttgtttctcagttattggatatgtatctttgtgtacatatctttgcaaaaatggataagtacaaawcttgatgtaaattgtaycaatgaataygtaaacatacagtgacaacattaaacttagaaaagttttaaaacttaatggatcagactttgccagatttggttagggaaacagaaatttagaatggtgcattatttttaacaaatggtattggcttaactagttgtttcagttatgctcttttagttgcaaggaatctcaagtgggacaaacataaaaagactcaaaagctacaagttagctcaagcaatgtgacattatttcaaggatatgtgccrgggaattcaggaaccacctcaccaaccccatctcccactcagaaatcacctcccagcctcaggaagagtagaaattgggtggtgctcctcagcaggggaaggtggatgtttaggcttgggctctgcatgcatgtgacttgcttctttttgcattgttaactccattctctctattcaccaacttctctacacagcttttgcatacttacagtttctgttcctttgtaataactttaacttgcacctttgaggttcttttctacatgatgaccttcagctcctgctgctagtctccaattgccaagggaatttaactgggccagactacctttttatactaggtctggttgggtcattgtctagagtagggattggctgtccttaagtcaggagcccgctttgtattagcaggtttgcatgcagcaaaaaaacagttatgtgagcagtttcacttggaggttcacatggggtggcagcacacttaacatctaacacaccaggttcattgtgttcataacacttgtcatttactgtaacaacattttttcataggagagtaaatagcccttcagcatgctcattcatgaaacagaagaggctgtacaagtgaagacaagggctttttatgcaagttttgaaagataggtatttattttttctagagacaggagttttgctctgttgcccaggctggagtgcagtggtgcaatcatagctcattgaagcctcgcactcctgggctcaagtggtcctcctgcctcagcttactgagtaaggatatgtatttcttaaaagttagtttatccacttcagatttcatgttttcatttgtaaggataaacttttcccacaaattttcaacaatcattgtagaaactaagggggagaaagtaatctcagttgttttagaaacgaaaaagttaagcattgtttacttgaagtgggcagggaagcagcactgagtaaagttcaattgagtggttacagtctagggcagtggttcccaactctccgatcagaatcatctgggaagcattttcaaacagcaaagtactttgaaaaccattattaaatagaattatgcatgaattactgtttcagatcctttaatgtggtagttggtaataataagatgaaattcctctgttgttagtaaaattatgaaattgaagttctgcagcatgtcaggccaggattattagggagattcctcgaaactagtgtgtgtttattaaaaggagaaaggataacaatagaatgttctaaaaccagaagtccaagtgcgtgtctacttatgggaccaataaataaagaacagacatttgatttgaggtgaggtaaaagcctgaaacatggaatggcattctgttttgatggattttcatttcttcgcacttctgagacggcaaagccaaccacttagaagccttccacatctttgtcacctgcctggctcctgctctctgatgtacctctgggtartgagatggaaatggtgcctgcagaagttggggagaaggatacttttgcacagcctccatgatgtctttattgcaaatatggatgacaagggtctctgttacaggggcctcagagcaccttcgwttctcctctagaccagggacaggtgtagagataaggactggcaaccagagcctcagcatccaaagatggactgaagtgggatggctgacaggcacataacttacgggaaagggaatttcatacatacgatttttgttttgtgggtaggagggcttatcatcaacactgattttataatctgacaataaatgtctttcattaaagagtttacctaaatgatgttcgattatatgtataatttataaaatatttatgtatagtttgtttattcaggtatatgtataatttattgaacacctactatgtcccagcatatctacaaaactgggtacatacatactgtctaactgctaatccacatttccagtcttacaaaggacataatgattagttaagccctaatttagatttgaggaaactgaagctgagagagggttaagtaaattacccaaagtacagctaataagacccagaatctcagtctcactccttgggatcctgtgtatttccctgagtcttctaacatatgaaaattcatatctaaatcaacaagtgactgtaatctggtactataaatactaaataaacacttcttcataacactgtaccaattcagcttttaaattttattactttgctttcctgtcctttgccaactcttaacctagttaatcctagttctgtygacattggaccaggctcagtaaataaacgaatggatttccagcctttttttcccatctgttcctgcttttagtcctctgaatctgcttcttttcttactgctgctttattttacagtgattttgtcaaacatagaatacaggactaaaaatgcaaagaaattgggtctgtgtttaattttgatgtttcaaattttgagcttccaagtctttgtggccacccaatgaagtttgagtctgcctgttcagatgtgaaaggtaagggctgcagcaggtttaagggtggcccttcaccaccctgttgtcacctgcacaggcactcccccatttgcagatgaagaaatgttcagagaagaaaaatgatggaccaaacgtctgtttgcacaattgaaactctaccagtggactattctattttcacagctacctagtttctgccgatgatttttttaaatgtgaaataaacagtgatactttcaggtttgtagttgtgtgatgaactggttttcaaaacatttatatcatctgattttctttccctctcaacatcctatgcaacaggcacggggccaagtcaccaggccagtcggtggctgaacactcagcttctaatccttgctacctcccatatttgaaaaaaagtatttcctgtttccttttaagcccaacattacaaagatgttttttaaaagaaaaatgttaagactttattcaagatgtgtatcaggcattataacaaaacagcagaacttcaacctttggaatactgtaattttacatccctttgatgcacagtccagtatactattttattacagatcattctatagggactacagacatgaactagaggaaatgtgcacagtcaaaatccagaatatcagctctgggagtgtacactgttagaggatgaagcacatcctttgccatttcaaatactgtgccaggtggaggactaggaaggctcaaagatggtcatggttgacaagcactcttatcacaaacacatggatagcttatcacggagaacacatttcaaaggccagcaaagtgagcaagctattcacacaaagccaggagggattatgactaaactctccagtttataagcacaagtccacatctcacctcctcagaacaggtgctcaatggcaattaactaaaagttatgacatgaacattacagactttccagctagcattttgtaaacagcctgtgtctgtaagtcagcaaattaaaaacattcagttgtatcctctagacagaacaccacaccactacatgtacacttacaggctttcacattttatgtcagttcatacacaaatgtacaacttgtcagatacgtaaacacattttgccagaaatatgacagctgctttcagttgtacagtgagtgtctttaagagagaaaccgactccctagtcaacacttgaaggaaaaatagttacatttacattaagacagagtttggatacctttatatttttcaatcttgaatgagaagtaataatacagcatgtctgagaatagagcgcttcaaactttttttggcatagttaagtgcaaacttgataacctgtacttgtcacaactctccattgtaaaatggcgaaaatataggttgttcacgataggattttaaactgctgctaaaggcaatttattgtttcggcaaaaaaaaaaaaattgctaagaagctgtgtaagctttttttttttttttttttttttgcattcgtttctgataattctgggtacttccaactaacaggtaaatacattttaaagagtatattcttcttctgtctggaactactcaatgagcacaaagaaaacattttctgtcttccttaacagatttaggtattggtgggtgtggggcacagaacatgagcaaacagcttctgtttatcctctcagccacaaattcgcttttaggtatattttcctatacccttttgcaaattacaaaatcaccttcagaggaactatgggtagatgggattccaatatgcatatctggcaacaatcagcttcaaatcaaaccctttctggggtggctaagatccagctaatgtgtcatcagcaaaggcctctaatatgtgtttgcgtagtaatggaacagtttttaattgggcctgtttatagttgactgacagtaagttctatatggtatataacactaattctctagtcttctgggcatatctacgaacaaatacaatccaaatattatgagtaactgggttgtgaccactgcatgcattacactgaaagaaacaccaactcgaagcacaaatatattattcttatatttcggctcagctctcagtggggagagcagctacctcggaccacaatgccatttaaaccagattcttttcaaataaaattctcaatctaagtggaaagccccctcagagaatgccttattcccctactaagcaatccaggcttgtataaaacgtctgataaggcctgtagtgcccattgagtatgagtctgctgtttacattctgcacaggccaggaggggaacagaaggtgtgagccacaggtgctcctgggtctgaccagcaagtctaacccatgaagatctcgagctccaaaaccattctagagcccaccattttgattgttacacatgtgtttcagatgtatgttatggcatatctgaaacagcagagttctcagttttttgtgtgtttgtttttgctaagctaaacaagttttgctagagttcgctaaaacaaggtgctcagagtgtaagctcctctgtcaggaaatcggcagcactggtcacgataaaggagaaatcgtcctttgtcaagcacagaattactccttccagcagctctacatgttcccatcctcaagaaattgcaccaagagtgagctacctgcctatccctggaaaagattcagaagctcctaatccagaatccagggaggagatgagcttcctgtgactcttctcttttactgggatgttcccctgacctctcatcacactttactgtgttgtgaaatattgtttctcttagtttgtaacttgtctggtcttttgactaaacaactatctaaagaatatagaccacactcctgcagggaaagggatgtcttactggagttgtatttggaagctttataagcacatctgagacgttctctagaatcaaaatatttgtctatatttgtttttgcagttttcttacatatcagaacctctggcagcccttgcaagtccattatattaaaagccaaaagccataaatatgtacatcatagttcaaagtataagtaccaagaacaaagaaagttgtaaaaaatgctgtgtttgcatttacaggactaaaaactaagtatgcaacagataaattacaaatgtacatctcagcagcataggggtgattctcttatctttctaaaaaacacactgctgtctataatgacaatccaattgtggaaaattaccaacctcagaagacttaaaggtcaccacccccgcccctactacctttccctttagcctctccccagcaaaataaagaaaagggggaaaaaaataaatccttaaaagtggaaggggagagagaaaaggccatgtttgtgaggctgcacactcaaagcacacccagcttgcggatttctatgttattagtgaatagctctttaaggcagagaagaaacattctgtggatccggtgctgttggctcatctcactcacgtggtttcggtggccgaggatgaggtacttttcttcctgaagcgagatcgaaggattctaggcggtgcctggtagagaaaacagaaaggtgtccctcagtttggtgtaaatgtgggatcttttgaggtcagcacctggaaggcattgtgttgagacttccagctcctttggccaaatgcagctggctagggctggggtctccctgaatctccgcaacaggaagcaatcatcagagtcccatcccacatatcgcatgaagctgagccctttgagaggctgatgcctccctcttaaattatgctcctcaatctcccaagggaacggttgtgcagaatgacacatctttcttgtttctgcctgaggagcaaaattatcttaaatgattcagcagaaagagacacctccgcatgcttcctttgcttttgttatttcctttgggaaccagcctaatgtgttttggtacatgcctcaaatttccatcatcaaatttccagtcccctttctggatgagaaacctcttaatgtacagcacaccacaccacaaaggcaaacaccaccttgaagtacaggttgaatatcccttatccggaaatgcctggagtcagaagtgtttgggatttcagattttttttttttttttttcagattttgggatgtttgcatatacattccaattgagcaccccaatctgaaaatctgagattcaaaatgctcctatgagcatgacctttgtgcgtcttgtccacactcaaagaatttcagatttttcgattagggatgctcaacttatatgaagggctccacctcatctctcccacaaatgactctcaagagacccctccttccatgggatacacagatcacaggaggagttcctatttcaatgaaagtgaagggaacattttctggcacagcacttgagggggttcacacaactggccccaacctacccttggcccccgtgtctgtccacttctctgtatacacagagaacttctttctctacactgtgcccattcatgcctctattccttctgactggaagcccttccctccctcctctgtcttgcatatttctaggcctcttgaggacccagctcaaaagtcacttctgcaaaggtttcccggagcccctcctgccactgcccagccatgcacaaccaggcatcgtcacctcctttgttctctcatgttttgtacatgtcccccagcagaggactttgcacccagtgggaagggagtgtgtgggggccctgctcactctctccccaccagactggggacttcctgagggcaggcccatgtcgcattcaccaccatttcctggtaagtggctcagtgctgggcaggcacatacaaggcaggaagtgaatgagccagaaaacaagactcaggccctctcatagagtcctcatgctacagccttaccactaggaaatgcttaccagccacctctggacagacactgaaaacggaaacaacggaacccacctttatagtaatctgcctcttggcaggctggtgaactgtaaacagtaaagcagtttgtgcagctttaataaacaaaagcaaaacagcacaaacccttgggccttagaattctttaggctgggctcctctccccatcaggaggctgcccaggccagattgcccaggccagactcctccagcagtgtccaagcccagaacatcctttcccaaaccctctaactttaaaagggatgcatgtgtgcctcaccttgcaaaggaacctgatgaactgcacatggaggtggtcataattacagtcctaacaaataagaatgctaggctgctcagtgtctgcagaagggaacatttcaaggcatctccccatataagtctcacaagggtctgtacggagacttcctatttgcttcagatggcctctcaggccgtgatactcagcagatggggaataggagaggagaccttaggaagcagagagaaagactggggtccctgcacctgtgctcatgactggtgactccctacccacatcacagagcaaggcccaggaggctccaggctcagccctcctgctgccagaactccatccacatcctacaactgaaaatagcatatatgtcaagggtattggttttggtaaccctaaagggctataccccttcactaacatttcatgaatagctactttataccaggcactatatgctgtgtcttggagatacagcgatgaacaagccttgttcttatttataaaaacttttcaaataacacattctgagttttcttcccccaaaacagtcaatttgggttgtttttcacttgtacgtcaacttagagtggtagttgttaatacctggaaaaaccaaaacaaaacaataaagacctagatactttaccactctcctatttgtttttcttttctttttttttt

SEQ ID NO: 98013 - DNA, 47959 bp, Homo sapiens
caagaggaaagctaaagttaccaacctctctgatgtttcctttccagcacaaacctatagttaagtgattatttaatgcctgcttgatagctctggagggcacaatctgtctttctcactagtgtaccccaacactaagtgcagagttggtacccaatagttaataaatacatatgtgctaaatgaataagtcataaaatacatatgtgctaaatgaatgagtggtaacttcttaaaaacagatttagaacaaaacttgcactaagtacactggtaaactgttcataaaaaggagttaagcatctactatacactgactgcttcacaggcagcattattctgtctttttttttttttttttaacaaggtctcactcctgttgcccaggctagagtgtagtggtgcaacctcgactcactgcagcctcaaactcctgggctccagtgatcctcccacctcagcctcccgagtagctgggaccacagatgtgtgtcaatatgcccaaccaatttttcgattaatatttttttgtagagacaggatttagccatgttacccaggctggtcttgaactcctgagctctagagatccgcctgcctcagcctcccaaagtgctgggattacaggagtaagccaccatgcctggccgcattatttagtcctgatcttaatcctctgaaatactcatcactacatgtacttttcagaggacgaaaccaaggctcagggaagttaggtgattgaatccaggtgacacaaatacaaacagaatgtgggggaggcaggatatggaatagacttaactccaaagcccacccagttcaatgaagggaatgtgatgcaacaatccctgtatgcagaaatagtcaatttgacaacattaaacacatttagtcaaaccttaaaaaaggtttcatcacattttatgtttggtttgaaaggtgctcccataggacacaactatgtttagtaggctaactttgcttttacaattttctcctttctgatttagaaaataaagacaaagaaaccatcccaatctgacagcctagaggaaatccgaaggctgaaacgagagtcccctaatgatgtaaacactccctttaataaagcacaaaaatagtgtcaagttttcatgagtggtgacatgttctgagtgtaaaacaatgttagtctatcaggaactaagctgctcagctctagaagattctatgttgcatggccagtgtcactctaagggccaaggcgacagggaggcagatctgctgctgtggctcttgtctatatggtcaccttgctgccagtaagctaatttcatgagaaacttgatctaactcaaaagttgtgcgtgtggtctcttcccacaaatctagagtccacctgcaaccctgaactgggtaacattgaacaaattacttaccttttgttctttaatcttaatttttgaaactgtaataaaatatatataaattcatcataactgtttcaattagtacagttcagtggtattaagtacatttgcattgtgctaccatcaccactctccatctgcagaaccctttttcatcttgtaaaattgaaaccctgtacccattatacagtaattcttcatctcctctgctaccatcattttactttctgttttgattaatctgactactctaggtaccttatattaagtggaatcacaccgtacttgtccttttgtgactggcttatttcacttagcaccgtgccctcaaggttcatccatgttataggatgtgttgaacttttttccttttttagggctgaacaatatcccattgcatgtatataccacattttatgtatcaacccatccattgatagacacttgggtagtttccactttttcactattgtgaataatgctgctatgaacataggtatacaaatatctctttgagaccctactttcaattccttggatacacatccagaagtagaattgctggatcacatggtaattttgtctttagttttttgagaatccaccctactgttttccatagtggttgcaccattttacattcacactaatggtgtacaaaaagcttccactttctccacacccttgccaacacttactactttctgtttttctgatagtagcaccctactggatttgaggagctttttatttgcatttccctaaaattggtgatgttcaacatcttttcacatactcactggccatctgtatgtcttctttggaaaaatgtctatttaagtcctttgtccattttaaaattgaattttgtgttgttgttgagttgtaggagttctttttatgttctagatatcaatctctcatcagatatataatttacaaatattttcccccattccatgggttgccctttcactctgctgactgtatcctttgataactacctaatttttttctcacctgaagtctgggcatcacagcagctctattgggatgattagaagataacatacagaaaatacagtgtcaaacaaagttcctctctctttgtagaggagaaagtccctcccaccattacaggagtgggatgaagagtaggggcaactagcaaggattccaccagtcagtagagtttgagatcaatagacttaggtttgaagatgacctttgccacttcctagagagacattttgttctctgggcctgaattttttactggaggtgccaccacaaatggtgttgttaagaactgagaatgggtgtcgttaaggactgaaagtgccaagcactgagcagctagctcctctatccatctattcatacactcaacaaatacccagagtgctcactgtgtgccagacagtgttaagtgctaaggaaacagacaagaactgctatgcttacaggccttacattctattggaggaacgggaacagacacaaaatgtatagtctgttagacggcagaaagggctatgacgaaaaataatgcagggaaagggaagagcagagtaggcaagtggtcctagaagcccactaaggaggaacttgggcaaaggctgaaggagttgagggagcaggccatacagtcacctgggcagagggttttacaggaggaagaagcagggagtgcaaaggtcctgaggtggatgtgtgcccgtggtgctctggatgcagcaaggaggtcagggtagccagaatagaggtgagatcagagaggtaacaggagactgaaatgacccctccaggccatttgtaaagacttggtttttactctgagtgagatgggaagctattagaacctggcacaataaaaggtggcagtattattgaaatgtctcaactctaaacttgtttgaaaactccacaattatctttttaaaaattcaggcaacttaaaacacttctgcttttggatgaaatcgtatccacttatggcggtgatgatataattggaatttctgggctagcacactgttaccaatgataccagagctgtggctcaggagtttattcatccatttattcagacttgaggataaaagacaagagtgacacatataagaagctcaaggatagtggaggaagacaaatatacataagcacaaaaagtcactaaagcaccatgacagacaactgtatcatgtgcaaaatgacctcacaaaacaagggaggtgaactgagctttcaggtgtgtatgttgggtaggggacagagggaagtacctccttttggctgaaaggacactgcatgcagagggaatagcttaaagaaaggcccagatgttgaaatatgatggcggtttctggaatatgcaggtggtttaatagggctgaagaagggatgatgttatagctaaaatcagcattggtctgatcatgggagactttgcaggctatgctaagaaaatatactttatctgagggaaatggagaacatttggagggttttaagggtgacagtagcatgactacatttgcactttgcaagaataattttgacagcagtgtggagcatgcacttgagaggtgtaaggggagggtggaaggaaaagacaatttaaatatgagataagggccagaggcaacacagtagcaattgggagaaaaaggagactaagaacaaatagacatgtaggtgacacaaagtaagagcccaataaataagttatatgtcaggagagatctagaataattttccagtttctagtgactattttgcactacgtacaccattttggaggggtaagtaacccctccctttgaagagggatgccgtgttgagtttttttttttttttttgagacagagtattgctctgtcgccaggctggagtgcagtggcacaatctcggctcactgcaacctccgcctcctgggttcaagcgattctcctgcctcagcctcccgagtaactgggactacaggtgcccgccaccacgcccagctaatttttgtatttttagtagagacggggtttcaccatgttggccagggatggtctcgatctcccgacctcgtgatccgccggcctcggcctcccaaagtgctgggattacaggcgtgagccaccgtgcccggccatgttgagtttctgatatgcatttaggccatgttgagtttttgatatgcatttaagatctctgtgtgaaattcaattaaagatgtacagacagctgaacaaatgggtctgaaaatcagggaaataaatttgcgttggggatttaaatttgagactataaatcatgaaagtggtgagattgtctagggacaatatttaccatgaagaaaacattactagaatagaatcttgaagaacatcaacatttaaggagtaaaatgaggtacagaccttgctcaccaatgtgtcattaacgcctagcttggtgcctggaaaaaactggatgctcaataaatgtttgtgaggttatagatcgatagaggaagagagggaggtagaagtatttgtcataaaaataggagaacttgaagacaaataaggttctggaagaaaggaaagtttcaagagagtgcattggagaatgtcaaatgctaccttgatcaaaatgaagactaaagagagttcccttgatttaacaaccagaccgagaatatagcagggtcctagcaaagagaagttaacgcctgaactgacacttgaaggacaatcattttacaaacaagaggaaacttactacgtgcctaattaaccatgtcaggtacactatggttaattccacaaatgcttgttagttaacgaggagactggcagatgataacgctgcagaccaggaccctccccacccttatattcccctacctcagcgcaaactctttcccccagcaccaccggcctcttatccaggcaggccacgccggcccaggaacgttcccagaactacggctcccagcaggacaagcgccagacaagcctggactcaagaggatagactgggcaaaagcgcttctgggaatcgtagtttagggcgccgacctcaagatccaggctgggcacgctacccaaccaactccttacttgagctcttcagccgaatacatcccgaaggaaatgccctgcagccgccgccagggcatgttcttggagatcaacatcctccaggtccgttttgaattccgacaccccaagagacgttccactcaccacctgactattcttaattcaacctcaagcccggagtcaccacgcgattcaacgtgcgcttgcgcgcggaagcggtcgcaggaacgacatttacgtggatgagatcacttctacatggggggggaacaaatagttgtacgactctctgctcgctcttttgttttgaaaacaatcaaagatatataagacatcaaaataatcatttaggaaaattcctccgaggcaaatcgggtgtatagagcttttagcttccgtgacgaagtctttcaaaccatgagcttgcaacctcccattttatgattgctttcgtcttcttccgcttcagccaatagcggagctgttccctgctccccgcccactgcgccccaccttcctgaaggtcgaggcacgctttcccaacatgctctgcagagaaatcaaagatggykgttgtatctgctgttcgctggctgggcctccgcagcaggcttggccagccgctgacgggtcggcgggcgggtttgtgtgaacaggcacgcagctgcaggtaagagacgcttagggtatccgcgaagaagaccgcggagtcaccttagtcctatgtttcccagctggctgtggaagtaggcacgatgaaatggtttgctcatgcgcgcccttaacggtcgcgtgcccttaagaccaggtacgcggaggtggccctttgaaataggattcgcaacgcatttattcattagagaaatacttattggttgcttgcaatattctgtagttaacaccatccgcaaagctaggaccctgctctcatgaagcttgcgttccagtgagtgtggctattagcaacactaccccaaattaaaaattatccgccattactcattttaacccaatcaggaggagcgaggagaacgtacaagatcttcccaaataaaaggcagtctctggtcgccaccgtggggactttggctaaagaagttatcaggttttcgtaaaagcagaaaagtctaaaagatctgactatgcccttttgatctgtgatagttatagcttggaacatgtatgacctatctgtgtaatttttttttcactcagtacaaacagtggcattgtgggaatatgagaggcagtaatttgtagtgaaaacttgctaaaagcctaattttaggtttagtgtttgccattcacttaattggatgataatagacagatttcctcatctgcagactagagttggtaataaccatccgaaaagtttgtgaggtataagtgggrtatgtaatttacaatatgtttttatatgtactctcccttagttcccctcaagaaagagaaaccactccatctgatactgcagaaacctttgtgctgccattcaatgccagtcctccgtttcctggtagccatcgttagcatttttctactcattttctttgcctgaagcagaatctcttcctcagcrtccgttctcaaaataactgtgatctctgttttaaggtcatgagaaacaaatagtgtgacttgaaagagttgatctcagaaacttgaaagagttgatctctttctgaaatgtccttaacgtagaggggtattcttgttttaaatgatacctgaaaccagatactactggaggaagtatctktctgtgcaatcacatcttgacaattttctgaatgttactgatgccatttagtaaggggaaacacaagataatactaaccgtcacattatctgtggtgtgttgactgtgtttttagtgtgatcagaacacttaaacagaacacttaaaaactcagtcatgggccaatgattctatattttggtttaaaaaggatttcatattgaacctctgaaaatagaaaatatcagcaattccaagtctaaatcaggccttatgtatttggtacattcttgattgttgaaagaagtggaatgagaagccatgggtcatcttccctatgttgtaattgctttaagtgaggtagtcctttctgatcagggcagtatctgtatagaagcaagagctcactgaattgttcttttaaacatcatagtgttttgggttcctgaagttgaaagttcttcatttcaaaccagattgttcaagtgctattaaaaactttcctccctctctgccatttatgtaatgagattgcttgcttccaaaacttttgtctagccgggcatggtggcatatgcctgtagtcctagttactcaggaggctgaagcaggagggtcacttgagcccaggagttcaagggttcagtgagctataattgcacyacttcactaaaggctaggcaatggagcaagaccctgtctctaaaaaaaaaaaaaaaaaagttttgacagtcttgtccatatcttgtatccattccttaatgatattgaacatgtgtacagactgtcttctcagcgttcattgacatgagttatccagtttaatccgtgataattggagaatttgggctcaaagtacacataggtggaggtgagctgggtacttcattaatgactattagatttaaggcttttgtttttttgcagattttattctggtagtgcaaccctctcaaaggttgaaggaactgatgtaacaggtatattttaaaatatattgaattctatttttatatcaacacgttgrattccattgtagtactaggaaactgattcatgttttcttttttacattagggattgaagaagtagtaattccaaaaaagaaaacttggtaagtattctatcagtgttcattcagcaaatggttgagtgcttactatgagagaagtrtaagggttaggtaaggagacagtgacaggaagagcaataggagagcattcttgaagagagtagctgagcggggagaagctaggagtttaaaggacaaaaaatggaaaggtggagaatagtgagtgaatgagcaatgagatttacttaaaagaacaattgaaagagattttgaattagtgtgggttactatttacgtggttaataatacatggttatacatgaacatcatcattagaataatttttttcaaggaagttctctcatatgattcaagagcagacagttactgtctttattatctctaatgaggtaaaaataaagtaaatggtrtggacagcaaaatttagcttttttattcactggatatatccttgaacaaattgcctcatctcatttattcaacatttgttgaatatgcaggaattaaaacttcacaaaagtgcttgttacagtgtagtcctattgaacgcatttagtggcccctcaaaaagctaggtcttaaaattatgtgacctaaagactcgggttcgccaggcgcggtggcttacgcctgtaatcccagcactttgggaggccgaggcgggcggatgatgaggtcaggagattgagaccatcctggctaacacggtgaaaccccgtctctactaaaaatacaaaaaaattagccggatgtggtggggggtcgcctgtagtcccagctactcgggaggctgaggcaggagaatggcgtgaacccgggagacggagcttgcagtgagccgaggtcgcgccactgcactccagcctgggcgacagagcaagactccatctcaaaaaaaaaaaaaagacttgggttcatttaaaaagacttttttaagaactttattaatctgaactgtgtgattattttagggaggccagggagcccagtgatgtcaatgcataggtaactgggatcataaaagaagtgcaaattaaaacttaccgtattggcagagagaggatttgaagaaatacgtttgtttatgggacagtaaattggaacagctctttggagggaaatttggcagaatcagaattggaaatgtgcgtaccttactggttagccactttggaggaacatttgcatatatacatggacaagactgttctttattacttgggaatagtaacaggttgaaacagcctgaatgcccattgaaaagtgaatggataattttaaaaggttatcatacaataactttttacattgaaaggaattaattagctctatatttaataacatggatagtgcagccaaacttatgtagacacatgcagaatgacagtgtgtatacgttttttagggagatgtttatgtgtgaaaatacctttaaaagttctggaaatacaaataccaaattcatcgtggagaggggtcacaagatgacaccagacactttaggttaacgtgtaatgttctagtttatttttttaagataatgtatgataccttttaaagtaaccctttaaagaaagagaattagtgagtaatctgaatgtcatcattttttcactgccatttgttcaatatgttaggaaagtttgctaacttgataagacttaaatagggcaataaaagatctgctgaaggaatgctgacagatgagagaatgtgtcgttatcacacttgctgaaattacataaatgtgacttctaaacgtggatagaaaatttagtggatattatgtacatcagggaattagttttgatgaaatataaaatttcctgtacttttgtttttctcagatgacttatagtcttaagaatgttatgttaaactttatttagaaaaatactcttggtataattcccttttggaaaggaaacacattaaatctaacataggagcacaaatatatttgagatcaaattatcttgtctgtcatttattccagtgaagccttttctaatagttcagtaaaggtctctactcagaggtgcagtggacagctggcctgcaattcttaccataacgttatatatggttgagaggttctaaaccaggaggttgcatcagaattatctgggaattcagtaagagtgtgtgtgacagtcctccatggatcttgggaggctttgatgcaataggtccagagtgaagcctgtggtttattctcctataactgaatcaagagctaccaattaggatagtaaaggcaacagtagtcccgaaagctgcagtaagaatccayaggaaagtgggtagaggaagtaggccagatagttttatgagggcgggatggaaatcactagccctgggttatggcattatgcaccaggccagagaggacaggcaaagagaggaacatgtaccaactaggggaaagaaccagcagttttcttaatttctaatttattctagtgaccttgtgacataaccagcttcagatgagatctgcactatgtkattggccagtacactgagagtagaatcacttgttcggtttgtggctatgaagagccctgatgaggattaacttgtggttcttatttttagggataaagtagccgttcttcaggcacttgcatccacagtaaacagggtaagtaggattttgtgtttttttttaacctaaaacttggctaataacacactttttaactcggctaataacacatttaatactcatacctcgtcattactcagaattaaactgttgtgcgtctagaaagtttctttaaaattgtctaggccgggcgcggtggctcacgcctgtaatcccagcactttgggaggccgaggcaggtggatcacaaggtcaggagatcgagaccatcctggctaacacagtgaaaccccgtctctactgaaaatataaaaaattagccrggcgtggtggcgggcacctgtaatcccagctacttgggaggctgaggcaggagaatggcgtgaacccaggaggcagagcttgcagtgaggagagatcgcgccactgcactccagcctgggcgaaagagcgagactctgtctcaaaaaaaaaaaaattgtctaatccagctgagccaggtggctcatgaatgtgatcccaacacttttggaggccaaagtaggaagaccacttgacatcaggagttcaaaaccagcttgggcaatgtagcaagacccccatctgttttttgtttgtttgtttgktttgttttgtttgagacagagttttgctcttgttgccttaggctgcagtgcaatggcgcgatctcggctcaccgcaacctccacctcctgggttcaagcaattcttctgcctcagcctcctgagtagctgggattacaggcatgtgccaccacgcccaactaattttgtattttaagtagagacggggtttctccatgttggtcaggctggtctcgaactcctgacctcaggtgatccacttgccttggcctcccaaagtgctgggattacaggtgtgagccactgcgccaaacttttttttttttttttttttaatttattttttgagacggagtcttgctgtgtcgcccaggctgaagtgcagtggcacagtcccggctcactgcaagctctgcctcccaggttcatgccattctcctgtctcagcctcccgagtagctgggactacaggcgcccgctgccacgcctggctatttttttgtatttttagtagagacggggtttcgctgtgctcaccaggatggtctccatctcctgacctcctgatccacccgccttggcctcccaaagtgctgggattacagatgtgagccacagtgcccggccttttttttttttttttaagaataaaattattggccaggagcagtggctcacatctgtaatcccatcactaatcccatcactttgggagaccgagggaggctgattgcttgaggtcaggagttcgataccagcatggtgaacatggtgaaaccctgtctctaccaaaacaacaaaaacaaaaattacgaggcatggtggcacctgtagtcctacctattcaggaggctgaggcaagagaatctcttgaacctgggaggcagaagttgcagtgagccaaggtcctgccactgcattccagcctgggtgagttagtgagactctgtctcaaaaaaaaaaaaaaaaaaaaaatttaaaataaaattatcaaatccctttatttggcaaaggaggaagctaaggttttgaaagtggccagtggctggttaggatgttaaaaccttaattaaaggcttaatttcacgccttttatctcgaaatgcagtgtttttctaccataccagtgatctttaatccctggaagggcttgttgaaatgtatgttcttaggggacgatttggctgtagtataccaacttggagaaataatgtacctgtcatgctgacaatcatgtaatgattaataatctgggtcctggagcctactggtttgttttaatagccaagcaactagctttatgatcttagggaagttactttacctcttgatacttctgtttcctgacttataaattgggggttaattatagcaccaaacctcaaggttgcagtggaattattaacaaatgaattaagtatacgtaagatttaggatagagtctgggacaaaggaaattcttggtacattgtattttgttactgctactactgtattgttgatttcattgacatgaaattttctctgttggcaactcaagagtagagtttgtagtctggtagatacactgaaactttggtaaatgcatcagaaatggaactttctgcttggttgtattttttattaaccaaaaacttttaatttcgtctgtggggaaaagtctaaaataattaagtctttttttctgccacagtatctgtatggatattgatcctccttaagtcgattattacaagtacgcagaattgttcttctattgtagatattaaactacatctaaaaatggaactactaggctggacatagtggctcatgcctgtaatcccagcagtttgggaggtcaaggcgggtggatcctgtgagctcgggactttgagatcagtctgggcaacatggtgaaaccctgtctctacaaaaaaacacaaaaattagctgagcgtggtagtatgcgcctgtagtcccagctacttgggaggctgaggtgaggctcacttgatcctgggaggtggaggtggaggttgcggtgagccaggatcgcaccactgtactccacagagtgagaccctgtcccccccgccacacacaaaaaaattaaatataaaataaagatggagctactaaagatagtgttgggtctaatgtgcactggtgtactctaccagtttctgaaaaaggactttactacatctccctacttgcaaagcattgagattttcagtagctcacttatccataaataggcacctgaaatgtaaacatagaaatggacctccgagatattctcaacatttcaatgagaatggcccagggccactttcaaatcaaagaagttatagaattgtgtgtagaattgtgacttatctggcccttaaaatccaagagttattcgtttatccattcattcagcaacaatattttgtgcccttatgatgcttatcaagcactgtgctggatatagaattagacacagatattatgtagttctagaggggaagactgaggtagcactgagaaggggttgtatcgccaagactgagaaaggaattcttttttttctttctttttttttttttaaagagacggagtctccctctgtcacccaggctggagtgcagtggcgcaatctcagctcactgcaagctctgcctcctgggctcacgccattctcctgcctcagcctcctgagtagctgggactacaggcgcccccacccccacgcccggctaatttttgtatttttagtagagacggagtttcactgtgttagccaggatgggggtaaaggaattctaagcagacattttagaaaagagagctatgtggagaatgggaaagctttccacttgagagtgtgataaagagcttagcatatccaaaaccaaaccccattccctccaaacattcctcacatatttctttgccatctcattaatggcaactccattcttatagctgctcaggccaaaatcctgggaattgttagcaaagcctttgtttatcccttcaaaagatacgtgtgtgtgaggtctccgtgaccactcccaggctaagagttatgacagcaagaagatacaaagcaaagtcagcaaagagaaaaggctcattggataaagaccaaaagaaatcagtcacaagcttccaaaagacctctccagaagattcaacacaggacatgcttaattcctccatcagtgacttgtgacaacacatgcaaagtgtctaccaaagctcattagagacccagtgcccagagtttttaggggaggctggccatgtagaccacccactggctggcatatattataccaagtttccatactcccagaagggaagcaggtgtttggcacaaaacaygttgtacaaacaggttaggcacagtgaaccattcttagcagttctaggaatggtragaacccttccaatatccaggttcccagatggcagccaagggccagccttggacgcagaccttcctaaggataatggtttcaggtctgttaactcttttctgcaaaatatcaaaattttagatgcctgatatcactaccagtcaccttggttattgtcgtcttacaagtctggattaattgcagcagtctctgtcgtctcccactgcacctccctgcacactgctctcagttcagcagctgtagtgaccctggatcatatcactcttaagaattcaacattggctttccattagtataattcaaataaaaactgaagttcacaacagggctgctaaggtgaggctcaagggaaaggggtttttgaaaggggtagcagaaagctaggtccaaaataaaacactgcctccaggttccaggtatgagcagctttccgttgagagctgcagggaagcttctgtgccccctccctgaggagtccaggtcagtaaaacagcattaaggatataggataagtttttgctttggaataaaggcccaagtaaggcactcagacacagaagagaataaagaaagcaattctggggcatttctcagtggggcccctggtggtattggagagttgattatgctcaggtttagggagcaattttaatgggtaacaggacgtgggagaaggttctgttgttcattcctcagagggcacggtgatatcttccatttggaggagggactcttggtgaagttgagcgtgggtggatagtgaccttgctttggaggaaatcctattctgggattctgctgttaggactagttaattcagatgattcttacctagagtttaaaacagtccccagtggtagcaaacttaaatattaaaatcagccatggggagggaggcttaagccattgcttgccttgcataattaaaggcaagtcttgtagagctgagagtacagtgcaggtgtttgtcttttgtcttttttctctatatatacatgtatatatgcccacacacgtttgcgcatttaggttacatacataattacaacttacggaatttttgtttatcaaaactcacaaggtcctcttaaaaatttagctagaaagacttgtgggctggatacagtggctcacgtctataatcctagccctttgtaaggcagaagtgagagaactgcttgaggccaggagtttgagaccagcttgggtgacamagcaagacaccctctctrcaaaaaattttgtgaaatggccagctgtggtggcacacacctgtagcctaggctacttgggaggctgaggcaggagaatcccttgagtccaggagctaaaagttacagtgagctgtcttcaaaataaatatagaaattgtattatgtcttttccacaggataccacagctgtgccttatgtgtttcaagatgatccttaccttatgccagcatcatctttggaatctgtgagtattttcatataattttctagtgttttatctctctggtttgcgtacaacagtacataaataatttagttgtaataacctgggaaaggtttacaaatgctgagaaattgatagactatgtgaatcctttactactttcttcaaaaagatgtacatatcgtcaatggggaaaggatttttggttttkgtttctaatacttagggctttttcacactggagtgacccactcagtttaaatggcttgctttttatatatttcaagctgtgtataagatgctaactgaaattatatcacagtagaaaaggtgggatagtctataatttctaattgggattctgcgtgttgttgcatttgtttttttttgtgagkggggagaaattcttgctgagagtgtaactataatcttgcttgagtttaaattacatgtatttaaatctttttctttatatagcgttcatttttactggcaaagaaatccggggagaatgtggccaagtttattattaattcrtaccccaaatattttcagaaggacatagctgaacctcatataccggtaaggagaggtagttacattatttacataatactattttaaatgtaaattaaaccaggctttcatggctaatatttcagtagcyatttgaataccctcaatatttggatgataagccttttaaagtgtggagttagctttgatcacaagactaactttaaaattctttctgtatttatttgctcttcatcttaatattttccccatttgatttttgtgacaccatgctcttaggtctttaattctatgactgaagtttccttcactacctctctatacacatctttctcttccttttttttttttttgaaacggcatcatgctgtcacccaggctggagtgcaatggtacaatcatagctcattgcagcctggaacccctgggctcaagtgatcctcttgcctcagcctcacaagtagcttggactacaggggtgtgccaccatgcctggctgattttttttaatttttagtttttgtagagaacagggtcttgtctcactgcactgcccaggctggtctcaaatttctgggctcaagcaaacacccttctcagcctctgcaatctctgggattgcaggtgtaagccactgctgcttgctcttgatccgcttctttttttgtttgtttttgtttgagatggagtctcactctgttgcccaggctggagtgcagtggcacgatcttggctcactgcagcctctgccgcccgggttcaagcaattctcctgcctcagcctcctgagcagctgggattacaggtgcctgccaccgcacctggctaatttttatagttttagtagagacggggttttaccatcttggccaggctggtcttgaactcctgacctcgtgatccacccgacttggcctcccaaagtcctgggattacaggtgtgagccaccgtgtccggccttgatccacttcttaagcatgggtatctttcttagatttttatgctcattttctctttttattgtgtatactcttctgtttcagtgacgcttataatccatttggtactcttttgtatatctagcctagatccctttactttgaactccacmttgtatttccagctccctctttgttctgtagttttggagtgaggatttatgcagtgtggtgggtattgtgcttagtgcttgtccatacagtggtgagcaaaacagatgcgcctctgccctcctgagtttgttggtggaagtactaatctcagactcatcatatctaaactgctcccatatccctacrtctctctgcttcccaaagctcacagggaaacacacacttcttgttttcatagtagaacttgcacatagatgaggaagccagtgtgattgtgtaagtcaaaatattaaaatcctaaactaagacagtgtctttctccattagattgtgagcaccctgaaggtagagaatgcctttcgtctctgtatccccagtgccaagcttaatgtctggggtaaaatagtaggcattcagaaagtatttgaataagttagtgaatgaggtaaaatcagcataccttgggtagtattaaatgtttagatgatacacagcattagagatgaaaggtttagttcaattccctgtgaagacagtgatgttaaaatgatcagtagtatctggtgcaggaaacatgaattggagcagtgaagttttactttggtatgttggtgataaaagttttgtcctactcagttatccttccctcacctttacctgtttgtagtaactttagtcatcttgttttcctagtgtttaatgcctgagtactttgaacctcagatcaaagacataagtgaagccgccctgaaggaacgaattgagctcagaaaagtcaaagcctctgtggacatgtttgatcagcttttgcaagcaggtgactgagttcrattaaagcccctctaataacatgggctttgaagtgggcccaagttatatgattcatatattttgagtaagagttacaggtcctgctgtacttactctgctttgatggctgcgtgctttatatttttaatagtttatttcatttttagctttagtgttacttaagaattacaggcgaagtagaattgcagctttgttggtttattgtagcactggtagagaaattgtatcacccttctaccttagcttctgtttttaatgttaggtaggtatgcagtgctcccagatttcctgtacccttttcctttttttttttttgagatggagtcttgctctgtcgcccaggctggagtgcagtggcgcaatctcggctgactgcaagctccgcctcccaggttcatgccattctccctcctcagcctcctgagtagctgggactacatgcacccaccaccacgcccagctaacttttttgtgtttttaatagaggcggggtttcaccatgtagccaggatggtctcgatctcctgacctcgtgatccacccacctcggcctccgtaagtactgtgattacaggcgtgagccaccgcgcccagctttcctagactctttaaggatgtttggaagattgggccacaacacacaagaaagaaatacgtaaaaaggaaagcacactcaactaggatcaggggctttgatgctggtgccatctgtgtcactaattgttcttagcattcaaaaagttacttaatttctcaaaacttctagctctaaaattgtgtggttctctgaattggagctggatgtaaacttgcggagctacacacgtaaatagcacagctgataagtcaacatgaaaatctacatatagcaacatcagaagcagctggcattaagtttttagaatctagagtgctatttggtgatttagaataaacatggaagtggtggaaactggactgaatcattatacacttgaacacaagaaacatttgcagaaagctatgtttgagaattttggtgtgtggcttggtacagcatcagatgtatggctgagtgatggcaatagattgtaatttagtgaggcgcttccctctgcttgttaatatgatcggcatctggtgtgagtctgcattgaagttcttagtgctaaggcttgtctttttctagttttaccccctttattggataggtgtgtgcagtccttcagtaaagacaggtgtcagacccatagctcagtaacaaagtgagctaacataccagggaaaggatcctagaacatttcattgtcaggcccctaataagtgcaaaacactgtgctagccatttcacatacttaattctacaataccttattcattggtgtgttttataataatcttatgaaggtaattattaggtaatttttccagggtctcatagctttgagatagtgtgaaccagttgcttctccatagcctgtaccctctgccctgctttctcttctggactttttacatttcctgatgggcattttaaatttatcaatgtattttgtttagaaagataatttattggctaggcatggtggctcacacctgtaatcccagcactttgggaggccaaaacaggaggattgcttgagcccaggagttcaagaccagcctgggcaacatagcgagaactcatctctacaaaaaatttaaaaattagccaggtgcagtggcacatacctgtagtcacagctgctcggaaggctgaggtgagaggatcacttgagcccagaagttcaaggttgtagtaagctgtgatgtccttgcactccagcctgggcgacagaatgagaccctatctcaaaacaaaaagatacatttacttttcttataagatagcagattatatctcatacttgtcttcctcctattccctttttagcctttttaatgagtgtcaagatggggacataatgttttgaacaatttttaagagactactatagttcgacaattatgctagtatttctaggcaagttttcagtgagtatctggatccaaatggaataattctacttgcatttgttcaaatgcacctgggctgggggaactaagtggggatagtttgcagtgtgttcagtttggtgatgataattaaaaccatgaagtagtttgaggataatgagtacataaaataagtgagcacaggcccaaacttcatcttgtgttccaatcttctacgtcaaattacatggttaataggggttatgtccctgtctacgtcacttcaggtgtttaagttgacgttgagtgcataaagtagtggacaacattaagtgtgtagccctgaagaccaccgctaatataaaaaaatgacacattttaacctaacaggctttagttcttcattgtttcaaggtttctttatctttctgtctcttacccacaggaaccactgtgtctcttgaaacaacaaatagtctcttggatttattgtgttactatggtgaccaggagccctcaactgattaccattttcaacaaactggacagtcagaagcattggtaataactgttggccttgatttttttttttccttaagcttctttttgaagaaattgcttttaaaaataagatgggttgttttgccatgtgtcagggtagtagagatttgtactgagatgtgtggtacgatagccttgataaaaagtggtataggaggaagagagattttaaacagttacttctgtcctagtttactttttaacaatatgttgtcctcacctacttcatattaaggcaaagcrttgatcagaaatgtttgggctggcctgtgccacttagagtaatracatgatgtattctggccagggaaagactccgtggcctgggccccctcaaaaattcatacgtggacttagaggagagaacacactaggctggagacagaacagtagtgtgccggggcccgcctgtaagttgagtcatagcctctctctcgactcgcgaattttacttctagaactaggtctcaagaaatcctttggatcagtcaaatagagatgctcatgtgacatttttcatgaggaggtatttatacttgcaaaaatgttgaaaacaatctagatgtccaacagtagatgatcaaatgatgataaaagttgtgtggccattgagcacattagagtagatgtgtttgggtatggaaacattcatccaataagtgggaagcaggctatcagcagtatatattccatttttgtaaaaatgtttttacaaatgcatacaaaaaaatcatttaaaaagtgtttctgggtgatgggattattggtgtttttcttcgtttctatcttttctactctttgcccaactaaatgtggatttcttgtttccccctcagagacagggtctcactctgtcacctagggtggagtgcagtgatgctatcatagcttactgcagcctttaactcctgagctcaagtgttcctccttcctcattctcccaaatagctgggaccacaagtgtgggccaccatgtctggctagttttttttggggtggggagggcgggtagacatagggtcttgctgtagtgcccaggatggtgtcttcaactctggggctcaggtgatccttcagtctcctaaagttttgggattactgaccactgcacctggccaaatgtggattatttatgtagagaactttacatttttaaaagtgcataggcagtaggttgcagttaaaccttgctttccagagtatcacttcctgaagccctgctctggttggccctctgcctctccagccccagctcttgaggcagcaggctacagagccaacactgacctctgcaatgccaaccaagcctgtattgctctacgtcagcctcatcccagaccttggtttataaataaagacaagatttattcttgtaagaagtcttgccaggtgcagtggctcatacttgtaatcccagcactttgggaggccgaggcgggtggatcatgaggtcaggagatcgagaccatcctggctaacatggtgaaatcccgtccctactaaaaaaaatacaaaaaattagctgggcgtggtggcacgcgcctgtagtcccagctactccggaggctgaggcaggagaattccttgaacccaggaggtggaggttgcagtgagccaagaccacgccactgcattccaacctgggcgagagagcgagactctgtcttaaaaaaaaaaaaaaaagaagtcttagtttgcttgggtgagtgttaggcattaactatatgttgtttatcttgctttcaccctaattatgacagtttatctgtatggatcaagccagatgtagtctctgagcaaataggctgtgttgtttggttttcctctttctgtctgaggaccaggccatacagggaactggcttcatcttgtctccacgctgtcacttgttgctttgagagtcaacttggcctttcatctgatttgcacttaagaaattaactgtrtaggtgtaagcgtaactgggcttcctctttgccttctgctggatctatgtttcctttatttttctgagttccctttgcctttctgattttgagtagtctgactgggaaatgcattccattgccttaacttttatttcttttgatgattattcatttcaggaagaggaaaatgrtgagacatctaggaggaaagctggtcatcagtttggagttacatggcggtatgtcacacgtaattagaaccttgaattacagtgtcttacagtgcatggaatatgccccatcaccctgtgaagatgttttcttgtgatgttctaaaataattgatttttattgtgcaatataaatttcactatttgtattcatacacatttagaccgtttttcaataaggtctttatctccattcaacaacacaagaatctgttgagactttgacccttttttttccctcatctgtttaactcagcataactttcatatggtatggttcctttggtagtttcattaacagtgctaccttggaatatatacctctaattctgaaagatttaatacttttgtttactaaaaataycatggacactagagtgtactgctaaattaagaccactgacaacatgtagacatacacagcagtttgaatgaaaggtaataacttaattatattggagaattagctgggtgtctaaaaggaagacacttcatgtgaatgtctggagagggaaagctaccatgattatctaaaattgttattgaagtgatgaatttgataggatgaaagattaaattccttggggtaggctggacgcagtgcctcacacctgtaatcctggtgccgtgggaggccgaggcaggtggatcacttgaggtcaggggtttgagaccagcctggccaacatggtgaaacctcatctctactaaaaatacaacaattagctaggcgtggtggcacgtgcctgtaattccagctactcgagaggtggaggcaggagaatcacttaaacccaggaggtggaggttatggaatgagagaagagttaaaagtacatatgctagaatatgaccagaaggatccaaaagaaaccgttttgcctctgggaagtagtatctgaagattgaagaaaggtgaggaaactttactagggactttgtcatacagttgcttcttgtttttaatagcacagatatttatatacttgtttataaacttttcattttcaattgtaattctgccacttaacctgcgaagccctgacaacacattaagatcgttaagtcttgattttccccattttcaaaatgataataaccataataccctgtaagaattgagataatgtatakaaagtacttggcacattgcctagaacataataaaccgtcagtaaatggtggtagctctcattggtatttcttattgcctgggttcacatttactctcttgtgtctagagcaaaaaacaacgctgagagaatcttttctctaatgccagagaaaaatgaacattcctattgcacaatgatccgaggaatggtgaaggtacatttgttttatttatttttgtctttcatttccaccgatcagggtgtttcagcctcagaactactaacattttgggtcaggtaatttgttgtggggtctstcctgtgcattgtaggatgttagtagctccctggcttctacccrctggatgtgagtagtgtactcctcccccactttcagttgtgacaaataaaaatatgtttaggcattaccagtggatagaaaatcccactgcactagagtatgagcttcatgagaacaggagcctgatctattgagcctgagctatattaccaaactctaggacagaaatgtgcaaggacttcttaagtaaatgaatttgatgatgcttaatttttccttttccagcaccgagcttatgagcaggcattaaacttgtacactgagttactaaacaacagactccatggtgagtttgagaactcccctctgtccctttctccatttccttcttttaattgtctgtgtgaaggctttggatcgtgcctcagtcattggcctacactttaccttttcctgaggcgtagatgattgaagcaagagtagagatccagaraggagagtagttttccagttttgtggacatgtgattagttaagggacacataggaatgactgctttgccttaaactcagccatttagggattaatcttcaaccccaaattttatcattttattattttacagctgatgtatacacatttaatgcattgattgaagcaacagtatgtgcgataaatgagaaatttgaggaaaaatggagtaaaatactggtaaggaggaatcctcagtttattttttaatagggcttaaatactctttaccagaaatacatgggctggccaggtgtggtggctcaaacctgtaataccagcactttgggaggccgaggcgggcagatcacctgaggccaggagttsgagaccagcctggccaacatggtgaaacccgtctctactaaaagtacaaacaattagctgggcgtggtggtgcacrcctgtaatcccagctacttgggaagctgaggcaagagaatctattgaacccgggaggcggaggttgctgtgagcagagatcgcaccactgcactccagcctgggcaacagagcaagactccgtctcaaaaaaaaaaaaaaraaaaaagaaacagaagtacatgggctggagacagcatttatgagcatgtgtatggcagtcactgtgtagcagttacctgttcactaccctttccgcagccctgggactcagctgtgtctggcacataagaagaaaaagttgcttgaccgagagtatagagctagaattctggaccattttattcatttatttttcataatagtttttctgttacaaagtaatgcatatttgctgtcaaatcctatcaggtgtaatttcaaaaagttgaaatcactggattgattctcgcctagtaacttaagaatagaaacggctgggcacggtggctcatgcctataatcccagcactttgaggctgaggcgggtggattaccttaggtcaggagtttgtgaccagcctgactaacatggtgaaacccygtctctactacaaaaatacaaaaattagccgggcatagtggtgctcgcctgtagtcgcagctactcaggaggctgaggcaggagaatcacctcagcccacgaggcagaggttgcagtgagccaagatcgcaccactgcactccagcctgggcaagaagagcgaaactytgtctcaaaaaaaaaaaaaaaccaaccacttttttatatcatactagtctattatttttgcgtcttttcttggaaaactctcctaggtagaagactgaagacagttgaccacctctatcaagtggggtgggtgtttgaattagcaggcttctttaaaaggcagaatcatggaacctgctaattaataaacagttcttaaaagagggatatagttactaacctgctttaaacataagcaagaaagctaaattctttactttgtatgaaacatagattattggacagattacccaggcatgaaagatacttcttgttttttattcacctaggagctgctaagacacatggttgcacagaaggtgaaaccaaatcttcagacttttaataccattctgaaatgtctccgaagatttcatgtgtttgcaagatcgccagccttacaggttttacgtgaaatgaaagccattggaataggtgaggatgcgcccttgagttctctgaggacagagactgtgccagccagaggtttcagggctacataagcaaagagctttaaattattcttgtgcttacataatatgttggaaattttctttccatgtttggcacatttacttacatgtacttattatagtgggagtgcctttatcatcttagtgttcattagtattttaggtactttgtttatggatctgttgaatctgaggagaagtgattgctttgagttagctagttttaaattcatgacaytttcccaacataattaggtatttgaacctaagtgtgtgctagtgtattgtatatttttcattaattactttattgaaagttgctttgggaatcaattcacttcaatatattttactgttctcagtgaagaatgtgactaataagtatttggactttcaaaaagtgatacagtctttgtgatagttttttacctttacattaatgagttggaaaataactttgttcaaaggaatagaaatgcatattttgcttaaatattaacaatatgtttttaattcagtgtgtctcagtaaactatgttttggattgctgtgtttttacctcattgtttattttttctgtctacctggtaatttgagaaccctcgcttgcaacatatcaccatattattcgcctgtttgatcaacctggtatgtatggccttaaattgtgytaatttatatagaaaattgaccagctttcttgagtttatgtgattaattgttgtagttatcttctctgcatatgaattaagaagagagaatttgtaaattaacctgtacagcctgagcagaaagttgtggtttttttagatacaggatcttgcccattgcagccttgaactccygggctcaaacagtcctccctcctcagcctcctgagtagttaggattacagatgcccaccagcatgcctagctgatttttttttttttttttttggacagggtcttactacctaaaattattcttgagggtagcaatcttgtttgtggtctaaaacttgagctggaggggagagggttatggattgtactggcagtgatgttgtacaaacaggaattgggtagaatatattttggttgaaattccttttgttctctggagctgtgctatttaacaccatagccactagccacatgtggccagttaattaaaattaagtaaaataataaattattttgtcacattggtgctcagtagccatgtgtctagtggctaccatgtgtcgtgatgcagattcagaacatttccatctttgccaaaagtttgtggacgtttctgctccagaggaaaggtaaacttattgtgaagcgttttgggaggacctcaaggctccatgcgttgtccacttttaggtcagttccagtgggagctctgctctgtagtagatggactttgaagagagacacacctgagctgagatgtccactctaccatttatttaccagctatgtcaaagcgactagatacctacctgaggaatagcagcagggtgtggtagttaaatgagttccacactgtgtctgctactgtgcttggagggcacatatgaggcactcaaaatcttttggttcttgtccattatccccagcctgagaaataacccttgagttcagaattgacagttctagtcattctttcttgtggatagactataaaaattacagaagggaagttgtttctctctggtttggaggactaattttgtaaaatccatatcctcacctgtataggcaaattttatctttaggaaaaggaaccagttaattgactataccttggaaacaggtaaacagtttccataattgtgtcccctaaaattttactcaaccttggtgagattgtgatggagctagtatttctgactccaaagtatattcctttcctctgtaactctcatcactggttcaattgctaatcaaagtcagatgtacttacatttcctaagtaacagccaggactgggggatgggggttctgggggagctgtgttggtttgtcttatgtatataaatttgcctgtctgcagcagtagttttggcttacgcctgtaatcccagcaatttaggaagccaaggcaggaggattgcttgagcccaggagtttgaaaccaacatagagagacctccatgtctactaaacatgaaaaaagtagctgggcatggtggcgcacccctgtagtcccagctactcaggagtgtgaggcaggaggattgcttgtggccaggaggttgaagctgcagtaagctgcgtttgccccactgcactccagcytaggtgacagagcaagaccctgtctcaatagtaataataatttctaggaatttacccaaaagagagagcytaaaataacctagaaacaatacattgaaaagagaatattatgtaactaataaaattaagaatattagcaaagggaagcatgcttgagtaaattgtgaaactctatctgtactgtcattacagctttactaccacaaacatacaaaacaggtagggaaaggagtgtagagaaatatttgactgggaatattgcagatgattttctgacctattagtgctcagttcatgttatatttaagaactgccctgtccatwctagtttactttttcttgacctcattctgattatatttaaagggaacacaaatgattactagcaaaaaacatttttagccgggtgcagtggctcatgcctgtagtcccagcactttgggaggccgaggcgggcagatcacgaggtcaggagttcaagaccagcctgaccaacatggggaaacccctcctctactaaaaatacaaaaaattagccaggcgtggtggcgagggcgttagtcccagctgctcggaaggctgaggcaggagaatcgcttgaacccgggaggcggaggttgcagtgagccgagattgtgccatcgcactccagccagggcaataatgcaagactccatctcaaaaaaaaaaaaattttgtttttctaagtatgctggtttggtgagggagtgtgtgttactgtctgccgcctacttcagtaagtcaggcttcatgtgaagagactaaaggaaggagaaagtctcagtggagcacatgaacagagacctgtgattattccagattttacagagaattgctctctgcagggtatagtggttcctttagcaagcattggcctccacccagatctatgcgaggacttaggctggaggtggaggaaggagaaatgtgtccctttgtattaggtacagtgagtttggtggtggtaaaggaagtggattaaacacatttgctttcttgttctgcaggagrccctttaaagagatcatccttcatcatttatgatataatgaatgaattaatgggaaagagattttctccaaaggacccggatgatggcatgtatagaaatcacttgtgttttcctcctctaaagacagagggcyggtttacctgagtaccagttagaggccttgtgatccctatagcttagaagtatttttttttttttttaaataaatttgagtacatagtaggtgtatatagcttagtaatatttgccatggtctttctgagaaagccaaaattgtggtacattcctgcctctctyaagtttttatgttcttagctttatcttgcmtgttaccagttttgttggcaggatttttgttaatgttactgacttgaaaatatattttatccattgtaaccaaagctcttgtgaactttgattttcagataagttttttcagtcagccatgagcatagtaagtatcatttctttattaatttgctatccatttcctaaatttatctgtaactggagggttctccctggttcttttcactttctaactcttctgttcatgtctttgcttctgttttttcttctttctctaaaatctataattttttttttctttgagatggaggttcactgtgtcccccatgctggagtgcagtggctcaccgcaacctctgcctcctgggttcaagygattctcctgcctcagcctcccgaatagctgggactacaggtgtgcgccaccacacctggctaatttttgtattttttgtggtagagatgtagtttcaccatgttgaccagactggtcttgaactcctgaccacctcccaaagtgctgggattacaggcctgagccaacgcgcctggcctaaaatctgtacttttcaatcacatactatccctaccctttgtttattgtttacattgacatttttcatgcccctgaacagataagcttccataatatttcagatttgcctattagtaagttaaaattgataatggtttttattttagtttatgtaatcatgcttatcataggaaaaatttcaggcagttttaggatgaaccttgttccctaagggtaatttaattgctttactattagattggtgcaaaagtaattgtggcctttgccattactttccatggcaaaaaccgcaattacaaaagccgctactttcaatagcaaaaaccacaattacttttgcaccaacctagtatttagtrtggatcctcacaaggtttttactctgggtactcaagcgtatgtatatccaggcatactttcagggtgttttatttgttggcagcaaycagtatttcatagtaagaaccataacttaactttcctgtgggtagattttggagttatttcatggagatttttactagtccagactctgcagtgcaggtgtcttttgtgcacttgaccaggtgttgttayaggattaatttttaatggtataattgcttaattaaaataatattgtaataaatttcacagaacttgggatttgtctcccccccatttcttataacttacttgctgtcaaccaataatatgttgaatcaacattattttcacaagacactctactgttgttatttatttgtgaaccactggctgacaggktatcagagtgatacttactacttgcatattttcagtgctcatctctcagagatctagaacttgcctaccaagtacatggccttttaaaaaccggagacaactggaaattcattggacctgatcaacatcgtaatttctattagtaagtgtgttggaaacatatccttttgcatgagttaccagattctgcaagtgggaggctgttgatgtcccttcatacctcacytctggtttcaggcaacatgccaatgatctaataggacatgttaattgagcacttaggaattaaagcagtggtaaaactgccagatttgaaagactagtttgtgtcctttaagggttttttttttttttttttgcaacactgtaaaatccacatatctttttcctctaccccctctcattttacattttcaaattgttatagcagggtgagccctgaagatttcctttcacctcccttgcttttgtattcaaagatgaagatactggaacctagagatactccctaaatgggtttgcttttaggcagataagaacatgaatttaagaaggcagcatgttaacagatgtgtgagaattgttttctgtgtatccaaatccttgtttcacattgaatgtttttaaaatgaatttgaaattcagtatctattcaccatgacctaagagtatacagaggaaacagttagaaatgaccagttgagggtagggtgtttaattgagaagtcagcacacactggcagctcttaaaccaaatattggctcgtttaacttgaaactgtaagtattttgaaattctttgtaacatataatatgctrtaatttcaacccttatttcccctgttgttagacatagggactttagactaaacatactttttgccttcatcacagttccaagttcttcgatttgatttgtctaatggaacaaattgatgttaccttgaagtggtatgaggacctgataccttcagtaagatggttcattacttgttatttatcattctagatgaattgggtttctgcagattaatgctttaaaaatgtgtttctcttaatcaggcctactttccccactcccaaacaatgatacatcttctccaagcattggatgtggccaatcggctagaagtsattcctaaaatttggaaaggtcagttttacttkttatgtgtccaggtgcatctcacctcaatatcctctactttgataatgaatgtgctaacattactgttagggatgaaaacttccattttgactgaaccaaatgtgttagttgagatgtacttcaaggtcatgtgctcatgttgcatgttggctatcaggagaaaattttgttgaaaatgacttaagtcagtcccttcgtgacataggaatgagctgagttttgtgcacctgttgcrggatatgacccaaagaaaataaatgctaatggcgtggcagaccctaaatctgaataaaggtctttgacccggaagcctgtgtaattcctctgtgccagtgttgcctsacttcactaaccacagtcagtgatgattctgtttccaagtaatagccatgagcatcacgcatcacgggtgtgtgtgtcttatgtgtataacttggctgcaaaatgaaatagatattctgtatctttcactaggtgactactgtatcataaagtcagtaggctctagtcccgccctcctgcttcacacgactgctctaatgagtgataaaagtatatcaaattcccaagtgctataaaacaacgtcttaaccacgtggagctggtggctgctcccatgtagtgcacatgccgtgatgaacacgtcactggagcaaggcccaggcattggcttttacatttgttccactgtgaatcctggtgggtttctggaatcctgggataagcctagaataaataacagcaacttatttttacctaccaaaaaataggttgacagtgaacaaaagtgtgttggttttacataacaatgatcactccttgttcctttcttgtttcaagatagtaaagaatatggtcatactttccgcagtgacctgagagaagagatcctgatgctcatggcaagggacaagcacccaccagaggtaggcctgaaactcaccagccagtatatcctcccatactgaggtcttcttaaggctagcttccctggttttatctgccattttggagagttctgctacccaaacccatatttgagtgatgatacatctaaacatatcttgcccttagcagaaatctgttcttaaagttaccctctttcctgtagtccaaagcaagcaacatgaaattagcttctgtcttcagcttgcttttttaaaaatctccatctacaaaggaaatgcatagctgaatttgaaagttgtggctaatcaaaatacttaggacagggtcctttttttattaaattacttgtgtgctatacacataatatattcaaatggtaaaatgcattgctcagattttaaggatcctgtgttagtctcctgaactgaaattctcataaaatcagttaggcagttctgctgactcctaagcttctcagcttcaggtggcatttgctgactgtgctgctgatatcaaatctgcgtatgaaagccaacccatcagacagactgctcaggattggccagccacctctctcaactgtatagctatcctctttttaagggctgggagaactcaggaagcctggtgagtacagtaccacaagtatacactttagaagcttttgtatttgaatctaaaacattggcccacgctggtagaggttctttcatttggccatataacacgtatttgattcgggaacttgcaaataccaactaaaaagcaaacttttggaagaagacagtatgcatgatgtagttgagataaggcatagttctctcaaaccatacgctgagaattatctttctactttctgtgtctatggacaagtaagtcacttaacctcattattccacttaaatgaactaaagatcaaagaaatatatgatcaaagaaacgtagttttgaaaatggtttggtcatttgggttattgaagtatttttggatgcttctcccatcccactctccagcttaaaatgtgggctgtgtacttagacttctggaagctggcatttacgcacattaactaaacttggccttgaccacaacccgtccttgattggtgccactgtgttctggttatgtttttatcagcacttcattcacatactaatttttagtgtttgtgaatgggaaccttatgcatattcatgtttccaaaaatgagcaaaaggatcttttgtaggggtagtgacaggtggttttcctgtattttgttttgtatataaatgtgtgttctaaaagtcattagtggggggtgcttgtgcatggctccttgtacaagaaagtagctttatttgaacatctgattgctagtcagctatctccaggaaaagatgatgaaggcttgtctttgaggtgtggctcacacgtgtctctctagcaactatgctgctagtgacagagacgtatgacatttgcatttggttgttagcgcaggcagtttggcacacacttgatacaaccaggctgtgatgattggcgcaggggtacggacctcagctgagtcatgggagctgaatgtatgtgtttctcctttgtcctgcrtgtggcaggctgatggggagcacttacatgagactgttgcctcaatctgagcctgcacttcataacagaattctaagacagactgaacccctgctgtactttaagagagggaaacagcaggttctgttctatgcctcttttccagctgtgcacaggatggattccctccttagaaggacagtggtgatcctctacaagaggacaaatacagttggagtatcccttttccaaaatgcttaagaccagaagtgtatggggttttagattttggagcatttttggattaggaatattcaacctgtaccagcaaatcttgacattggcagcatatcagatttacctgtgaaaactgcagtgtagattcgtttggggagtttaagcacctgcggtgattctcatgtacacacagggctgggagctagtagagcccacagatgtgtgtctttgggagcttacagtatagttaagaaaagggcatttagtctctgatttcagagagaagacagctatagtgtctgattgccttgtttttctaatagtattcataatctttttcctttcttgagcaggaaaatgttggggcttttcaggaagcataataagattcctaggtaagttgaaatcagccagctctctttgggtacagcctggaagtagccacatttggaatttcttcaccagccttagccaccacatttgggcactcttctgttaggcaagcataccgtcaactccctactatccagggcatcctgaggcaagcagttttttatctgtgttcacggatcatcatacattggggctacattgaatagatcatcatgaagtcatactgaatgaatgttgataatccatttggccctttagactttctaacctcactggaaacaagtaaaaataaatgttagacttcatctttgtctccagaaatactgttgggaattctgttactgaacttacactggatcttgcctataaatgttttactgaaggggctggagaaagttcacactttgcctttcttttacagaagtgagttgctgaatgagcttatggacagtgcaaaagtgtctaacagcccttcccaggccattgaagtagtagagctggcaagtgccttcagcttacctatttgtgagggcctcacccagagagtaatgagtgattttgcaatcaaccaggaacaaaagtaagtggtcaccatgaagcatagtttgtaaaatggagacctttcatccatctgcccattcaaaatgttcatagctttctatcccttctrtttcctttcaaaaagtcagaatgtagtaatttaatgactatttcatttgtcatgcaagtcaggaaagcctatagatttgactgttagaagctttttgtttctaatatagtttaatgcaactgcagggtccctttttctgatttcaaaactgacaggctataggtgagtgtcagagacaccgagaaccccagcacccagttgaattgcmgtgtaatcctccattttcttttcttaacagggaagccctaagtaatctaactgcattgaccagtgacagtgatactgacagcagcagtgacrgcgacagtgacaccagtgaaggcaaatgaaagtggagattcaggagcagcaatggtctcaccatagctgctggaatcacacctgagaactgagatataccaatatttaacattgttacaaagaagaaaagatacagatttggtgaatttgttactgtgaggtacagtcagtacacagctgacttatgtagatttaagctgctaatatgctacttaaccatctattaatgcaccattaaaggcttagcatttaagtagcaacattgcggttttcagacacatggtgaggtccatggctcttgtcatcaggataagcctgcacacctagagtgtcggtgagctgacctcacgatgctgtcctcgtgcgattgccctctcctgctgctggacttctgcctttgttggcctgatgtgctgctgtgatgctggtccttcatcttaggtgttcatgcagttctaacacagttggggttgggtcaatagtttcccaatttcaggatatttcgatgtcagaaataacgcatcttaggaatgactaaacaagataatggcagtttaggctgcacaactggtaaaatgactgtagataaatgttgtaattagtgtacacgtttgtatttttgttaatatagccgctgccatagttttctaacttgaacagccatgaatgtttcatgtctccctttttttttgtctatagctgttacctattttagtggttgaaatgagagctagtgatgacagaaggatgtggaatgtcttcttgacatcattgtgtattgctggtaatcaagttggtaacgactacttctagcagctcttaccactatgacttaagtggtcctggaaggcagtaagtggaggtttgcagcattcctgccttcatgagggcttctaccactgaccactttgcacgtacctggctcccagatttacttaggtaccccacgagtygtccacataagcagcttcatctttaccttgccagagttgacaattatgggatactctagtctacttatacttgtgttcccatctgtctgccatcctctgaaggccrggacccagtcatacatccttagaaaccaaagtatggtttttgttttctcttggaatgtcaggtcttaaggcatttaattgagggacaaaaaaaaaaaaagccgatatagtagctagctacttaagcatccatgggtattgctccatatcaaagcagatttgcaggacagaaagagtaaattagccttcagtcttggtttacagcttccaaggagagccttggccacctgaaatgttaactcggtcccttcctgtctctagttcatcagcacctgcagatgcctgactcttgttagccttactattcaatacagtccttagattcacggtatgcctcttcctatccaggcacctattctgaatcaccatgttgctctgcagctagagttgataggagaaaatccatttgggtagatggcctatgaatttgtagtagactttcaaaatgagtgatttgttagcttggtacttttaagtttgtggtacagatcctccaaacccatactctgagcaattaactgccttgaacatagagaaaaattaaggcctcacaggatgagtctccattctctgtaaatgcttattttatcatagtctttagcctctactatgagtaaaatgttctcttcggccgggtgtggtgactcacacctgtaacctcagcactttgggaggcagaggtgggaggatcacttaggtccaggagttcgagactagcctgggcaacatagtgagacaccggatctacaaaaaaataaaaagccagactggtggtatgtatctgtgtcccagctaattgggagggtgagatgggaggattgtttgagcctaggagagggaggttgcagtgagccgtgatcgcaccactgcactccagcctgggcaacagagcaagaccctgtcttggagaaaccagaattttggaagagcaaatggggctgagtgcagtggctcatgcctgtaatcccagcacttagggtgccaatgtggattacctgagcccaggagtttgagaccagcctgggtaacagtgagacccccctccctacaaaagattttaataattagttgggcgtagtggtgcatgcctgtaatcccagctactctggagacaggtggaggggattgcttgagcctgggaagctgaggctgcagtagccatgactgcaccactgcattccagcctggttgacagagtgacccttgtctccaagaaaaaaaaaaagcaaatgggattaaggactcatggaatgggaaggggaaggggagtcttactatatgtggaataaacttgctcagtgttgccacagagttacattaccaatgtgtagaagtcagaaactagacttctagtttggttcaacatttgagggttgttttatagccatcaaagtattcaagaggttggatggcactcaaaagattctacatgtctagaatcaaactcaaatctggcacgtaggtgcttcttagtaaatgcttaatgaatgccaccaactctgcaaagtattcattgattttgagaccttagtcatgttgctactaaaagtagggcatatgaccgcctaagaaacagaacttcgagaagtcctaacgtaaccacagtaaagcagactcccctttcagcaacctcaaagcaaaaaaaaaaaaaaaaaaaccagttagctgctatataaacactataccaagcactaggcttagaggaaaagatgtcagattgtactgtcactggctatgtacccatattctctaagacagggtagcatttgtctttcaaactgcakggtttgaaatcagtttttgtgggtgattgcaattttttaatgaaatgcattagaacatctaagcacgtcacctacagttttgtgatggtgcatttttgcattgcagtatagatctgtgcatagatatatgcattaagtgtagcaaatcgtgatgtaaattttttactgctggtcatggtcaaaaagtaagatacrctaggaaattgagtcactaggagcatggatgtataaggcaggttttatasaaccatttagattcaacattaatggtagagtggcattttaccaaaaaaatgggtgtatttgatttgggtgctgtaaggcaatttgctaggacatgggataatcagattacacaaaatctaggcagtgaacaagtcttcatcctggcccaggaaatagcctattaaaaaatgctgtccaggccaggcacagtggctcacacctgtaatcccaggacttcgggaggctgaggctggaggattgcttgagttcaagaccagcctgagcaacacagtgaaaacccatctcaaaaaaaaaaaaaaaaacaaaccaaaaaaactgtccagctgtggactttcaggattcaggactgctggggatcaagcccaaggatgtttttcagagctctgtgatttaagatgctcgaaaagagtgtccaagaggagtaaaggtcatgacagaatttactcccaggacaatctaagttctgccacaagtacccgtggtgtctgttcccacaacaatggccctttcacaagctcttgcctcacaacccctgcagaagtccttcaacaaaactaataatagactagtgaaacctactcctcacatgggtaagagttgcagtgggcaggtgaccctcctccctgcccccatcctttgcttcctcaagctccctgccaacctctggatacatcaatgggaaggaaaccagggaagcatagacctatagtacaacaggggtgtagtgaccactggacctgatgaagcgaatctgcctgaaatttaatacgcctttttatttcccttctgtgttaaatcaaatgatctgttctgcactgagccaagcaagttacttttaaaactggtggcaccactcatttgggacttggagactgcttttatccagaacctgttaagagaamaggggatttaaatacaaaggaatatgaaggtggtgtgccttaaagacagtctaaaattaggttttagtttgttacattattttgaaatattaaacatgaaaatgttaaatcaggatgtgtgagttttaagatgttgaacactgtcctacatcagtgaggaggraggcaataaagtaatttcagagtaaaacagattgaggatgaaaccaagacagaagtgatgatttggctttttatgatttttgctgtggaaatggcagtcgtgtgacttttcacttgcagtttaaatgaaagggtgaagagaagcctacctgccctaatggctcagggctatatccacctcccggataaccctggcccttgggactccatcatctccttgaagtagcactgagaatccaagaagaggctccgctgctttttgcacatgttactgagttacatctcaggaagatttttaagcacgaggaaggaaaatacaggcctggccaagcagggtccccttttcggtatcatctttgttcctaataagcaatcaagggggtgggtgtgttggctggtaaaggaactactaagattcagaagcttgtagtcttcattattttgttttacaggttaaaataaaccacttgactgggcacggtggctcacacctgtaatcccagcactttgggaggccggggtgggcagatcacaaagtcgggagttcgagacgagcctggccaacacagtgaaaccccatctctactaaaaatacaaaaaaattagccgggcatggtggtgggcacctgtaatcccagctactcgggaggctgaggcaggagaatggcttgaacctgggaggcagaggttgcagtgggcagagattgcgccactgcactccagcccaggcgacagtgcgagactctgtctcaaaaaagaataataataataaataaaccactcagtattgctgcttctaagttcagacagataatcacatctgaaggaagttatttcagggctccaagagaaacttagattttcttataacctataatattttacatatacaagtagaatggaaattataagcatttctaatatgacaaatagggaagtttagctttacaagtaatgtattttgcaattttgtgccattcgaaaaaggaagactgaatttagaacagtcctattatctcctaataaaaacttagtatcctctaggtaggtgcacagagtgcctctgcctttgagatgacgggcattaatctcaggaaggaacacaaagcatgtgttccaatcagaaactaaatatattttgttgaattaagtaaatccacttaggagggaatataaggactattgacaacattaacacaagccaaaggtggaccaatatatcccaaaatcaaaggacaaggccagtgccatacacctacagatgcagaagctgccccttttgtgattccagatgtgttgcccagataaaagtgcctcctcaatttctttgtgaacacacaatccccaacaaacagttgtaattttgaagaaagttgacatttttatgtagagatggtggtcttcatggagtaaaagaatttgttagtgcttatgcaatatgacagttgtactaatctttagaaagatgaactgagaaagttctctgggttttatagcaatctacatcaaatacacaacaaaactatttaatctcttcattaagattccaggctccccatccccccactttgaagggattcacagcccaggtactagaaagaactaagctccattaccagtgttttagaactgtcagctgtgacccatagagggctgctgaattaacttgtgggtagagaccaacattttaacaagtcactagaacgatatatccccaattataaatacatgtggcactttggcttgtatattactcttttgagtctgagcagcaggaatcaattcaccaaaaccttcaaaggcaaaaagcaggctgtggacttctggtgacgcaattcacagcctggaaactgtgagctagaagttcctacttctgctgctgttgtttctcaaggatattttctgtacatacaacaaactagaattttttttttttgagacggagttttgctcttgttgcccaggctggagtgcgatggtgcgatcctgactcactgcaacctccacctcccaggttcaagcgattctcctgcctcagcctcccgagtagctgggattacaggcattcgccaccacgcccagcttaattttgtatttttagtagagatgggtttctccatgttggtcaggctggtctcgaactcccaacctcaggtgatccacccgcctcagcctcccaaagtgctgggattacaggcgtgagctaccgcacctggccagaactgtactttttgaaaagggataagatactcagttttcatcttgttgctttattcagtttgctccgagggcaaaatcaacagtagtagagatcacaaacattattttgattggcctcacaagcctcatcagtaaaacctgaaaaaacagaaaatgttacacaagttgcaaagaaagcactcctggcgttcactgacatgatagcaaatggaaagaatataaatgcaacaggtgttaacatttagaacagtacttgtaaacctgctcatttctagacaagtccgggactctcgctgcgaacccttcatctatcactgctgatttcctttgacatgaaatatgactttatgaaaatcttcctaaacctcactctggctgcacctgagtggttcctattcctacggcgctggcatatgctgtcaggatttccactatctgtttcgtttctagggtcattcgggcttccttcagccagtcctgtgccactcgtctggattcccccttcagctgattgacaaactttgctgctagctccagatcaccatgctcaatgcaataggaagcatatgacagtaatttaaatgtgtttatatcctcagggcagagctctgggggcggcttcagttgctgaggtgggaataggagcagggactgtaggtaggagaggaagtactggtacaagctatttctggtttcatcaatcattgctacccttcgggccagtttttgaacagcatagaaacgggctctaagggtctcttcactgtacaccccacgggtcagggactctggagggatagctgcggttaaagcttgggtgaattcattatcagaacagttggctttgatggcctcaaccgcactacccagcgggatagtaggtgtttctgcagatgaggtcttcatgctgtactttaatgcctccactgaaagccagagttggtgggcttttctggcttcctcttcagcaactgcatggcctacaaagaaaaaaaggcaaagccaaacatttttctctccatctgacaacatacatccacagaactgatgcacattcaacaagctacatctacacatgtgcaagatgaggccagagagactttcttacaaccccacccccaccacttatttctggtgtattttcctagctggcctcttcatatcaggcagtaaagtcagaagtcattcacatctgcatgatatctaatccacatatttttacctttactagttgagaaagaaacatattatttaaattaggctaagacttaacgctaaggccatgagaaattttctgcaaagaaatgggagacttcagggccaggcacaatggctcatgcctgtaatcccagcaatttgggaggccgaggtggggtggatcacttgtggtcaggagttcaggactagcctggccaacatggtgaaaccctgtgtctactaaaaatacaaaacctagccaggcgtggtggcacgcacctgtattcccagctactcaggagtctgaggcaggagaatcgcttgaacccaggaggcggaggctgcagtgagtcgatatcacaccactgcactctaccctgggcgacagagcaagactctgtctcaaaaaaaaaaaaaaaaaaaaagaaatgggagacttcaaacgaacttaacagactactggatcttgaaattccatgagtattgaatttatttttattgttatgtgacaaaaaaagattccataacatcctaaaaaaacccattttattaataccctcattgtcatgacatttctctttcaatgtggcacatggaggcctcagcataaatactgtccatttggtagttggactcggcaaatcaccacctccagataacccaccaagtctgtggaaggcaagcatgggaccacactgacccctagcccttaccacccaggcacatgcgacatagccaaaggatactgggtaaatagccttgtaaatggtgattttgtgtttgtcatacaaggtataaatttctagttatatagattttgccattacttttaatggcaaaaactgcaattaagtagagtgattagtatttttatgtcctgatgtcagtacatgtaccccattttccctataaaattattttgataaattatgctgaggaaaattatctgtaagataaacatagcttatgcttactctgaacagcctgttcgattcctctgagtctggcataggcagtatttatatccagagtaaagttgtcaacttgctcttgactgagacgacgaaattgtaattcttgttcagagagtttctcagacaggttctgaaataaaacagaaatagttccagaaaaaagtgatactcaatgcatgtcatgtaactgtgtaatcttccagcaactacttgctgaagcaaagagggccttagagttgtcacgaaattcctacattttgtgtaaagtttcaaaaatgtcctgactcatatttgatgtatataatatattttttttttttttgagatggaatcttgctttattgccaggttggagtgcagtggcacaatcttggctcactgcaacctccgcctcccagattcaagtgattctcctgcctcagcctcccaagtagctgggattacaggcatgcatcaccatgccaattattgtatttttagtagagatgggtttcaccatgttggccaggatggtctcgatctcttaacctcgtgatccgcccacctcggcctcccaaagtgctgggattacaggcgtgagccaccgtgcccggccgatgtatataattctttacaggtttactgatggaacctaatattagaggaggcataccaagagaagagagaaggctgttaaagtcagaaacaaactgccaactgtattttatttttgagacagaatcttgctctgtcatccaggctggagtgcagtggcacaacctcagctcactgcaacctccacctcccagattcaaacgattctcatgcctcagcctccggagtggctgggattacatgcatgcaccaccatgcccaggtaatttttgtatttttaatagagacagggtttcgccatgttgggcaggctggtcttgaactcttgtcctcaagcgatccacccgcctcagcctcccaaattgctgggattataggtgttagccactgtgctcagccacaaattgtcagctttagaaagtaaattatctgtactgcaaacctaaacataataattagattaaattatattctaatatcttgtatttaagagcttatacattaatttttctcagaaaaatatccaaatagaatttaaaataccttttcatactgacatacatcgcgattctctggaagattttacttagaaaacctcaatatcttcttgcaagacaaagtaacaagttaatattactgtaaatgatttcttgaatagaaactatgattacaggcatcctgataatttactgggatttcaaaacttctctgggaaattacctcagttataaaaatctaagcagtaccatgccatctataggaggaagatacacatgtcaaatattactgtctgcattcctgaaatcccctttaccaactctccttaaagctctgaagattccaaatgactagaatatatattttaaaaacacatctgatcatgaacacacaggtacaccattatgtaaaaagaagcagttttgtagacatacaaggagatttccaaatcttcgacatcctcagagtacattaaaaggaaaggagagtctcttaatcctgtcaggaagaggggtgtggctgaagggagtccaggtcctcacctgctcaaattcagacttcaattcctgttcttgtaccctaaggacatctcgcaagtgatcagtgtgggcagctgcctgtcggcgaagctgggttctcatttcattttccatggcatctctgacttcttctatctgtgaaaccaaacatagtagttattagttttcaattctccacatatacttttaggaaaacagaaagaccactatcaaccatgacaacagcagcttccatatcctgaacgcctctaatgtgccaggcatgtgtacacttctacttctcatgtgaaacggaaaactaaaccctggaaggtgattcaaacaagatcacacagctgtggcaaaaaccagatttcaaacaaaggtctctctcacccccaaacttgtggtttttccacatcaccaggctgcctctcatataaaacactgccatttcctgaatcacatgctcct

SEQ ID NO: 98014 - DNA, 24777 bp, Homo sapiens
  misc_feature (1)...(24777): n = A,T,C or G
agaccaataccagacacagagatgttagactccttcatagaccttttcccatgctcacaatttcatgagacttaacccctaaaaaaaaaaaaaaatctcttattccacatgacttatactgctcatacttctctggtcaaacgctgaaacagacaatggtattggaaacaattccaggagaacaaagctttaagaatgggttccctgaatttgttctccgttgtctggattggttctctgatctgattatatttaaacaccttgcaagacaactacctaaggggaggccattaaaggtttaacaaagcagagactaacctccccagtcaaagaaggaagggctggccgggtgtggtggctcacgcctgtaaccccagcacttggggaggccaaggtgggcggatcactaaaggccaggagtctgtttgagaccagcctggcctacacggcaaaacttcgtctctacaaaaattagctgggcgtgttggcgcgcacctgtaattccagctactctagaggctgaggcaggagaatcgcttgaacctgggaggcagaggttgcactgagctgagatcatgccactgcactccagcctgggcgagagagcaagactccgtctcaaaaaataaaacatacataaaagaaagaagggctgtttttactggcaaaaaattctcaacagaatttagggattcatgatcctgatgtcatcataatttgcccatgtgtcctttttccaaaatttgggattttaccttcactccaaaaaatgccccaactttaacaggagaccctatgagattggaaattcattttgcattgtaactcagttagatgttgagtttggctttcagaaagtacagccttgcaaatacaggaaggtaatcatacaagctttagtcagtgagaaaggcaacactgttgtctatggcatgcattagcaaaaacaatgccctaaattattacctgtaatcaagtgcctaaagaaggcaaggctggcctggcgcagtggctcacgcctgtaatcccagcactctgggaggctgaggcgggcggatcacgcggtcaggagatcgagaccatcctggctaacatggtgaaaccctgtatctactaaaaatacaaaaaaaatcagccgggcattgtgatgggcgcctgtagtcccagctactcgggaggccaaggcaggagaatggcgtgaacctgtgaggtggagcttgcagtgagccaagatcgtgctactgcactccagcctgggcgacagtgcgagactccatctcaaaaaagaaataaaaataaaaaaaagaaagcaaggtgttgggttgaccaagcagatgctttggattggtttgcttcttctaattatgttggataactgggggaaagaaaatgataacttagggctttaacttctcagttcaacatcagataaaggaccagaaagccttgactgctttgtttgttttttgagatggagtctcgctctgttgcccaggctggagtgtgatagtgtgatctcggctcactgcaacctctgccagcctcctggcttcaagcgattctcctgcctcagcctcctgagtagctggtaccacagccgcgcgccaccacgcccagctaatttttgtatttttagtagagacagggtttcaccatcttggccaggctggtcttgaactcctgacctcgtgatcgtccaccttggcctcccaaagtgctgagattacaggcatgagccaccgcacctggtcgccttgactgctttgctgtatctgcaagactgtactttctaaaaatcaaactcaaaatctaattctgaattacaatgcaaattgaattcccaatctcatagtgtttaaagttagggcaatgttttgagacccaaaattttggaatagtgacacctgggcagattatgattccactaggaccatgaacccccatattctttttttttttcttttttgagacaagatctctaactgttgcttaggctggagtacaatggcgcgatctcggctcactgctacctctgcttcccaggctcaagtgatcctccctcctcagcctcttgcgtagctgggactgcaggggcatgccactatgcctggcttttttttttttttttttttaagagacagggtttcaccatgttgtccaggctggtttttaactcctggactcaagagatccacctacctcggcttcccaaagttctgggattataggcgtgagccaccatgcccagccagaacccctaaattctgttgagcctccttgtcagtcaaagaagcccttcctctcctgtctgaggaggttatgttcctcgtccctgtgaaatctgtaatggcctcacctgaggtggttgcctggcgggatctgctgattcttcttaaaacctactgtccactttgggaggccgaggcaggtggatcacctgaggttgggagttcgagaccagactgaccaacatggagaaaccccatctctactaaaaatacaaaattagccgggcatggtggcgcgtgcctgtaatcccagctactccggaggctgaggcaggagaattgcttgaacccgggaggcagatttgaatctccacagtggagagttatggtccttcaggcaatttccctacttgtgtcaggttggaggccgagagcctcttgaatgttaaggaggccaacccccttgtcttagtccatacctgctgcaataacatcacctaaagacggataaaaggattttgtatcctcttttgggtagaattagcttgttcacaattgtccaagggacagctgcttcatgttaggtagaagtctgattttgctctttagtttttgtctggaagttaaatatgattacaagaggtgttcattgatgccatgttgacaaccgatagactctggtactttttttgttgctgttgttaattagtttttatttcataatcataaacttaactctgcaatctagctaggcatggaaaggaacaaggaaaacatagaacccaaagggaactgcagtgagagcacaaagattctaggatactgcgagcaaatggggtggagggtgctctcctgagctacagaaggaatggtctggtggttaagataaaacacaagtcaaacttattagagttgcccacagtcagcaatggtgatcttcttactggtcttgccattcctggacccaaagcactccatggtctccacaatattcatgccttctttcaccttgctgaagaccacatgcttgccatccaaccactcagtcttggcagcacagatgaaaaactgggaactgtttgcgttgggtccagcatttgccatggacaagatgccagaaactgtatgcttccggatgaagttcttgtcatcaaatttctccctgtagatggacttgccaccagtgccatcatggcatgtgaagtctccaccctgacacataaaccctggaacaattctgtgaaagcaggaacccttatagccaaatcctttctctccagtgctcagagcatgaaagtttcctgctgtctttggaaacttgtctgcaaacagctcaaaggagatgcggcccaagggctccgtgtcaaagaacacggtggggttgaccatggctgatagcacagggctcctggcagcagcggtgcctgcaaagcccagtggtgttttttttaccatgtcaacttagctaggctagaaccacatttcctagattcctttccctgcatagttttgggttagggctagctataagagaaatgtgtgcagtttggaaggcagaagtggagcaacagtcattacattctgaaggtcaccagctcccacatggggtaggagctgggcctgcagctccttcagttaccactgtatcttctagatcaacttctgtgagttctgggccacgagcatgtgcagccccatggtgaagggtaccagctgttccagctgaaaaaatgtgcagcaaagggtcacggtattacccggtgctgggggaagggaataggaagattcactacagtcatatatttttacataatatttgactttttcatgacaaaggatttttaaattagaaaagcaccataaagttgaattaaccaaaaaagagagagagaaagtccagacccttcagtgactacctctgtctacataagatcagactcctcagtctggtatgtgaggccctggacaatcaggtgctagtgtacttttttaactttatctgtcactacttcccttcctgtgccctccactctggaattcttcctgggactgtaggactttagttgggccagaagggctgggtctgggatagggttgcttagagagtgccgtgatgccgcagcctcaatgctaacttttgtttttttgtttttttttttttttgagacggagtcttgctctgtcgcccaggctggagtgcagtggcatgatctcggctcactgcaagctctgcctcctgggttcacgccattctcctgcctcagtctcctcagtagctgggactacaggcgcccgccacctcgcccggctaattttttgtatttttagtagagacggggtttcaccgtgttaaacaggatggtctcgatctcctgaccccgtgatctgcccgcctcggcctcccaaagtgctgggattacaggcgtgagccacctcgcccggccaatgctaactttttttaggctaacatcttctgtagacttttagacattatctcattgagttctcatagactctgcaaggtaagtattactcccatccagaaccagacacctgatttgcagggtccagtgcaaactaaaaaaagcgtggccccttgttcatacatgtattaagaatttcaagccgggcatggtggctcaggcctgtaatcccagcacattgggaggccgaggtgggcggatcacctgagctcaggagttcgagaccagactggccaacgtgacgaaactctgtctctactaaaaatagaaaacttagccgggcgtggttgtgcacgcctgtagtcccagctactccgggggctgagacaggagaatcgcttgaacccgggaggcggaggttgcggtgagctgagatcgccccactgcactccagcctgggcgacagagcaagactccatctcaaaagaaaaaaaaaaaaaatcaaaatgacagcagagcattaaatgaagtgtaaggccatgtgtgactgtaccagtgtgaacctatgaggccagtcccacccctatcttacatctagggaacaggtacacagagatgaagtaaattcccaaggttactttgtcaagagcttggaaaatataagagtcagaagtctaacaggttgaatccctattaaactctccccaactaaactacgcccctccctgttgagctgaatctaatgaaagcttcctaaatgtattaaccacacacacgcacaatctgctatcagtcactttcagtagttcatcgctgtaacatctcaggagttcaatgtttcaacgtgttctgtagattactgtgataacgcggcaagctgtcgtaagacttcttgctgcacatttctttttaaaatattctccaggagtctgatgaaaaatacagacatacctatgtttaatgtcaatggatggaacttattttaaaaagtactgtaatggcagaagttgtgacacaaagtactgcagtgatgttgtaactccaacacctaaatatattatcaagcattcgcgttttgttttgttttttaagtgactactagatactgtgattcacttaagtgaagcgaactgaagcccgtggtcaaggagagacacctgaaggtgaagggacaaagcgagcagggtaagagctcgagcccgacccctctcaaaaaatatagacccggaacgcgcgcctgcgcagaacgaatcctcccgcgcacaagccgggcggaagagctggggcgggcaggggcgggaataaggttgctaggagaacgcgatgacgctacgggctcggcgctcttctccaccaatgggcgacgcgtacttgcagtggcgcgctgtgtgcgtcacgccgacgacgcgcgaagggcacacatcttagracccggaggacgtccggcctctgtgagccgcaacctttccaagggagtggttgtgtgatcgccatcttagggagtgagtgtggccgggccttctcctgtggcgggtgtggggagcggagcccagagctcctgtggggccgctgctttggcggtgggcccagccgggagcagcctctttcgaaggccgccgtgacctcttcaagggcgtggagacgggaaggaaaaggccccggttggggttccagggcgccggtaacgttaaccggcgccttgcctgtcctctaaccgtcgctccctcctcccctagaaagatgttctcgtccgtggcgcacctggcgcgggcgaaccccttcaacacgccacatctgcagctggtgcacgatggtctcggggacctccgcagcagctccccagggcccacgggccagccccgccgccctcgcaacctggcagccgccgccgtggaaggtgagatcagaccctgcccaatacagtcgtgtggtctacttgtgggccgcccagcctttgaggcctggacccggcttggaggacagggaaggacgagtccagcccgctgcaccgtaggacggcgcccagttgcttgccctggggtatcggccttttccaccataggcgggtgtcagatccttggccttccctcaagggcgtggaagcgctgaggccctgtgtcccttcgtgacctccgtgtgcccgagggaagagaggccgtgactagctctttctccgccgtgagctcgcttggtcagcaaactaagtactgggtaaactctcctcccgaaactactgaccacccacagttctactaactatattacctgtcctttgatttgcccttagttttcttaaaaatagtcctttcctaagttttatatttgtcgacgccaggtcagtcatttttgcacttaattgtatatgagataactagatgtcctgttttcgtgcgactggaggaggcagcttgcagccctacataggcaatagaaaggagataattggtgggcgtccctttggtgtgattatctcttgggattcttggtggttgggcccagctttaacttagttgtgtgtgttttaaatcctagtgaagtatgtacatacagagaaacctgaaaaccgaattgtaggagtcctaagaatgttatctaccttgtgcctgtaaaatcgaaagatttttttctttaaatcattcatgtgcttctgttgtctttagtatggatagagtccttatttacactatctgtcgttcagtttaaaagttaaagctaacattatttgtgtattaaatgtatttgactgcaggaatttgtgcgtatccgtttktatgttacaggagttcttaastggggatagtattggttagtggctgggataaactttgaagttgtttgcaagccttttacatgtcgagtgatctttctgagtttcgtttgtactctgaagtgtgctcttaccagtggttaataatttgaagtttgactttaattgtaaaagccgttaatgtagaaaacttttaaaaaaattaatatggcagaatacgagctattaatagtatcagatacagaaccctcataatttttaaatgatctgaatttggcagtgaattkttttttaagccacttaattgtggccaaagctattcagctgtgataatagtatctcacagggaaacattttctttcattccagtggccttagtcatctctgaagaaatacttacttgatttttttttttccaatcaaacagagcagtatagctgtgactatggatctggcagattctttatcctttgtggacttggaggaattattagctgtggcacaacacatacagcattggttcctctagatctggttaaatgcagaatgcaggtttgttttgcatgctggactagagcatattgaagcatgactgactgttaagttataagatatagtcrtctaacaagctgtgtggaaacctaactgtccaggaggtaagtttatgaccagtaacatgagttttatattaaaatgcatggtgtgtcttctcttactacagagtacagttgtgaatttggctccgcgaagtattatgcactgtgtggctttggtggggtmttaagttgtggtctgacacacactgctgtggttcccctggatttagtgaaatgccgtatgcaggtttgtattgagatgacaacattgaaagtatctctcatgtgacttaactctaaataaaatcttaaatgagaatttgaagacatcacaactgctagaaacttcagtaggaaaccacatagaatttctttaaattgtgggctttattttgactagtgttttaaatccaataaatgcctctattgtttgagtaaattgttcacttttagagtctggctgtaaatggctctttgctgctgctcttcacttctggccggagttcttcaagcttactagtgccccaaatagtcatttaacaagcacctatgtgttggagtgggtaaacaagtctgtgtattatgtgaagtaacaatgtcctttatctactaataagaccaaggcaaagagtacatgtagatttatttaaagtgctcttaatatcttagtatgaaaattttgtcagattagcctcttgtttatttacacaacattttaaaataatttgaatatattttaattaagatcattgaaacaaaaacaagacatcgaaaatttatttgttccaaactggattagaagtctacttacctaaaagagaaatgaatttgaaatattaggagggagaggaaggtgatgtataccatcccttctagtactggcagaaatagataagcttttcctccccccccattagttaatgtaatggatatgaaatgtacctttgctaaaacgtgttatgcatgtctcttgaagtgaatttagtttatgtgctttttttttttaacttgtgtttagtttgtttagtgttcacaaaactttatgctataagctacttaaagaactagcatatgttaggaatacagttatatctattatctagacagtagcttttaaaaagtaggaggtgggccaagcatggtcgcccacacctggaatgccagcattttgggtagccgaagcaggtgggtcacttgaggtcaggagttcgagatcagaactcaatctagccaacatggtgaaacctcatctctgctaaaaatacaaaaattagctgggcatggtggcgtgcctgtagtcgcagctactcgggaggctgaggcaggagaatcgcttgaacctgggaggtggaggttgcagtgagctgagatcacaccatggcactccatcctgggctacagagcaagactcaaaaaacaaacaaacaaaaaacacaaaaaaagtagtaggagttgggtggtaagaaatctgttaagaatcagttttgttacgtatttttgttgaaattttaccctcttaactatcactccaagacttaagtttgacacagaaagcttttgttgaaattttaccctcttaactatcactccaagacttaggtttgacacagaaagctagaccttaatgtacaacagtttctatttataaaagtaatcaaatgaacaataataaacagtgataagcataaactaataaaagttatatgaatgtagttcctcactcaaaatatcttaatattttcagatgtcagttgaccttggataactgaagccacagaaaatgaactcttggataagggagagctactgtatttctttttttttttttgagatggagtcttgctctgctgcccaggctggagtgtagtggtgccatcgtggctcactgcaacctccactccctccctcaggctcaagcgattgttctgtctcaccctcaccctcccgagtagctgggattacaggtgcacgccaccatgcccgtccaattttttgtattttagtagagatggggtttcactgtgttgcccaggctggtcttgaactcctgagctcaggtaatccacctgcctcagcctcccaaagtgctgggattacagatgtgagccaccgtgcctggcaggaattactgtagttaccttttgtgtagttgctgaaatttattatggaacccaaacaaaaataatcatgagattaaatttttatgttagctgtttggtgcatttaattttttttttcttgttttaaataaaggtggacccccaaaagtacaagggcatatttaacggattctcagttacacttaaagaggatggtgttcgtggtttggctaaaggatgggctccgactttccttggctactccatgcagggactctgcaagtttggcttttatgaagtctttaaagtcytgtatagcaatatgcttggagaggtatgtaattaactttaaaattgaatgttccgagtgtttaagactttccgagtgttcttagatttttgtctgtcttgccttattttagcactgaagaaaatggtcctacaaagtgagcaacttgttttaaatcgtatgcctgtgtcagcagagacaggttgataaatgtatttcattaaattacaattctccttttaatatactatcttgttttctaagtaagttggattttgagttttttagagaagggctctgggactcctttgcgtagttccggggcatggcatctagatattttttgaatattcatgttgttcacatagttacgtgttttgttaatgaggttatgagaccacatatatattccatatcatcgtgtgttactttataaaatgtctgaarcttagttgttttctagaactgtcacttcaattgaaaaccaacacaacarcaattcacatcccttccttgtgttttggattttaggagaatacttatctctggcgcacatcactatatttggctgcctctgccagtgctgaattctttgctgacattgccctggctcctatggaagctgctaaggttcgaattcaaacccagccaggttatgccaacactttgagggatgcagctcccaaaatgtataaggaagaaggcctaaaagcgtaagtaaacacttaaaaatttatactatgaaagtacttattttaagtgaacttcatttttttttgtttttttttttgttttgtttttttgagacaaagtctcgctctgtcacccaggctggagtgcagtggcgtgatctcggctcactgcaagctccgcctcccgggttcacgccattctcctgcctcagcctcccaagtagctgggactacaggcgcctgccactgcgcccagctaattttttgtatttttcagtatagacggagtttcaccgtctccatctcctgacctcatgatccgcccaccttggcctcccaaaatgctgggattacaggtgtgagccaccgcacccggcttcttttttttttttctttgagacggagttttgctcttgttgtccaggctggagtgcaatggcactatctcagctcactgcaacctccgcctcccaggttcaagtgattgtcctgcctcagcctgctgaatagctgggattacaggcatgcaccaccacgcctggctaattttgtatttttagtagagactccatgttggtcaggctggtctcgaactcctgacctcaggtgatccacccgcctcggcctcccaaagtgctgggattacaggcgtgagacaccgcgtctggctgtgaacttcattttttagtattaagcctaccagactttttaaaaagactattataacatttaatgtctatttacctgtatgtagaacataaacttgagaggtaaagataagttaatacatggtttgagccctggactgagttttttttttttccctagagtaaggaccatttgtcggtctacaaatgacttgatgtttggcctaaacatttactattaacttttasggagggcttgttagtatccttgtgatctattcacagttaagaatttccatgaccacaacatgcttccttagatccacctttgtggatgaatcttgaactgagttccacttgtaaacttcttgtttcttgtggttccagtagtcaaagaaacatccagcaacttttttggttgtatagtcaaaggtgcttgagtcattggcatgtaagagaaatatacctgcatgttagtctaacgttctgatagaaatgacatgcatttatgctgccatttgttactatcaggactcgactcgtgtgcggacatttctgttaataatgacagtctctgatagatgagtgtatgcaactgtgtaaaacaagtctcttgatttcctagattctacaagggggttgctcctctctggatgagacagataccatacaccatgatgaagttcgcctgctttgaacgtactgttgaagcactgtacaagtttgtggttcctaagccccgcagtgaatgttcaaagccagagcagctggttgtaacatttgtagcaggttacataggtacgaattacttagaacacacttgtctgaaattatgaacaaataatcatttccattattggcgttttttgagagggaaaaatactccaaaggttataaagcagtgtttttgtttttttggtttccctgaggcatagtctcgctctgttgcccaggctggagtgcagtggcatgataatagctcactgcaacctcctcctcctgggttcaagtgattcttctgccgyagcctcccaagtagctgggacaggcatgcaccgccatgccsggctgatttttgtttttgttttttgtttttttttgagatggagttttacccttgttgcccaggctggagtgcagtggtgcartcttggctcactgcagcctccgcctcctgggttcaagcgattctcctgtctcagcctcctgagtagctgggattgcaggcgtctgccactacgcccggctaatttttagtatttttagtagagacrgtttcactatgttggccaggctggtctcaaactcctggccccaggtgatctgcctgcctyggcctcccaaagtgctgggattacaggcgtgagccaccgcgcctggcctgatttttgtaaagatggggtttcaccatgttgatgagtctggtctcaaactcctgacctcaggtgatgtgcctggcctataaagcagttttatcttcccataacattttatatgctttttaggattcataaatacttgctaactagttcctaaaagggctgtttcatgggatgtcattattaggcttgggaatgtattgatcttactgttgcaccatttttttgttgttgtttattaagaattttatacagaaagtgttgaataaaatctgaaaaactttaaaagattgttccgttttacataggatagacagcttgataactgtacccgtgtcaccctgagtctgatttttattttagaactagaaaaatattattttaaaatcataaaaatgattattggctctgtgaagttttgtttttaactggcactgtatgggatcctttatcttttttcagctggagtcttttgtgcaattgtttctcaccctgctgattctgtggtatctgtgttgaataaagaaaaaggtagcagtgcttctctggtcctcaagagacttggatttaaaggtaggatgatgtttttttcttgaaagaaagaacaacagttttggatatgttgcatttttttcatttgcttttcctgtttgaaccaggtgtatggaagggactgtttgcccgtatcatcatgattggtaccctgactgcactacagtggtttatctatgactccgtgaaggtctacttcagacttcctcgccctcctccacccgagatgccagagtctctgaagaagaagcttgggttaactcagtagttagatcaaagcaaatgtggactgaatctgcttgttgatcagtgttgaagaaagtgcaaaaggaacttttatatatttgacagtgtaggaaattgtctattcctgatataattactgtagtactcttgcttaaggcaagagtttcagatttactgttgaaataaacccaactcttcatgatttgcctgtgacttatttttaaaacttttttaaaaaagatttagctttaaaatagttggaaagaatgaagtatataagttaaggaaaaaatacaaaactgaccatgaccattgttggttgaatattccagttgctattcagaaattgtcatatgtctcaagttttatcacacaaagttcctgtatttctagggaagcagactttaaatttctaaaaacttgatttaattatagttaaatatgtgtagtcatttgtggttattttggcaagtaaatgtcagtgtatacttacatttttgcagcatgtactacaccttttttatgttggtgagtttgctaatccttatttgtaagacaaggtaaaccaaattaggctgattcttagaatgacagtaaaggaccaaagtgattgacagctgaaaacaattttcaggtacactaattctctttacacagatctgactttttttttttttgagacggagtttcactcttgttgcccagacgagtgtagtgtcgcgatctcgcctcacggcaacctctgcctcccaggttcaagcgattgttctgcctcagcctcccaagtagctgggatttcaggcatgtgccaccacgcccagctaattttgtatttttagtagagacggggtttccctgtgttggtcaggctggtctcgaacttccaacctcaggtgatccgcccgcctcagcctcccaaactgctgggattataggcatgagccaccgtgcccggctctgactttttacagaaaattgaactattttcagtctggtattttaagaaaggtactgcttgacagctgaactatatgaatgccactggggaaaaagcattccatcatacttagatacgagattggattgtaggtttaagcccatttttaaagagctcctagaaagtgaattagtttttgtgtttagattccccttaagtttgattaggaagtgtataaaagttcaatcttttgtaatgacagcccaccactggaaaaaaaacgaaaaacctagtgtaatatataacatgctgtttttcaaacactagattttacctagagtccttatgtgtaatacgtgggttggttaacagtccctacgtaaagcgtacagatggcctggagagaaaaactttttcagagattggagagaaatgttactacaaactcatggtaaggtcagtgaactcaatttagaagccagtgcagctagttgcatgttaacttctttatatcatcattgcctgaacttgttaaaggttccaacattttacctgtgctgcaggaaaaaaggaaaagttgtaggtacaaatttggaccaaactttaaaaaggtaaagtaggatgtcttctgaacccaaccaagtggtggctgtggtgcttagcagtatcaactgtatattatttcttgctatgttagcaaagcatccaaagatcaatggtgtatgataagcttttctgtgggtgaagaactcgggagtatcagactcttctggttctgagtctcatgaagcttttcacttctgagctgaaaggatgctctttgtgcttttcactrttagtggtatagtctttcccgaaaatctctagcatggtggcttcagggcagctggacttaggtggtattttggggctccaggagagcttggcagagttggctttttaggacttatccttcaatgtcacataacatcacttttaccatgctcttggttacaacagtgatgtctcagaaaccaagtcccagattgaggaaaaaaggaacatagtctctacctcttcctgagaggaaagtcagtcaacgtgtaagaggagcagtagaaacgcattagtccagccaaygtgaaagtggaccgtagatctaaaacattttgggtatgcagttcagccagcccttactgaggcagttctgccaatcaggattcaagttttatttcctaagagttataataggttttatttgtgggcattgatacaaaatacgctgtgttcaagctatggagcctgccactgtagttactagagttacggttcaaagctatttctgagagaaagccacttcatcctcaaaacccaagaggcccacttaaagtgatgcgaattctcatttcaggtttttaaattatactaaaagattctagtaagaaaattttaatatgtatgtattggtgttctttttacatttcatttaatgaaatgtctactgtcaatacgataaagcagaacccagtggagtaagaatacacgaaactgccaggcacagtgggtcatgcctgtaaacccagcattctgggaggccgaggcrggtggatcacctgaggtcgggagttcaagaccagcctgaccaacatggagaaaccctgtctctactaaaaatacaaaattagctgcggtggtggtgcgtgcctgtaatcccagctactcaggaggctgaggcaggagaatcgcttgaacccgggaggcggaggttgtggtgagccaagattgcgccattgcactccagcctgggcaacaacagcraaactctgtctcaaaaaaaaaaaaaawatatatatatatatatatatgaagctgatagttgaattatgttgattcagggacaagatagcattgcatagtaacttccagtaggatcaaatattttgagagtggttaaaacgccaaggaatcctgattttatgaaattatgccttctgataggtgcaacaaaattgaacagaagagtaacagcttaactaaacctccattgtgtgaaagttttatgaaatgttttgacttttttttttttttccctagagaacagggttcttgctttgtcgcccaggctggagtacagccttgaactcctgggctcaagygatcctcctgcctcagcctcccagttagctgacacaattgggatgtgccactacttgctcctgttttttcatagacgggtcctgctgttgctcaggctggtctcggattcctggcctcaagcaactttcctgccccagctcctaaagcggccagggttacaggtagccgccttgtctgtcccgtttcgaccatattttatttttgagaaggtcttgctctgtcgccagactggagtgcagtggcacgatgatagctcactgcagcctcgatctcccaagctcaagtgatcctcccacctcagcctcttgaataactgggactgcaagtgtggaccaccatgtctggctaatgttttttatttttagcagaaatgaggtcttgctatgttgccaaggctagtcttgaactcctgagctcaagcgagccttctgccttggccttccaaagggctgggattagagggctgagccaccacacttggccaaccatattttattttttatatttttattttatttgatccttgttctgaaaccataaagtgagtttaacatttctggctgggcacagtggctcatgcctgtaattctaacactttaggagaccaaggcaggaggatgccttgagcccaggagtttgagaccatcctggacaacataatgagaaaagaaaatacaaaaattaaggggtgtggtgacacatgcctgtagtctcaactatttgggaggctgaggcaggaggaytgcttgagccygagaggttgaggctacagtgagccatgtttacgccattgcagtccagcctgggcgacagagtgaaaccctgtctcaaaaaaaaagtaacatttctatatgatttttgggatcgacatgtccataatgttaatgaagcgcatagcagtcactagtaaattaggagttatacattgcttctatagcatcagaaattgtatatcaggccaggtgcaaaagctcactcctgaaatccaagcactttgggaggctgaggtgggcggattgcttgaggtcaggagttcaagaacagcctggccaacatgatgaaaccccaggtctctactaaaaatacaaaaattggtcaggcatggtggtgcatgcctgtaattccagctactcgggaggctgaggcaggagaattgcttgaacccgggaggcagaggttgcagtgagccaagattgtgccactgcactccagcctgggcgacagagccagactgtctgaggaagaaattgtatatcaggctgggcacagtggctcatacccgtaatcccagcactttgggaggcccaggctgggtatcacttgagcccaggagttggagaccagcctgggcaacaaagtgagacccctctctctacaaaaaataaattagccaggcatggtggcacgtgcctgtaatctcagctacttaggaagctgaaggaggatcgtctgagcccaggagtttgaggctgcaatgagctacaatcacacccctgcactccggcctgggcgacagagtgataacctgtctaaaaaaataaaaataaattgtataatcatattgcaattttctttgcattactgatgaggaaaaatctcaaagtaattgtaaaaaatcctggatatcacatagttgagaaacaaagttattttaaacttacaggactctgtagttcacagttgaacactgtggcttcctgaaatatcaaagaataatgtacattaataagccagctactatcggcatcttgtaaaaattaaaaaattaaacataaataaaagttcaaactatgtgttgaatcatttgtcttttacaagccagccctgacttcacattctcagaggtgttcatagaagtgcatgagatgttaacctcaccactgataaggtttatgaatctcctggttattaaggtgtgacctgacaagtttcctagaaagcagctattccaaagttttcatgtgtgtttttatagacactgaagtgcagtatgcaatagtcacttaataagtattgctacactgaatgaaagagccttggggatgtgtctcttacacaagatataattcctacctaatactgtgaataataatttgatgttcaaatcagccagcttgctttgcagaatccagtgtattgcaaagtttgaagatggaaaataattcatgtgacaggccatatcattattccaagacccatgatcttaacactagagggctatattagtcaaggttaaaactgctaaatctcaaggaagcattaacatctgaaaatatggtatacccaacttttactcatggataagtttgacggtaaaatgtcattgtacttgatgttaataggttattgggaactgttacgttaagtgaaatcacaaataatgaaactatttttaccacagcctagttgatataaatgagttaagttcctacaacatatttctggtcacgaaaatataaccaaactaataaagaccaaaacaattctaatattaagcattaaataaatatgagctatacatgcatttaaggaagattatggtcggtcgcggtggctcacacttgtaatcccagcactttgggaggccctggcaggtggatcatgaagtcagtagttcgagaccagcctggccaacacagtgaaacccccatctctactgaaaatacaaaaattcacttaggcatggtgacgggcgtctgtaatcccagctactcgggaggctggggcaggagaatcgcttgaacccagaaggcagaggttgcagtgagccgaaatcgtgccactgcactccagcctgggtgacagagctagacttcgtctcaaaaaatgaaaaaaagacttcctctcaagcttggcgtttggtcgatggggacccacagaggaagcaagttggcagagtgaggtgggtctacggagaaacaggaacaactcccaagatcacatggctcctgaggtagagaaagtgcctctactgacgctggccgtttgttccagatcccaggaggacgcgttataccacaattcttttggggggatgctggtgagatacttataagaaatcctcttctttctttccttttcttttttctttttttttagacgcagtctcgctttgtcactcaggctggagtgcaatggcgcaatcttggctcactgcaacctccgcctcccaggttcaagcgattctcctgcctcagcctcccgagtagctgggattacaggcgcctgccaccacgcccgggtaatttttgcatttttagtacagataggggtctcccatgttgggaaggctgttctcctactctttcttttagttcttccccccttgctcctcccacgtggcgcgttttatggtcgttactctgcctctttattttatatttcccactttaannnnnnnnnnnnnnnnnnnnggcgtaaaagggaggggggggggatggggaaaaacgggtggcgggggagcacacaaagaagggacgggggggggggcgaaaaacaaaaaaaagggaggataacgacgggggggacgaataaaaagaaagcgaaagcgaagtcggagaagaaacggggggaaaaaatagagaggaaggggagaaaagaaaaaggacaaaaaatgaaatatggaagggaaggggaaatggtcctccatgccctgcctgttttttctttctttttttctttcatgagctgattcttaaaaccagagctcttggctgggcgcggtggcttacgcctgtaatccccagtgctttgggaggccgaggcgggtggcttgcctgagctcaggagttcaagaccagcctgggcaacacagtgaaaccccgtctctactgaaatacaaaaaattagccgggtgtggcagtgtgtgcctgtaatcccagctacttgggaggccgaggcaggaaaattgcttgaacctggtaggcagaggttgcagtgagccgagatggcgccactgtactccagcttgggcgacagagcaagattccacctcaaacaacaacaacaaaaaaaaaacagccctgtcgaccgggcacggtggctcacgcctgtaatcccagcactttgggaggccgaggcgggcggatcacaaggtcaggagatcgcgggcggatcacaaggtcaggagatcgagaccatcctggctaacacggtgaaaccccgtctctactaaaaatacaaaaattagctgggcatggtggcgggcacctgtagtcccagctactcctcccaggctgaggcaggagaatggcgtgaaccctggaggcggagtgcagtgagccaagactgtgccactgcactccagcctgggcagcagagcgagactccgtctcaaaaaaaaaaaaaaaaaaaaaaaaaaaaaccaaaaaacagagccctgactaacccccgttgtggctgactgtaagttctgtgaaatcagggaacacttgatgatagctagtagttgcccactgtgtatccactgaagcacctaccctggcattctacacatattcataaatgtttttgaacaaatgaatgaaacaactaagggtaaaactatctgctatttatccagaggcagaaccagagtcatgggcccatgagtggacacaagtaatgggacacggaatattgatcaacctgttctagatgtaacctcagtgtctgaatactagacagaggtggaactgagacaggccataggtgagataactatttcacaagtaagctatatcccatagccttctttaaaagggtgagacaatgataaggtgtgatagttaattttatccatcaattggctgggccatgatgtccagacgtttggcttaacattatactggatgttcccgtgagggtgtttttttggatgagattaacattctaatcagtggacctcgagtaaagcagattgccctccataatgtgagtggcaatccacgttcaatcagttgaaggcctgaatagaacagaagagtaatcccccaactcccacccaagcaagaaggaattctgccttcagacttgaactgcaacaccagctcttccctgaggatccagactgatggcccaccttgcagattttggacttgccatcctctataatccatgtgaaccaattccttaaacctctctctctctctcttcccctacatcttgttgcttctgtttctctggagaatcctgactactacacaagtttctggtaataatgactcaatttttctttcttttttttttgacacagggtctcactgttgccagcgctggagtgcagatcatagctcactgcagactacctcctgggctcaagcgattctcccacctcagcctccccattaactgggactacagatgcacaccacactggttaattttttttgtagagctgaaattcaccatgctggccaggctggtctcaaactcattagctcaagtgatctgcctgcctcagcctcccaaaatgctgggattacaggtgtgagccactgttcctggctatcaatttttcaaataagacagaacatatgaaatatttcctggcaatagcttggagaaggtgaaccaagtcagagtacatagttaacttttccatggcaaaaagcccaaggattggtgatgagccactctgatataagtattcataaactcagccgggcatggtggctcacgcctataatcccagcactctgggaggccgaggcgggcagatcacgaggtcaggagatagagaccatcctggctaacacggtgaaatcccgtctctactaaaaacaacaacaaaaaaattagccaggtgtcgtggtgggggcctgtagtcccagcgactcgagaggctgaggcaggagaatggcgtgaacccgggaggcggagcttgcagtgagccgagattgcaccactgcactccagcctgggcgacagagccagactccctctcaaaaaaatataagaggcccggcgcggtggctcatgcctgtaatcccagcactttgggaggctgaggcgggtggatcgcctgaggtcaggagttcgaggctagcctggccaacatggtgaaaccccatctctactaagaatacaaaaattagctgggcatggtggcgcaatcctgtaatcccagctactcgggaggctgaggcaggagaatcacttgaacccgggaggcggaggttgcagtgagccgagatcgtgccattgcactccagcctgggctacaagagcgaaactccgtctcaaaaaaacaaaaataaataaataaaaaataaaaataaaagagaattcataaactcgccaggcacagtggctgacacttgtgatcccagcattttgggaggccaaggcaggaggattgcttgacttcaggagttcgagaccactctgggcagtataggcagacttcatctctaccaaaaaaaaaaaaaaaaaaaaaaaattaaaaaagtagttagggttggtggtgaattcatgtagtcctagctactcaggaggctgagtgggaggattgcttgaggtcaggagacaagaggctgcagtgaggcatgatcatgccactgcactccagcttgggcaacaaaataagaccctgtctcaaacaacaacaacaacaacaacaacaacaacaacaacaaacacacagaattcataaactcttatttttgaggtgaccagctctgtggatctggatatccttcacgctaggcatttgaaactggggctaatgctgtgtgggtttactttaggttattatagtgtacttaaaaacatatattgatgagagattacacatataaacacaaatatttcaagtgtatactgtaatgccagaactctgggaggccaaagcagaagaatcacttgaacccaggagttcaagaccagcctgggcagcatagggagattccatctctaccaaaaaaaagaaaaaaaaagaaaaaaagaaaaaagaaattagccaggcatggtggcttgagactgtagtcccagctactcaggaagctgaggtggaaggatcatttgagtccaggaggtcaaggctgctgtgagccatgatcacaccaccgcactccagcctgggtgaaaaagtgagaacctgtctcaaaaataaaaataaataaaaatttaaaaagtgtaccctttgatgagttttgacatatatctatcacaatgaagataataaacatccttcactccttttccttgtggctctttgtaatctatacctgtctccatctctatctacagttgtgatggataattttgtttcaagctgcctgggctaagggatgcccagatagctggtaaaacattatttctgggtgtgtctgtgacagtgtttccagaagagcttagcatttgacttggtagactgcataaagaagatcactttcgttaatgtgggtgagcatcatcccatccattgagggcctggatagaaaaaaggcagaagggtgaatctgctactctttgaactgggacatctatcttctcctgccctcagacatcagtgttcctggttttgggcctttggtctttcacgagggcttaggccatcacttcctttggttgtcaggccttcagactcactctgaattaaaccactggctttcctagttttccagtttgcagatgaaagattgtgtgattcttggcctccataatcatgtgagccaattcctagaatctatctatctatctatctatctatctatctatctaatctatccacccatccatccaccacccacctacctacctacctacctacctatcaatcatctgtctatccatccatcctattggc

SEQ ID NO: 98015 - DNA, 20696 bp, Homo sapiens
gactttcttcacagaattggaaaaaactactttaaagttcatatgcaaccaaaaaagagcccacattgccaagtcaatcctaagccaaaagaacaaagctggaggcaccatgctacctgacttcaaactatactacaaggctacagtaaccaaaacagcatggtactggtaccaaaacagagatatagatcaatggaacagaacagagccctcagaaataacgccgcatatctacaactagctaatctttgacaaacctgagaaaaacaagcaatggggaaaggattccctatttaataaatggtgctgggaaaactggctagccatatgtagaaagctgaaactggatcccttccttataccttatacaaaaattaattcaagatggattaaacgttagacctaaaaaccataaaaaccctagaagaaaacctaggcattaccattcaagacataggcatgggcaaggacttcatgtctaaaacaccaaaagcaatggcaacaaaagccagaattgacaaatgggatctaattaaactaaagagcttctgcacagcaaaagaaactaccatcagagtgaacaggcaacctacaaaatgggagaaaattttcgcaacctactaatctgacaaagggctaatatgcagaatctacaatgaactgaaacaaatttacaagaaaaaaacaaacaaccccatcaaaaagtgggtgaaggacatgaacagacacttctcaaaagaagacatttatgcagccaaaaacacatgaaaaaaatgctcaccatcactggccatcagagaaatgcaaatcaaaaccacaatgagatatcatctcacaccagttagaatggcaatcattaaaacaacagttgctggagaggatgtggagaaataagaacacttttacactgttggtgggactgtaaactagttcaaccattgtggaagtcagtgtggtgattcctcagggatctagaactagaaataccatttgacccagccatcccattactgggtatatacccaaaggactataaatcatcctgctataaagacacatgcacacgtatgtttattgcggcactattcacaatagcaaagacttggaaccaacccaaatgtccaacaatgatagactggattaagaaaatgtggcacatatacaccatggaatactatgcagccataaaaaatgatgagttcatgtcctttgtagggacatggatgaaattggaaatcatcattctcagtaaactatcgtaaggacaaaaaaccaaacaccgcatgttctcactcataggtgggaattgaacaatgagaacacagggacacaggaaggggaacatcacactctgggggctgttgtggggtggggggagggggagggatagctttaggagatatacctaatgctaaatgacaagttaatgggtgcagcacaccagcatggcacatgtatacatatgtaactaacctgcacattgtgcacatgtaccctaaaacttaaagtataataataataaaatttaaaaaaaggtcaggaaacaacaacaataacaacaacaacaacaacaacaacaaaaagaaggtcatataaatcattttagtcttttatcatttcggtctcctataatttttattgtgtttgatgttggattaataatctttatgcataagtttttattggagttttgaacgtttttatttagtctatagatcattaaattattggaaatctgtgttgtagagtcttttataagaaaagtaattttggactgggtgcagtgactcatgcctgtaatcccagcactttgggaggccaaggcggatggatcaattcaggccaggagttccagaccagcctggccaacatggtgaaaccccgtctctactaaaaatacaaaaattagccatgggtggtggtgtgcatctgtagtccgagctactagggaggctgaggcaggagaatcacttgaacctgggaggtggaggttgcagtgatcatgccactgtactccagcctgggaaacagaatgagactctgtctcaaaaaaaaaaaaaaaaaaaaaaaagtaattttatactagagttggttgcaaatgtttttgggccaggcatggtggctcatgcctgtaatcccggcattttgggaggccaaggcggatggatcacctgaggtcaggagtttgagactagcctgggccacatggcaaaaccccatctctacgaaaaatacaaaaattagctgggcatggtggcggggacctgtactcccagctacttgggaggctgaggtaggagaatcgcttgaacctggaaggtggaggttgcagtgagctgagatttcgccactgcactccagcctgggcgacagagtgagtgagactccttctccaaaaaaaaaaaaaaaaaaagataatgaccagaattatcatgggcagcagcatcacatcagaatcatcagacttttataaattttatataatctttaggatatttatatttataacatttatataaatctaattttagaaaggattaacataattaaaattatgaccgcaaatatattagatatttataaatttaaataatttttggaacatttatatcaataacatatttataaacatgactgaaggatctagtattatttatcatttgacaacatttttaatataatttttcaaatctaattatttaatctataaagacttattttaggattttgatcttggagaaacctgtaaaagatataaaaagatctaaacaccttgtcaaattagaatcataggccaggcatgggggctcacatctgcaataccagcactttaggaggccaaggcgggtgggtcgtttgagctgaggagtttaagaccagcctgggcaacatggtgaaacaccatctttacaaaaaatacaaaaattagctgggtgtagtagtgcacaccagtagtcccagctactcaggaggctgaggtgggaggattgcttgagcccaggaggttgaggttgcagggagccaagattgtgccactgcactcccgcctgggcgacagaacgagactccgtctcaaaaaaaaaaaacaaaacaaaaaaaacaaaacaaaacaaattaaaatcacaggtctttgtaaaataatatttatttaactagagtgatgatcaaaagactttacaagcaatagagaaaattatatggacgtgaaaatcttaactgttttattttattaatttatttttgagacagggttttgttctgtcacccaggctggagtgcagtggtgcgaccatagctcactgtagccttgaccttctgggctcaatctatcccactgcttcagcttcctgagtagctgggactacagatttacttccccacacccagcttttttttgtttgttttggagagacggggtttccctatgttgcccaggctaatcttgaactcttgagctcaagcaatccacctgcctcggcctcccagggtgctaggattataggcgtgaggcaccaggcctgtcctaactcttttgcagcttagtcttagtaagtaattaaaaatctgataaagataacacagaaattatttcaataacatgtaaactttttgtttttaaggccaatgaccaaaatgtaaagacaaacctcttgtagtgtgattgtggttttttttttgagacagaattttgctctgtcacccaggctggagtgcagtggcaccatcttggctcactgcaacctctgcctcccgggttcaagtgattctcccgcctcagcctccctagtaactgagattacaggcatgtgctaccacatcaggctaatttgtttttgtatttttagtagagatggggtttcaccaagttggccaggctagtctggaactcccgacctcagatgatccacccaccttggcctcccaaagtgctggaattacaggtgtgagccactgcgcctggcctgaatttttatttttagtaaccttaaattttagtggaaacttagaaagtaagatcttgagttgtctgtcacaaattagtatgttaaagagatgagctactttataatgtttagaaacatgtttttttataatataattttttcttttctttaacttttattttaggttcaggcgtacatgtgcaggtttgttacacaggtaaatggcacattgcaggagtttggtgtacagattatttgatcactaaggtaatacacatagtacccagttggtagtttttggtcctcaccttgcttcccaccctccaccctcaagtaggccttggtgtcgttgttcccttctttgtgtttatatgtcctcaatgtttagcttttatttataagtgagaacacacagtatttgcttttctgttcctgtgttagtttgcttaggataatggcctccagttccatccttgttgttgcaaaggacatggtctcattctttttttatggctgcatagtattccatggtgtatatgtaccacatgttcttgatccagttgatggacatttaggttgattccatgtatttgctattgtgactagtgctgcaatgaacatacatgtgcatgtgtctctatggtagaacaatttctattcctttgggtatatacccaataatgggattgctgggtcaaatggtaattctgttttaagtcctttgagaaattgtcaaactgcttcccacaatgcctgaactaatttacatccccacaagcagtgtataagcatttccttttctccataacctctccagcatgttattactatatatataatttttactttttaatcatagtcattctgactggtgtgagatggtatctcattgtggttttgatttgcatttctctaatgattagtgatgttgagcattttgttgtatgctttttggatacgtgtatgtcttcttttgaaaactgtctgttcatatcttttgcctacttttttaatgaggttgcttggtttttccttgtaaatttaagtttcttatagattcttggtattagacctttgtcagatgcatagtttgcaaatattttctcccattctgtaggttgtctgtttactttgttgatggcttattttgctgtgcagaagctctttagtttaattaggtctcatttgttgatttttgtttttgctttgttacaattgcttttggcgtcttcatcatgaaatctttgccagtcctatttccagaatggcatatcctaggttatctttcagagtttttatagtttttggttttacagttaagtccttaatccatcttgggttaatttttgtgtatggtataaggaaggggtccagtttcagtcttctgcatatggctagccagttatctcaacaccacttattgaatagagagtcctttttccattgcttgttttgtcagctttgtcaaagatcagatggttgtaggtgtgtgaacttgtttcttggctctctattctgttccattggtctataggtttgtatttgtaccagtaccatgctgttttggttactgtagccctgtagtatagttgggtaatgtgatgcttccagctttgttctttttgcttaggattgccttggctgctcaggctatattttgtttccatatgaattttaaaatagttttttctaattctgtgaacaatgtcattggtagtttgataggaatagcattgaatttgtaaattgctttgagcagtatggccattttaacaatattgattcttcatattcatgaacatggcatgtttttccatttgcttgtgtcatttctgatttctttgagcagtgttttgtaactctagttgtagaggtctttcacctccttgcttaacagtattcttagttattgggccaggcgcggtggctcatgcctgtaatcccagcactttgggaggccgaggcaggcggatcacgaggtcaggaaatcgagactatgctggctaacacggtgaaaccctgtctctactaaaaatacaaaaaattagctgggtgtggtggcgagcgcctatagtcccagctactcgggaggctgaggcaggagaatggtgtgaacctgggaggcggagcttgcagtaaacctagatcgcaccactacgctccagcctgggtgacagagcgagactctgtctcaaaaacaaaaacaaaaaaacrgcattcttagttattttattcttttgtggctattgtgaatggggttgcattcttgatctggctctcagcttggacataattttttcttaattagaaatgacccagatgtttaatgagtatctattatttaatttaacataactttaagattttgaattacacaaaaagtttttaataagcatttatctcatttatgcttacccaatttatttatttttaataggttgactagactatttatgaaaacttagatattagacaaagttagtcattatcaaaagttatgtatggttatgttaaacatttttatagcctgtgattatcaggtgttcacccgagtgagaaacttaaattaaaatatgggtattttgtcaacaactcagaagatttagytgtttttattaagctaacaatattaaatgtcttatttattaaaattgcacaaacaaagatcatttggttttgacsagatttatagtcttataacctttgtgtcaaacccaggcaccttaaartatctagtggagagaaatacaaaactttctgaccagtaaactcagacaaaaatgtacgttgacaattttaaagacatttaaatgtttatcttatcaataatttgaacatcaacttatttattaaagacttctttaagtcatataaacttggaacwtactkgggtttagtaatttatgagcactcatctatttataagtcagttttgtagcatataratacaacatataacaatatatgtacatatatttaaacacatctaaacaaacatatacacacacataaagactttatagtatttattttagaattttagtcatgagagagtagcataaacttactagtttataaaagacagttggatccatattacagmtgacaaaattggaacttgtttacatggcttaaactttgtctcaacagataacttaatgaagrctgtggatcaaaattttgggtaaagcaattcttatggcagtttgattttaaaaacatcttctgccccttttttctttagttctaaatgatcttagggttaacattttaatgtttatattttagttagaactgtctgaattgttaaaaacacacacacacacaaaatctctaagtaattttgcattagcaataccataaacagtgagctttatctcaataccagtagaaaagttagcagatttaaagtgggcagaaaaaaaacagagaacttagaaggctctgtgtgctaactctaaagttataagttgaccatctgagctctgaattccttttctttttctttttttcagaaggagtcttgctctgtcacccaggctggagtgcagtggcacgatctcggcttactgcaacctccgcctcctgggatcaagtgatactcctgcctcagcttctcaagtagctgggactacaggtgtgtaccaccacacccagctaatttgtgtatttttattagagatggagtttcgccaagttggccaggctggtttcaaactcctgacctcaagtgatccgcccgcctcgtcctcccaaagtcctgtgattacaggcttcagccacctcgcccggccctgaattgttttagtgtaatctgtccatcaatttaaaatgtacagaagaaccagccatgatacatagccagctgtagtctcaaaaaaacctggcatatattaatgtttgagaattttattttgtttcttaatctcccagtttagaaaaaaatttttggatctgcattttttaatcttaagtttcattttctttttgtagttgttccatttgctcttttcgttttacatttatatatattttccccttttgagggaaggaaatgtgtgcattgtgaactcctaaaaatctctgcctaagagatatatgggagctgagtgaacaaggaaaaagggatgaactcatattgtttccggaaccaaactgggtctggctgcgttttcttgaggcccgataargagaagcagacaaactaggaaagaaaggaatttattactgtaaccagacacagggagaaggccagagataattcaaacagaccaactcaaagagttacaattttcttagtgcttacataggttggggttatgtgcctatgtgccgtatatcattcgccttaagtctactggtaactaattttgtttcaactagaaggtcagaggcaaaaaatgctgtctaagtctgattaaaagggtcctagtaccttcaaggcctgtctactgtggtactggagtgactatttctttttctttctttcttttcttttctttttttttttgagacggagtctcactctgtcgcccaggctggagtgcagtggcacaatctcggctcactgcaacctctgcctcctgcgttctagtgattctcctgcctctgcctcctgggtagctgggattacaggcgtgtgccaccatgcctggctaattttgtatttttagtagagatgggggyttcaccatgttggccaggctggttttaaactcctgacctccggtgatctgcctgcctcagcctcccaaaatgctgggattacaggtgtgagtcatcgcgcctggcctggagtgattatttctatcttatctcctttacagcttgacccagagagctgccttagactctccaatgaatctattcaaacagctgcctctgttaccttgacttgtctcagattytgttacccgagatgggtcctggcactaggaatgtaagactgtctctattattttgacttgttccaggttagggagaagcctgtgcaaggctcctactgaccatatgtttcatttctagcttttatgtctgggcacctatttccctagtttggactatttgctcaatttttaaggcagctctgtggaaatctgtttgtgtaacacaagtgctatgcaggcctgtctgtgtgactgtcatgtaggcctgattgtgtggttgtcagggagaactctactgccacaatagcacacggggtaagaggaggggaaacagttggaggtttagaagcttctaagtcccactgaaagtctctcatttaatttttccggttctaagactagcaacttttttttttctttcctgaggggtgtctcgctctatcgcccaggctggagtgcagtggygctacctcggcttactgcaagctccgcctcctgggttcaggtttacgccattctcctgcctcagcctccggagcagctgggactacaggcacctgccaccacgcgcggctaatttttttttgtatttttagtagagacagggtttcacagtgttagccaggttggtctcgatctcctgacctcataatccgcccgcctcggcctcccaaagtgctgggattacaggtgtgagccaccgcacccagccaagactagcatcttttttaattgcccacacaaataaatcacttaaggcatttcaaaaagatctccatttcagctattgttgcttataaccatcgtgggttaggcaggaccacttacctcagcacttgtaaatatgaagacttttaaaaataacttttcatggctgggtgcagttgtgtctggaattggtgggttcttggtctcactgacttcaagaatgaagccgckgaccctcgtggtgagtgctacagctcttaagggggcgcgtctggagtttgtcccttctgatgttcagctgtgtttggagtttcttccttctggtgggttcgtggtctcgctggctcaggagtgaagctgcagaccttcgcagtgagtgttacagctcttaaggcagtgcgtctggagttgttccttcctcccagtgggctcgtggtctcgctggcttcaggagtgaagctgcagacctttgcggtgagtgtcacagctcataaaagcagtgtggacccaaagagccagcagtagcaagatttattgcaaagagcaaaagaacaaagcttccacagtgtggaaggggacctgagtgggttgccactgctggctcctgcagcctgyttttattctcttatctggccccacccacatcctgctgattggtagagcccagtggtctgttttgacagggcgctgattggtgtgtttacaatccctgagatagatacaaagttctccacgtccccatcagattagttagatacagagtaaggacacaaaggttctccaaggccccaccagagcagctagatacaaagtgtccatggtgcattcacaaaccctgagctagacacagggtgctgacyggtgtgtttacaaaccttgagctagatacagagtgccgattggtgtatttacaatccctgagctagacataaaggttccccacagccccaccagagcagctagatacagagtgtcgattggtggattcacaaaccctgagctagacacagggtgctgattggtgtttacaaaccttgagctagatacagagtgccgattggtgtatttacaatccctgagctagacataaaggttctccaaggccccaccagcctcagaagcccagctggcttcacccagtggatcccgcascagggctgcaggtggagctgcctgccagtcccgcgccatgtgctcgcactcctcagcccttgggtggtcatgggactgggcgccctggagcagggggcggcgctcgtcggggaggctcgggctgcacaggaacccacggagacgggggaaggctcaggcatggcgtgctgcagtcccgaggcctgccccgcgggaaggcagctaaggcctggtgagaaattgagcgcagaaccggtgggctggcactactgggggacctagtacaccctacgcagctgctggcccgggtgctaagtccctcattgcccggggccagcagggccggctggctgctcccagtgcggggcccgccaagcccacgcccacccggaactccagctggcctgcaagcgccccgcgcagccccggttcccgctcgcgcctctctctccacacctccctgcaagctgagggagtgggctccggccttggccagcccagaaaggggctcccacagtgcagcggtgggctgaagggctcctcaagtgccgccaaagtgggagcccaggcagaggaggcgccgagagcgagtgagggctgttgggactgccagcacgctgtcacctctcgcagtggctcatgtctgtaatcccagcactttgggaagccgagggaggcggatcacctgaggtcaggagttcgtgagcagcctggccaacatggtgaaaccctgtctctactaaaaatacaaacaacaacaacaacaacaaaaaactagctgggcgtgatggtgggcatctgtagtcccaggtactcgggaggctgggatgctgaggctggagaatcgcttgaaccctggaggtggaggttgcagtgagctgagattacgtcattgcactccagcctggctgacaagcgcgaaactccgtctcaaaacaaacaaacaaacaaacaactttctccataacttttatgtataaacactggctgatgtacagtcagtcttaacaggacccatttcccatcctggttgttttgagtgagacaagctatgttgtggagcaagagtgccctaatgtgatcaaaaaatgataaaacgaaggaaagtttgtctctccccaaccccctagagaaaccattcayaaagatcctattttaccctgccctagaattcaacaaaaacccttaccttaaatttgtagcagtagctcttattctgagaacatcactgcacctcctagccaagggggaaagcagcttcaataaggcagaactttgcctaaaacaggaagttsgttgatttcaggagaaacttatctgttgcatccagcaggggcatcccagttgggggaacacgatggattccgtgcatgaaggttgaaacctgctcaggaaggtccagggtgaccagggaggccactctgaaacactgatgactacatcattttgtggagtgaaattaaagctgccgaggcagaaatactttgataagggtttatttgaagccaaaggtgaggatcaacccagaaagatgcaccaacacatttggatgtgtgccagaatcttttacaatttggaatgtttttataagaaagtttaggagaagagaagggaacttcttatatcagaattgtctgtttttattggagggtataatacagaggtcataatgattagatacaggttataacatacaggctaaaacattttgtatgtaaaaccatcagtgaaactttataagagagggcacagtggcttatgcctgtaatcccagcactttgggaggttgagacgggcagatcccttgaggagaagctcatcgctcctgaggccagtagttcgagaccagcctagccaatatggtgaaactctgctctactaaaaatacaaaaattagctgggcatggtggcacatgcctgcaatcccaacaactcgagaggctgaggcaggaaggttgcttgaacctaggagatggaggttgcagtaagrtgagactgcgccactgcactccagcctgggtgacaaagaccctgtctcaaaaaaaaaaagaaaagaaaagaaaaactttatgatttataaatataaagcaaaacttcatggtttagaaacaaaggattgtgcttttccatatcagtggaaaatcagaacatcaacagttggaagaactcataagatctgagtaattaaagataagatttgaggaactcacaagattctttactcaggaacaggatgtaacccatgcatcaagagatcttttccgggggctaattgggactaatgtgactggtaggttatcagcagagaccacgtctgtcttgttcaacctgtgtcccaggtcctagcaccatgcctgctaccatttaagtgttcatgtgaagtttgttgttgagaaactaattacctaaaagttagaacttgacctttgcattttatcgaggaggctatgagactcagagggttacacagctagtgagtggcagagcctggacttgaactcagttgtgctgaagccagaatgtgttccttcctgagcattcaaggacagggaaggtgaaactccagctagygggcagcccgtgtgcttgttctagggagactgcaggccgattcctgggagctgggtcttcatggtgacacagtaagaacaactcacctattggctgggcgcagtggctcacgcctgtaatcccagcactttgggaggccgaggtggttggatcacttgaggtcaggagttggagaccagcctggccaatatggtgaaaccctgtctctactaaaaatacaaaaattagctgggtgtggtggctcatgcctgtaatctcagctgctcgggaggctgaggtaggataatcgcttgaacctggtggggcggaggtttcagtgagccgagattggcaccattgccctccagcctgggtgacaaagtgagactctgtctcaaaaaacaaagcaaagcaaaacaaaacaaaacgaaacagaactactcacctatgttgtggatcaactgtgtccccactgtaccaaatccttatttatttaaaaaaatttgttttggacccttttcacaagatgrtgccgaaagygaagaaggaagctcctgccyctcctaaagccgaagccaaagcgaaggctttaaaggccaagaaggcagtgttgaaaggtgtccacagccacaaaaagaagatccacaygtcacccaccttccggcggccgaagacactgcgactccrgagacagcccaaatatcctcggaagagcgctcccaggagaaacaagcttgaccactatgctatcatcaagtttccgctgaccactgagtctgccatgaagaakatagaagayaacaacacacttgtgttcattgtggatgttaaagccaacaagcaccagatcaaacaggctgtgaagaagctctatgacattgatgtggccaaggtcaacaccctgattcggcctgatggagagaagaaggtatatgttcgactgrctcctgattacgatgctttggatgttgccaacaaaattgggattatctaaactgagtgcagctgcctaattctgaatatatatatatatatcttttcaccatatacatgcctctctgtcaatttctggttgggctgggaggccacacacagacactgacatgacagggcttgggcaagactcctgttctacttatccttttgaaatattcaccctgccactccaccatgtgtgatcaytccagagatctttgtgactagagttagtgtcctaggaaaaccagaactcagaacttgcctccatggttgagggtaacaagaagctgtacaagaaccccttttatccctggaagaggctgtgtatgaaaccaatgcccagggtttgaagggcgttagcatccatttcaggggagtgtggattggctggctttctggtagcattttgtcctcacacacccatctactgtgtccaaccggtctgtctgcttccctcaccccttgcccaataaaggacaaggacttcagaggaaaaaaaaaattgttttaattattacatttatagcatcccagcttgaaaaacgaagcaacagagacgtgtagaaagttaaaaggtttctactccaattgtaatttctccaattccatcgtggtatgtgcattcttctggatttttttcagtgtgcatacacatgtgtacatacagacacatacacatacactcgtacgttttttatattgatgggaccattactcacatctttaatttggaacttattctctgctctctctccctgtgtctgatagaatgctggcaatgctttgtgatgctttaggagacacatttgtcagatgtgaagacttaggcttaggaattgatgggtggtgactgaggctggtcactctgtggtctggtgcactttcccactgccccactctgggtaggggtggaagggcccctgcagagaagcaccagcttctgttttcccatgagtgactcccctccctccaatactcactaggggactttccataagccaggctgtgtgatttggcccctgagatattcctggttggatgagaaatcttggggagactccagccttctcaggcacaaaactcccagagtagagagctccctctggactatctctcctgcccttggcctcaatttcctgttctgctacctggtccaggaatcaggacctcagtgatgaaacttggcttctcccaggctgcagagtcctgctggggtgtgagtccttgctcatggctcatgaaagttcaacatatgcttatggcttcaatattgggccagatttcgcttcccaccttggccttcccaaggatgaattgtgtggtcccatgtgttggtgatctcagcatgaactgcgaaggaagaagaactcatgtgcatttttgcgcagcctgggtgccgcatcccatggctgcccttggagggtctccctcttcattcatgtctctgctaaaaggtcacctcctcctggaagccctccctgattctctgatttattggattgtctgatttattggatcattgcctgtctctttacgtgatgtgatacctttgacagctgagcactcactgttgcatccccagtgcctggcacatagtaggtgctcaagaaacatatagttgcatgaacagccctgagaggcatagatttttctttttattttataactgaaagaagccctgagaatcagaaaggttaaggggttaactcccagcatccctgcaaagcctggagccaggaatcttaaaacaagtctacttaaacttgaaggattgtatagggatttcctggggttctattaagatgcaatcctgagttagtatttctggattggggcatgggattctgcatttcctgccagctctcaggtaatgctcatggcgcaggtccctggaccacactttgagtaactgagccttacagttaaagtgcatgttgccagctccttcccttcacctcctctttttgaggctctttcctctgaagactcctcctctgtccccctctaaagcccctcattccacatcccatctcccaaatgcaaaatctgaactcacagcaatttgggaggccgaggtgcgcagatcacgaggtcaggagttcgagatcagcctggccaacatgtgaaaccctgtctctactaaagatacaaaaaattagctgggcgtggtagtgggcgcctgtaatcccagctactcgggaggctgaggcaggagaatcgcttgaacccaggaagcagaggttgcagtgagccgagctcaccctccatcccgtcgcgccaatgcactccagcctgggtgacagcgcaagactccgtctcaagaaaaaaaaaaaaaaaagcctgagcccaggaggggcagtactgcccatcatcaaagcaaggacagagcagaaggagactccactcagggtcccctggctctgccttccactgtctcgacctcgtctgctctcagcttccctcagcgttacccttcacaggccccctctgtcctcctatgctgagcccagcatccaggttgctttcccagctggtctcgttatctccagaatctgaccctgggtaatccccagtggtgctgcattctttgttcctgctcctgtcagtcaggtctcagcctaggtcctgggctgctgggaggcaggacttgaattcctgccaggctggcagtggagggcaacaggcttctgtctctgaatctcctaaatctgcactgagaaatggtgcacagcattctcctggcccacatttggaggggaacttgggggatgttttgggagaaggcttggcctcacccagctcacctggcatctgaacacttcattcctttacctaccttcccctggtcttggaaaggcagggtggctgcacattttggggctcagatcaccattggctgccctccaacttaccctctgccttacatgagaggtaccaaggactgagtggccatgctcggtcaccctgaattggttcttctacagttatggtccccaccagtccctgggttttggttggctgccctggcacaaaggaggcatccaggctgtgaggattggctagtccagcccagcccagccccgcccagcctcctgaagtgtttcctagatctggggccaggagcaaaaacctcctggcaaaggaggagaggaggttgtgcgggacaaccttctcctgacagaaggtgccaggctgggggtggcagggctggatagggaggggcactgcccaagactggggtggctccagggagctggccctggtgatgggtgcttgcaggtaaccagaggtcaagttggctggtggttctagatgaggctgtctggtttctggtctctagtttccttgatctctaattttgtgtcacttctcctctcccctctcccttggcctcttcccctgagattccctgaatctccctccatgctcttaaccatgtttacccatcattggtcctggagctccccagcccctttcctaggcctcaggacctcaccctccatcccgtctgccctgcaggatgtcgctgctgagcctgtcttggctgggcctcaggccggtggcagcatccccgtggcttctcctgctggtggtcggggcctcctggctcctggcccgcatcctggcctggacctatgccttctatcacaacggccgccgcctccggtgtttcccgcagccccggaaacagaactggttcttgggtcacctgggcctggtgagtggcaggaggatggatctagtgtctcagggtggaagggtggaaatggggctcaggctgagggggtgggctcgggtctgggacggcagagaaactcactcattcctctgatcactcactcattcctctgatcactcactcattcctcttcccactcattcctctcctcactcactcattcctctcctcactcactcattctcctcactcactcattcctctcctcactcactcattcctctgcgcactcactcattcctctcctcactcactcattcctctcctcattcactcattctcctcactcattcctctcctcactcactcattcctctcctcactcactcattctcctcactcactcattcctcttcccactcactcattcctctcctcactcactcattcctctcctcactcactcattcctctcctcacccactcattcctctcctcgctcactcattcctctcctcgctcactcattcctctcctcgctcactcattcctctcctcgctcactcattcctctcctcgctcactcattcctctgctttgccatgccaagcctttctcatctccttgtctaggggaagtcacccctagactgttttgaattcttttcctgactgttttcagtacactagtgaacctctgatgggttcctgtggcagagtgggggttacgcagcaggtattcaccattatttccacattatccactgctgtactggaggcctcttgggctcactgtctagaacccactttctgcctggcccatttgcttgtgtccatccatctctgggctggagttttcccataggaagtagctatacaccccctaccctcacatcgtgacacagctgggccagaagagagatgtgtgccatctccaccctcccccgtgcaggggcatcttctttatccccactaagctgtcccaatgagttgtgttgcccaacctggataaaaattggccagtgacttcctctttaaagttacctttgacccttcagaccctgccctttcacttagacctgctgtcccctttgggcgatttggcatcagtctgttctttggcaaatggcaggaatgatgggtgtgtccacaggtgcagggtgagggaacacaggacggactagctctgagcttgatgtgcaaaaggtgctccctggtgagagccgctgttcttcctgacagacagttagagccacctcttctcccctgggggctgctgagaaaggaagttccaccgtgtacagaccttctccatgggagggcctggggcccctgaggcccagccaggacataaaaggatgtggggaccagccctggggacatgtcctgaggccacattgctgcccacacaccacacttgtggagcccaccccacgtgactttccgtgggctggagccactcccaggatgagaaaatccatcctctttattcaaggtgggcttctccatgaacagacagtttgtcttccccctgttccctgggatgtagccttggaagttagatactgcccccaagagaagggagcaggagggagtggagattacccctatgtgcgcagaatctggacatgctgttcattgcagaggctgtgccacctctaaagcctgcagtgggacctgctgtggctcctcctgggaaatgtatttatttctccagagtaatagaattaataggatatcatatctatctatctatctatctatctatctatctatctatctatctatctatcagtccgtctgtctgtctatgatctatctaatctatggagagacagaagagggcatttattataggaattgactcatgtttatggaagctgaaaagtcccactctatgccttctgcaagctggagaatcagggacactggtggtgcaattccgtctgggtccaaagccctgggaacctggagttctaatgttcaagggcaggagaagatgggtgtctcagctgcagaggagaaaacaaattcacccttcctccacttttacattctacgtggaccctcaacagattggatgatgcccacacagactgggaaggggagatcctccttcctcagttttccttcaaatgctaatctctcctgaaacactctcacagacatacccagaaataatgtttgactggatatctgggcatcccttaacccagtcaagtggacacaggaggtgatggcccttgccttgcttgcaggtcactcccacagaggagggcttgagggtcctgacccagctggtggccacctacccccagggctttgtgaggtggttgggccccatcactcccatcatcaacttgtgccaccctgacatcgtccgatctgtcatcaatacctcaggtactcctgcagagcttgtggtggtgggcacaggagaacattggagggcttctagatctcatccccaaagcttctgtgcagctcttgtagtactcagccccttccttcctgcttctctctcagccaccttcctctttccttcctgtagtcaccaaccccaacctcagtgtcttttctctctgctgccatcttccccacctccgtgttgttctgggaaccactggggccccgagaagccttaatccaaggccctgtcctggaggaatccccaaacttgaagagatggagcagtacagagacatccccaacttcatggggttcagaatgggccaggaggagataggctgtgacagagcataggagaacaaggtttctactggggcaggctggaaggcttcctggaggaggcgtagcagga

SEQ ID NO: 98016 - DNA, 474412 bp, Homo sapiens
  misc_feature (1)...(474412): n = A,T,C or G
agttatgtacacattgctggttctttcccaatcattatttcattctcacgctgtgcccgggaggcaaagtaccttcattttacggatgagcagacttaagcatcagcaaaaaaggaatttgtaaaaggcgacaccaccacttagcagagaagcaacagtgagaatctagaaatttccaagaagccccaggaaggccatggaaatatcttacgaaaatgaaatgtcagtaattgcaggcacaagtgtacagacgcctgtctggggtcacggagtgctgagccctgaaccatcctgggtatggccaatgactggcttcctgagcttggggctctaaaccggctgatggtttaagtagctggattttacccaagggtagtcctgcctgttcagcaaccaagagttaagccccttttgaaattctagataatgaatgtctggtcaagagatgctcttcaaggcaggtggatcacctaaggccaggagttcgagaccagcctggccaacatggtgaaaccccatctctactaaaaatactaaaattagctgggagtggtggcaggcacctgtaatcccagctactcaggaggctgaggcaggagaattgcttgaacccaggaggcagaggttgcagtgagctgagattgcaccattgcactccagtctgggtgacaaaggcaaaactccatctcaaaaaaagatgctctttttccagctgaaaagaacagctacagaaagttccagaatttgggtacttgttagaacttgcatggcccttagatgagagctagagttttgcctagatttcagatttccttctggtaatacacacatctggtaatatacacatgtgtaatatacacatattctggtaatatatacatgtgtctggaccacatccccattttgcagtgaggggacatgacctgtgttacccaagtaacaatcaagcagtgttacctggtggctttgtgaagagagggacatgggctcagtggggacagtgaaatgttgcttagtgttcatgccataggccagacttgagtttctaaatactcctctgaaaatgtgaacgttgctatccaaagcctggaagcctctggtgctaagacaggtcttggttctcctctgattccaccttgcttggacccacacatgtgcagggtgataggtgtagtgacctgtaagagaacagggagtcgaactgggggtggccagtgtacccagcaaagcagaaagacaggcaggctatcaaaacagagccacttcaatgaaatcaccttgctggtgatttccacgtaagctggtaggacctgcgctatccattttatgtcctcctcgtcctggtcgtcccccttgaagacacttgatttctgatcttagaccagacaggcgggaggtgaagctctggacttttcctgttgttgacgtaggaggacaggaggctgtttccaggggggaatcggccagggccattctgggggcattttgggctcctggttgttgggaagttggtgtgcatgttgaggtagaatagaaaggtaaaggtggtttctgttagcagcagaggggagcacgttgctggagagaatggcaccaagcagggtgttatgggtccctgactccttcaagcgctgctcaccaggactttcctctccgcaacatgcagggcagccagcaatgagcccgtgccctttgggagggaggaatgtgttcatctgagatgctggtgatcatcttggcacttggtagaaatgtggggatggggtcagagggtggggtctggttttctgagtgccttgggggctacagaaagtgctggagctgggagtaattctaattgggctcttaaggtggggcgggaaactagataaaaagaaaacttctatcgtcttccagagcctctgagggtaagactgtggaagttccttacaaaggagatgtggaaaacactatcctggatattctcgggggactgaggtccacgtgcacctacgtgggggccgccaaactcaaggagctcagcaggagggcaacattcatccgggtgacccagcagcacaacaccgtgttcagctaaccctggggacaaagcagcgtctggctcgagtggaagcgtccaaacctgcttttcccatctccccccaagtctgttccgtcagagcttctggctgctcctgaatggtggaatgctgtgtcctctcttctgtctcctgctgcctggaggcttcggggctctcccgcctgccttctcggggcccagacgcaaggcaccgattgggccaacatcagagccctgctgcccagaactcataacctcattgttcaaaccaacacttgcacctttctctttttctctttctctctccctttctttgtttttctttcttttttaaaagaagatggtttcactttaatataatgctattatcttaagacttaatggagttgctggagtttgtatttccaggagtcaagttgaatggtttgggatttgttttgctaccttcctagacaggctgatggcaagcctctcccggcgattagcagacaagtcaccttaggaggggcaaggagaggaggacagtgcgggggccaagggtggacaggccggagtcaaagtaactggcatccctcacctctagcttttggttgctgcaaaagaacaaaagcaattaactggacagatgaacatgaattgttttcccagctgatactcacaaagttgagccaatgtgttttccccgagtttcattacatgtgcttttcagggacaagtcatctgtcgctaccagtttgctgttgcctctaggaagctgtccctgtcctggcttctcatttcgttttgttttcctccatcttttttttcccccttctcagtcccaacttgtcttaatttgaaattccacaggatgttttatgggaaggttgtctcccaagaaattagcaggtggagtcacactgaaaaagagccaaagctttgatcagtggcatcctaaaaggcattggtttgagacatgagttagagccattccctcagtgtgccagtgaatcctttctcggaaggaccacatggcactactgtataagggtcagttaacgggttgggaacaatgacattgtcttggagaattggcctctgcagctgacctgcagcagtccaccaggatgcttgtttaaacagtgaacgcagaagaagtgatgaccggccgctaaactttgaagtattgagttccaggcctggaaagcgtatgcagatcaggttgttttactttgctttttaataaggctgaagagcagatacacaagtcagttttctttggaaaggcaagcaatgaccctggagtagagaagatccacagggtgctgctgtgccagggtgaatgaatggcctgattgtccacagtgaccgatggcatgagaagggtccaaccagagctgtcacactctgggataatacaggcccactgttggtcctttaagattatgtttagagatccagccagcagcattgtctccattgtaatactttcccctactaaatccattaagagttttttttttttttttttttttttttttttaatttgagacagggtctctgttgcccaggctggagtgcagtggcaggatcacagctcaccacagccttgacctcccgggctcaggtgatcctctgacctcagtctcccaagtagctgggactacagacacctgctaccacgcccagctaatttttgtattttttatagagacagggtctcaccatgttgcccagactggtctcaaactccagggctcaagccatccacctgcgtcaacctccccaaagtgctaggattacaggtgtgagccactgtgcccggcccattaagaataactcttgcacctgtagaaacacaagggctgcactttggagacgggagggccaagaggcgatttaacgtggagcaagacatggggcttggctgcaggctccccgccttgctctctgtggtcttccagctgcttgtaactgagtagttacaaaatcaaaaactcgttaggaccattttgaagcagagccttcagaaagagaatgtcttttttttttttttttttcctgagaccaagtcttgctctgtcacccaggcagagtgcagtggcacaatctcggctcactgcaacctccgcctcccaggttcaagtgattctcgtgcctcagccttcagagtagccgggattacaggtgcccgccacgtctggctaatgtttatgtttttagtagagatgggtttttgccatgttacccaggctggtctcaaactcctgggctcgggtgatccacccacctcagcctcccaaagtgctgggattacaggtgtgagccaccgcgcctggcccataaagagaacttgtaaggctccgtcaccgtttgccttagcaggttcatctctgcctctgataggagtggggctgggggagcccacaccagagtgtcccttggaccgggtgtcccacaggacctggagatgaagcatgcagctttgctgctgacccactgggcttcctgtgccagagctgggggaggaggaggacagccagtgaactcgacgccatttgccttgggccactctggccgttccatctgagggctctggcagtgcttttgatggtttcaagtcctgccccgctgcagcacctgaaggtatggttccccctaattgatttcaccagctgaggtaagtaacacagccactggaccccaaacttgtcagaacaatcagtatctcacacaaacaaaaagggaaggcagagatgcagactgctttgccgagtttgcccacagcacacaggcacatttgcccgggctactccacaggacctggggcagcccttgtagcctgagttgcacctacacagctctggtttgctgtgtgtcctttcacatatttattatataatgtgtcaggacctcaactaaataatcagaggagagtccaaaacaccttcccaagaagatagttcctccttggctaagtgaaaatgaatttaaccccaagcgttctcccacctctgtgtaaccttgaggctggaaggtcttgaggtgggttgaggtgggttgaggtgggtgcaggggattccacctggaagctatgggttcttgaggaattactttttctggcacaactgctaagccatatctttccaagactgggcccagtgcaaagctgtaatgtggtactcttgaggtaaacggggagttcctccacatgctgagagacctgctcgaggagttgggttttttttttgtttttgaggcagagttttgctctgtcgcccaggctggagtgcagcggtatgattatggctcactgcagcctcgacctcctggccccaggcgatcctcccacctcagtcccctaagtagctgggaccataggtatgtgccaccacacccggctaatttcattttttgtagagatgaggtcttactatgttgactaggctggtctcgaactcctgggctcaagcaggccttgtgcctcggcctccccaactgttgggattatgggcgtgagccactgtgcccggtctgctcgctgaatttctaatgagcttgaattacaggaagtaaaaataaattttccacttacagaccactaaccagtttagagcaaatctgtaaggagtgtatagattatgccacacgagcgcatgaagctaccacatgtttaaagacaagtatacctcttgtgaacagcagtgttcagctaggaggcataaacatgaactgaagaaaccaagacatcaggtgtggctgtgtgccttttatcttagaacctcatctcacacgtactcttccccccaaaacattagcagcgaaggcaatgcctcatgtcacacctccctacctccgacctacccagggagaactcgtgagcgggggtcaataaggaggaggaattagcactcttttcctggcctcttccttgaggacccaacagaaggcaaagacacacatctgcaattggcactgttattttattagtacgagtatactgaaacaataaacttgtactggtatacagacaatttatttaaaacaattttgttcaaattttgaatcaaacattgttttattataataatgaaataatttctacctagaaaacctgcaagcaccatcaaagaaagggaccataaaattcaataaacagactcgagtgtatcctacaaatagacacaccacgattagaaaatagaatatgaattcttccattttttaatatttgtttaaaaaagctagtgcaagtacaatattttacactggaattacagagagtatgcacgcatatggaaaaaagttctcctgtcacaataaaagctcttaactattatgtatgcacttaaaattttcttttcaataaggtgcaaaacatcattccttccctagttctcctctgtactggccatgtcagtctggtagtgccctcaacccaagttctggtgtctgttttcccttggcctgtgggaggcatatggtgggtaatgatctgatattaaaacatccrgtagtacgagtctcagagatggctctggagccaggactccactggctggaaatgaagactgtctaatctgaaggtcaccacaaatactgacaggactatcttgaaacctcctttcggctgacactaatttgggtttagagttgagcagttcaggctggggagatgaggaaaccccgccaaaaagggcagtattcacagaactgaatgcacaggtaycaagttcaaatgcactaactaaaggatttaccccactcctgggccagaaaactgaaagagtaggtggttcctgtaagaaccagagaaaacctgtgcaccgagcttcttggtaactgctctgaagacaacagcttgagctagtgtcacctaatacttggtattctggaggacagtatgttatcttggtaaggattactgtraacaacacttccaacgaaggccttcagattggccacagaaaaggagacaggctcattggccatccagacagcaaacaaactaaagggaaagaaaacgtgggtgaagcctccaatgtatctgcagtggaagacttgagtcctttcagataagaaaagttatggaaattcttagagattgttgttattgtatagatactacctattggccaaatgcacttaattttaatacagttgaaccatttgtatgcaagtcatggggacatgaaaaactgaagccggtgttccctcccgccattacacaggagaaagttagctaccagaacagttgccttcaacgagaagggaggggacgagattctgaatttaagaattgtaagtgggggtgcttaatatccccacagctgtccagtttccactgtccggcttgatttttggacaggaatactattctgagaagatgctccgtatttattctggcctctttatattaaataaaaatcaaaataaaactaaaataaaatgaggcatttacattgaaatcatgtttttactccccccatttaaatgaggtgtggggggaaagaaggtgaaataatttttttttttgtccccataatgagtcctgtttgattggtagcctggatcccttgttacaaacacttcgtgttcaagattatattctttgggtttataggaacaggaagtgctgaaaatgtcaaacatcatctctgaagaaaaagaagttgcaatggcttaagagtttagactaagaagggagctcagagaagtactttcagcataggaatgaacagtattctcaaatcgcagaataccgagttcccctccctcagacgagggctatatgtaacaaaaataacaataagcataggtatagtttaagagccttttacgtagtaattcttccaggccataaccatacaaatctgatcatttagacatgacaaatttctatatacaaaaaaacatgtaactttcaacccttctctgcttttttttttttacaaacaaagtatgaaactcattgtttcaacagagccatatctttcaaacactgaatgaatcatttcgacattcatttttcttttgtgcaattttttaaaacattacctgtactcctcaaagtgagtgcttcaaaattttgttttcttcagcttctcaaatcaggtgtacatttaaaaaaaaattcccacaaggtatagtgctacaagaaaagatcctatcatcagtaaggtaacgtatttgaagcgaggtcatctatgtaaaagaaatctcagctccggagtagaggtgtgcaagttgtttggagtttccctatgccagaaacacaacactgtccgtggaaaagagaggaaaccaacccaacacaatagcagatgcatgtgctttataaaaaagtatattctctgtatatttattacttgatgtgttcttaaattctctatttcagaaattctgggttaaaaacaaatgtggaagcaaaggcctccacgccacttaaaaaaaaaaaaagtgtaattctctcctttcacatcaccaccgaagaaaccgaattgggccatggagtctgctggccctgttttcacctggtgcaaattgaagtgcaaagggtttcagaaggcaacagaccagtctgttgagctgcttgtggttcatgaaacagtagccatgacaaccaacacagctcaagaagcccggccttcggtaccgagagctctgcttcctcacccatatctgaaatagcacggtattagtgtcttcaaragcattggagatttttctctctatgaaagaaataggtttccttagtagtcacagatgttaaagggtattgtcaatcgtttccttaaaaaacaaaacaaaacaaaatccagagctacaacaacaaaaataaattttggcaacatatttcagtaaagatcaaactgtgcaaagagtggattttatgattactaggagctactgttcatcttgaacatgcagcattatattgcaatctatgcggtatctaaggagtaatccacaagatgcaggaaatccaaacattccttgaaattgtacaaccctactccagagcagtcaaagtgctgcttctggacacgtcagtgtaccacacacacacctgccccgtccctgagaaagaggtgtgaaargttccgcagagtccctttaggggagaaggagggatgctgccacttcctggtggggggaaaaaacccaacacactcacctaacagaaaacatagaggctcacaattccaagttagaaatgggatcaacaacaacagaaatcaaatcatcccaaactaaactgggtgagttagggaaaacgaaaagttgaccaacatagaaaattatcctgaaagtccaaatgaaaattcaatttggatttccactttaaaagatctgaggtaagtggcatccatctctgtatccctccctcccccctctgccccagtgtggcccagacaaactgaaataattcttaagttaaacattctaaggaacagtcattttatatatttagaaatccctagaaagagaggttcttgtttgttggtttcttattaatagtattatttttttcttttcgccctgactaatttcttggtgattgtgttccattgtaaacgcaaaaggcctgctgttactagtttaaaaatggaaaacaggaaagaaagaacaaaagacggctgtcggtaaatattgcaaagtggacatagtacagaggcacatggctgatccttgtaagctgaacggcaccgaagaatttctacccctgtcatcgttaatgtttgctacacagaagcggtgacagaggctgctctgggagcctcggggcccgccaacgtctgcaaacaggaggctcctgccctctgtgcgttcttcctatttgaagagaaagctgccacaagggagtggtgaccgtgggtggcaggtggtcccctccacagccactggccaacacgctcagaacgcacacacacaacaggccacacttcccgtccaggctcagaggcagggctccaagtctcaaggacacagaccccgaggaggggcctgcccacttgcagaaaagaccgtggaaaatgggttgactccaggctacatggctccagagtgcgtcttagaaatgaatctgcctccttcctctccacactccacattcactattccgtgtggtgacaggggacactgcggttcctcccccgggtctccttggctggctctttctgcaacgtggcggcagacgcacggggctcctgaaggctccccgccccagcactcagcatccgcagcaggggaaaggtgggaggctctctccctcctggctccttccctccagccctgctctggccagaatggggaagatcaaccaaacaaggaaaaagccaaaagggaatgagctttaactatatagcacactggtcagactctattggcacagaaagtattgcacatgctaaaaaagcaagagaatgaaatgggacaagtgtttagaaagaaccaattattttataattcctatacctgaaatagaaccacaaaaattatgatgatgttcctattgctccaaaccatgtgtgttttcccatcttagtgttggtttagtggatccagtcaattcaatactcgaagtaagccaaaaggtggtgtgtgtttttctgagtccacatgagttgtaaatagtgatattaatgagaacaaagtctatgtggcagcccgtattcctcttaccatcaaaggctaaaaaacaaaaagaaaaacaaaacctaataattgcaagtgccctgagcagaatatatggaagattaagcaagttctctgaacagaaacgtttaaaaaatacagcactaaataagcagtatgactgcaagaatgagcccacccagctctctgcaagcatgctgagagggtaatgaaattcgaggaaagtcaaggaactattctagctattctaaacctattcaaatgtttttggtacaccccagaaaacggtttataaaaatcattagtcctggtgaaccctaaatgtaaatgaatactagacagccaaaatgtgggttgataccagattttttttttaatttgtgaaacgaagaaagtactattttcaatggggtaaaagaaaagtcaggtatttgttcagtttagttgcagccatccaagtaagaatatttaaaaatttctccctacttataaaacttttttttaaagcactttaaagatgcattcaaaacccacaaatgatatttcggatctctgggaatgaaaggtttaaaaactatgaaataccctttctgggtttgtaccaaacattaaatctcgatttgattttgaatagaaaaaaaaaagccattctgaaaataacattaataacaacaataataaagtaattgtttaaaaaaaatcttgctcacatatataaatgtctttatggaaaactctctcaatgaatctgaagaaaattctcagagtttctaagagcccgctaagacctggctttttgtgacagatgtggtaaaaagaccaaaatgaattttcaaaggaacataaccttataaaatggcctagagtttaggcaggttagaaagaaattttgctacatttatttatgctcgttcagtcccccaaacctttcccacaatgttattggataaaaaytgcaggaatatcacacaagttataaactcaatatgtgcaaatcgcaaggttctttaaaagttcatcttaaaaagaaaaacactggacaaaaatgagtattctcttctccatcccttttctctcagtttctctgccaactctgcatatgccttgaactgattctcagacatcaaagtgaaaagtgcctcccgtcaggtagtacttggtggtcatttattgtcacatactagttcataattcacattcatccctttaaaccacattgaaactttcaatatcttgctcttcagcaattctgcagagctgaaatgtagttacagtgttgaaaaaaagaaagcaacttagttttttttgtttttgttttttccccaaagagtttaaagtgagatacagtacttgttgaatgagagaccaagatgcttggtaataaagtgtgaacagtatttttaaatgcttaaagatagtaatatatgctcatcttcaaaatctaattcctcatgtcacactggaatctgaaaaaaaaaaaaagtggcacccgagttgtccatagtcatgaactataaacagtactagagttcaaagacaaaaagatttcgcaaactcaacgtgaagagcttctgttgctctcactgaagggcagtttgcatctacctcttgggagtgaagtcaatgcaataacctgattggttttcctaacactgcacagaaaccagcgtgggtgttcgctctctccctctcccccacccccaaccccccttaccccatgtggggccatgacagcaggggcttccctgtccaccacaacaccctggtgacatcgctgcactagtaaaaagcagaaatgaaatcccgcatgtggcagttgctctttaaaaaawatatatatcagtgcagtcaggccccatagggggaaatatatatctatacaattaaaagttgcttttattgtaaaatatgttggagagaaaaatgttcttttaaatggttaactttccaaatctgccatctgacgcgtctccgcgatgccctgaagctgggttcctgatgttgattttgcacgtgggaaccccaggaggacactgctctgaacccccccggcccatgccgatagcaagagagtgaggcagagggaggcagagaaaaagagaccctcactcgccgccacagcgcctgtgcacccccacatgcgtgcaaccctgcacccctgcaggrcccttcccacgggacttttctcctgacactagcgggagtcagcgcccccggctgcttctgtgccgctagagaaggcaggcactgtgaagccccgttcctttcttccccggggatgcctggagccctgaccgctcctgctgtgcccttcctcccgccsgctcactgacagacactcgtggaaaaagcatatgcaccagtctcctgcgacacacctgctgtaactctaatgacaaggttagaacagaaacctaaaattaagaagataacatgtaaatactgtgttattttagcctacagtacagtaatctggatacaaatgataagggagagccacgtttcctttcccccacgctgcctctacttgcctacattagaccggccttcaatgcaaatcttaacctcctgaggaattagagaaggcttaggaagagtcaaaggtggttcgtcttctgacttctccagtttgcggctctctggcgccgaccacctcctcttcctcgttgccgcgggcttgctgggttctattttggtgaggaagggcgctgcagrcaatcccattttctctggaaacttcagttcgccattctcagagagcatctgggcactcccctggttgattccgttttcctgctcggcatacctgtgtctgctgcccgccaggccrtcggcctttgagtgcttcagcaggacgctggcgggatccacgggctggccctttttaacagagccgttcttcaggttcttgagggtaagcgagatgcagacatccccaacygagagtttggaacacggcaaatcaaagagctggctggttctctccggacagcaggatgaccagccctgtccaaacacaaaaaaaggatactctaccaaaacttcaacgctgacctgtggaaacagggagagacagagagaggaagaaggaagggaacaaatgaaaacattttattcttgtttgattttatgcacacacacaggtatgaactcacacagacacacacaggctgaatgggggaaaatgactcagtttgcaaacctccctctcccccagccacacactataaatgaggctcttctctttgggttgtacctstacttgccataggcagaagccagtgaaaaggtcatcaatattcaaaatattccatcaagtgttagctctatagctggtctctgttagaaccagtcaatcgaaccccagtaatgacagagcacccacttagctttcagcaccaagctaggctctgcaggtggctcacaagcccagcgcrgtcttagattttatgagctcaatggacaactgctattatcatacaggacaggactaaacatggatcagagtgagactgtgagttccaagaagcaggcacagtgtgtttatcactgagtccccagcccctaaaaggatgcttggtggctgggcacagtggctcatgcctgtaatcccagcactttgggacaccaaggtgggtggatcatttgaggtcaggagttcaagaccagcctggccaacatggggaaaccccgtctccactaaaaataaaaaaaaaaaattagccatgcgtggtggcgggcacctgtaatcccagctacttgggaggctgaaacactagaatcacttgaacccaggaggcagatgttgcagcgagccgagatcgtgccactgggcgatccagcctgggccacagagtgagactccgtctcaaaaaaaaaaaaaaaaagtcaatttccaatgtcctttctagatgtagtagactaggtaatttggaccaaccctccttctgaggacaactaaaaactctgaacaaaaatataagcaaacaaataaatttaaaaactctggacaaaatgtttaaactttttttcttatagtactggacagcaaataagatagtaaaaaggycaggcgcggtggctcatgcctgtaatcccagcactttgggaggccaaggcgcgtggatcacctgaggtcaggagtttgagaccagcctggctaccatggcaaaaccccatctctactaaaaatacaaaacttagccaggtgtggtggtgggcccctataatcccagctactcaggaggctgaggcaggagaatcgtttgagtccgggggacgaaggttgcagtgagccaagatcgtgccactttactctgagaccagcctggccagcatggtgaaaccctgtccctactaaaaatacaaaaattagccaggtgtggtggcaggcgcctataatcccagctactcaggaggctgaggcaagagaatcgcttgaacccgggaggcggaggctgcagtgaaccgagatcatgccacttcactccagcctgggcgacagagtgaaactccgtcacacacacacacacacacacacacacacacacacacacacacacttcctgggttggatcaggaaaagatgatggcccagagaggtgaagctggtgttgggggcctgttttctcctgaaggcacttgaacattccaaagtggagcagttgggaaaccaagtgggcttttgatagtgttaagagcatagggaacaggtaatggagttcaggatacaccaagggagggtgttctctggtgagccccattcttttgagttgtgaccccaaagcactgtcccttagaggagacagtgaaccacaagccaacaggcctttcaaggtctgaagctcagattgactcatctgagtccctaaaactggattaaggtcttgaattactttcacaattttgcaaataaaagcattcaatttaaaaaaggggggtggtggtcatgaggagaccagatagcttgtataagcactagcaaaatatcagatcttaaaaaaggatgcaccagggcttctcatatagagtcatacatatagactttacaaagactatgcttacaataattaagaagattaaagacagcttgagaattttgataggaaactagaatctgtttttaaaagatccatgaagccaggcatggtggctcatgcctgtaatctcagtactttgggaggctgagacagggaggatcacttgaggccaggagtttcagaccagtctgggcaacaaaatgagaccccgtttctacagaaatttaaaaaaaaatagcctagtgtggtgatgcgtgcctgtagtcccaactactcaggaggctgaggcaggaggatcttgagcccaggagttagaggttgcagtgagctatgatcacaagactgcactccagcctggacaacagagtgagactctgtctctaaaaaaaaaaaaaataaataataataataataataattaattaattaaaaarggtctatgagaattgtagaattaaaatatacaccactgaaatcaagaatgcaatgagctttccagttgaatagacatggattaagaaagarttcaggaactggattctctaattagagctttagaagagactccacagagtgaacatagagacaraaagatggtcaatatggaggagagggtaagagacacataggatacattgagaggggctaacagacacataatttgaatcctaggaggaggaagagagggagataatagggcagaagttaatacttgaggaggtaatggctaagaattttcccaaactgaagaaggataataagacagtttcaagaaggcctagccccaaacaggaaaaataaacaaaaagaaatcctcactgaggcagatgagaattaaactgctataaatcaaagacwtcttgtaaactaaacaggaaaaaawatcgttaaaagcctctagaacaggctgggtgtggtggctcctgcctgtaatcccagcactttgggaggccgaggtgggtggattacctgaggtcaggagtttgagaccagtctggccaacatggtgaaaccccatctctactaaaaatgcaaaaattagctgggcatggtggcaggaacctgtaatcccagctactcggggggctgaggcaggagaatcacttgaacccgggaggcggaggttgcagtgagccaagatcgttgcagtgagccaagatcgttgcagtgagccaagatcattccatcacactctagactgggcgacaatagagaaactccattaaaaaaaaaaagcctctagaacaaaatacatattatctccaaataagcaacaatggaactcacagtttacatctcaacaaaaataatggaagccagtagacaatggagacaatggaatatctttacagtgctaaagaaaaagaattgtcaatggcgaattctatatggagcaaaaagatccttccagaatgaaggcaaaatagagacatgttcagacaaacagtaattaaaagaattcaccatcaacagatctgcattatagaaaatactaaaaggtattctttaggtagagaaaaaacaaatctagattgaagtttgtacagggaggaatgaagaggaatgaaaatggtagatacatggtgaatctgaatgaatattggctatatgtaacaatatttaaaatattgttggattctttttttctttttgtgagagggagtcttgctctgtcgcccaggctggagtgcagtggcgcgatctcggctcactgcaatctccgcctcccgggttcaagcgagtctcctgcctcagactcccaagtagctgggactacaggtatgcaccaccaccaccacgcccagctrctttttgtatttttagtagagtgggggcttcaccatgttggccaggatggtctcgatatcctgacctcatgatccacccgcctcagtctcccaaagtgctgggattacaggcgtgagccaccgtgtcaggcctccattggatyttatacacattcagacacacaaaaacacacatgcataattgaagtaccaaaaaaactttaaaagtagtagatttccacagattgttgcttttctacttcatcttctttgtttcctttgttaactctgattgatctagttctgatacatttctagaatgacagactttactggatccatacaaggcatatttttagaagagacaacttgagtacattcatatggcagcttgtaagcatgaacccctwctcctgtgtgtattactgggggaaagtttcattgttctgggctatttttataatgtgaagcaagctaaaagtttttgagtgcctactctctgtcaagctctcaggtacaaactttacaaaaagtattttgtttaatgttcataatagtattagtatggaatagtattgctcttccaattttgtaaattttacgaatagtcacagagagattaagtcacttgcctaatgtcatagctattagctaatgggtttaggattttatcccagtcattggcccccaaacccattttcttttttctgtgcctcctgacctctacccttgtgagcaaagacattacaatgccaccaaaagagatgaactaagcattcctgctaccccccaacagtggtgaatattgactgaaataagtaggatccaaaggcatgagctcatgggcttgttccatggtacagataattgtgatgcagtgtttgccttatagccactcatacaattctagttaccctgtacaagtgtgtgacactatttggtttcaaaactacatttacatcacacacagaaacatatatgtgcatatatacatagacaaatatacttacaagtgactgtatcagatggggatacccactgtattctaagtaggaggaccaatctggaactggctccatagatcctcttgcaaacctcttagagtcattaacaacataaactgaacagaaggaaaccaatcccacatcaagtggagattgttttgctgcaaatccaagtcataaaaataaaactctcaggtgttaacatctgtctcgtaagactctctaccagagttgcggtttgcttattcttgcccaacaccaggcagaggtaatgtgacattcagaagaccagaagccttagttccaaacatgtcagcctcttttctggttctgcgtgttcccggataactccctgtctccttgctggcagatggccggacacctacccatggagaggcccttggtgtgtgagccacattatacacacttcacagggcaggcaatatttaattttctgaaaataacatctactgtgttctcataggtaaacttatctgaggatttccacgttaccaagtatctgtagactcattaagaaatgtctacaagccctttataacaggtactataattgattagtgcaaaagtcaggatacagatacacgtgtttccctctaaagacttcataatgttattggacattttgaaagcctttcattatttccgcatctcaaaactccaaagacaccactcttgtaatcccagcactttgggaggctgaggtacaattgtgaaatagcaaaagaacgaacataactaactccatttttgtttaaagggttttaccctttcctgcacgtaggctaggataattttatggcaccgagataatatacacaaacaacaatcatgtacttttagaaactaactctgggattaaaggggaagtatataaacaactaactatatattgttaaagactgataggagtggctgggcacggtggctcacgcctgtaatcccagcactttgggaggccgaggcgggcggatcacctgaggtcaggagttagagaccagtctggccaatatggtgaaaccctctattaaaaatactaaagactgaaggagcattatgacctgaccaaggacaaagaagttctcaaccttcttgaaccctcactggtgcccaaatgtctatggtcctcagtctcctcgatactaaccccttcgtctccccccataccccsctcccataaaaaccctccaaccagcctaaaaaattggagattttacttaatttttacaaaattattatttcttgagatggattctctgttgcccaggctggagtgcagtggtacaatctcggctcactgcaacctctgcttcctaggttcaagctattctcctgtctcagcctcctgagtagctgggactacaggcatgtgccaccacacctggctaatttttgtattttttagtagagatggtgtttggccattgtgggtcaggctggtctcaaactcctgaccttaggtgatccgcctgccttggcatcccaaagtgctgggattacagatgtgagctaccatgcctggcctggagatggtactttagaaggctagctcatcatcttctcaatttctctggctttcccaataaacctgcttttcctctcaccaacctcatctctcgtatttggcttttgagtggtgagcagccaaacctaagttcagttacagaggtgcgagggtcactcgagctactgcaccactccagcctgtgtgccagagcaagactctgtctctaaaaaccaaaccaaaccaaaccaaactccaaatctccaaagacaggccttagaattaaatgctgtggtgtgaaccatagctagaacagcctgccgaaaaattcacgagagaaaagtgatggagagagagaatatttgagatgcgtactaaaacaagatgacgttaatggaattttttttttttttttgagacagagtctcgctctgtcacccaggttggagtgcagtggcaccatctcagctcactgcaatctctgcctcctggattcgagcgattctcctgcctcagcctcccaagtagcagggattacaggygcccaccaccacccctggctaattttttatatttttagtagacacggggtttcattcaccatgttggccaagctagtcttgaactcctgatctcaggcratctgcccgccacagcctcccaaaatgctaggattacagaagtgagtcaccgcgcccacctggcctgttaatgaaatttatgttaacctagataggcttgggagattcttctttaatcacttcaaaggcttctctttgtttctttttgcctaaattctgcctttgcttcctaccaaaggagctgtgtcaccctgcgaaaagatgccacgaccagatatcagctgggtccatgaaagctgaggtgggagcggaagattattcagataatctgatcattgtaggcacagatcggatagcttgccagcccaatgctagttttctcctcactaattagtgtgaactacctagacaatgtactttttcccccttggggtctgaatgtatgagaagtaaaataaggtttttttcccttctttggtgaaagttaaaatcttgttgcacacatctcaaataggtacactcaagcattcatagcaaatctatctttattttataattaggtttgtcataaggatataaacattcttaaaggttaactgatcattaaccgttaatgaagaaatctcactgaggggtttctcagtgagaatatatatcatcaaatctgttgcttgaaattcccttggagaggagccttctccatctcaaaacatgctgtcaatgccagcggggactggtttggatgtgaaacagagacggtgtgattttgtaggatgatgtcatcttcaactggaacaataagtctgtgaattccttgaatttaaaacccatatgggtattctctatgatgctgatagcttcaaaatattgttattattattatttttttttttgagatggagtcttgctctgttgcccaggctggaatgtagtggcactatctcggctcactgcaaactccacctcctgggttcaagcgattctcctgcctcagcctcccgagtagctgggaggcataagccaccacacctggctaatttttgtatgtttagtagagacggggttttaccatgttggccaggctggtcttgaactcctgacctcaagtgatctgcctgccttggcctcctaaagtgctgggattacaggtgtgagccaccgtgcccggcctcaaaatattattgagggttcctaatgatacatttcaggctttccagttttaataaaagttcaacaagtatacaccgagcacctgctaagtgttaggaaccttagaagagtatctattggttaagacctagtttcttgcctcccaccaggagacagaacatacacgcaaaacgggtacatttggacaccagtgaccacactatccgatgacgtccactcagatgtcgaatgggcaactcaaacttaaagtgacctaaaacacaccagacctcccgatgtgcccctgcccggtggccatcccatgttcttccccatctccataaatggtatcccattcttccggctgttcaatcaagcaccttggaatcatactttcttccgctctttctcttacatcacaaacatcccaattataagcaaactgtatgggttccttttccaaatacacctagaatgatactatttttttactacctccaccacctttgtcctggccaagctgcatctcactcgctcrgtcaccacatgcaagcctgatgtggtctgcatgtgccccttactccctacactgtagcaacagtggtctccttgctggttctttaacccctcttgcgccttccgtctgggcacctgctactctctccattcatttggaatcttttttgcctcacgtactgttgccacccactgtccttttcagagagaactcccctgacagttctatttaaaataacaaccctctagtttccatagcttcctttttttattttgagatagggtcttgttctgttgcccaggctggagtacagtagcatgatcatggctcactgcagccttgacctcgtgggctcaagatatcttcctgcctcagccgcctgagtagttgggaccacatgcatgcaccaccatgtccagctaatgttttgttggtgaagataatgatgatcattatgtagagatggagccttgctatgttggcctggctggtttcaaaactcctggcctcaagtgccctcttgcctcagcctcccaaagtgctgagattacaagcatgagccacctagcctggccccttctcctctttataccagggatccccaacccccaggcaacagaccagtagcagtccatggcctgttaggtactgggctgcacagctggaggtgagcaaccattccagactgagctccgcctcctgtcagatcagtcgcaagcattagattctcataggagcgtgaaccctattgtaaactgcgcatgcaaggaatccaggttgtgcactccttatgagaatctaactaatgcctgatgatctgaggtggaacagtttcatcccaaaaccatccccctccctcttcccatcctgccaaaaaatcttcttccatgaaaccagtccctggtgccaaaagggactggttatcttcttatgcattcttttttatttacttgtatatttgtctgttttgcctctttccccaaactcagtgttctatctccagagtctaaaagacttcctagcaagtaataggtgctcagttaaaatctgaaagaagaggccgggcatggtggctcacacctgtaatcccaccactttgggaggcagaggcgggctgatcatgaggtcaggagttcaagaccagcctgaccaacatggtgaaaccctgtctctactaaaaatacaaaaaaattagccaggcgtgggagcaggtgcctgtaatctcagctactctgaaggctgaarcaggagaattgcttgaacctgggaggcggaggttgcagtgagccaagatcacgccattgcaccccagcccaggtgacagtgcaagactccgtyttaaaaaaaacaaaaacaaaacaaaaaaaaaactgaaagaatagttctgtttgccttctgtatggaaaaacattgcaatggtacaastggacaacagggggcaatagagagactgcctgtctttttttttttttttttttttttttttaaccagccagaactaaagtgggctgtgacctcccccagggagaggagcagtgctttctccagggtgtggctttaccgcctaacaggcagctttctcagcggagccatagccacctcaccttgtcagatgctgaggtcgtcatgattttattgaatcacacttcagttattttctctccactctcgttcttgcagctgtgttagtaatcattaagtcattttatgatcttgctggggttccacacattttccagaatggtttctgattaaatcccaatgaaaataaactcatgggagcagtaccacagataaccaaagcacgttacataacgccagacagctcaatatagcccattttttcatccagtaaatatatcctgtttcaaacaccctaagcagtaagtagaatagcctttataacttttctttctttctttctttctttttttttgagacagagtctcactctgtcgccaaggctagagtgtagtggtgccatcttgattcacggtaacctctgcctcccaggttcaagcaattctcctgcctcagcctcccaagtagctgggattataggcgcctgccaccacaccaggctaatttttttgtatttagtagagacgggttttcaccatgttagtcaggctggtcttgaactcttgacctcagatgatccacccacctcggcctcccaaagtgctgggattacaggtgtgagccaccgcgcccagggatggcctttatacttttgtaagcttgagggccctctgtctttcatctctggatgccctgtcgccagcacctcttgcttttgggggtggaccgcctcccaccctcctccactctttccctccctcctcccactgctgccagcaagcccatgtgctcatcagtgtggttataagagatctgcctaccccttcctccatccatccccctaaatcgactcctctagaactgtcacctccaactcccattttggatggacgaacctagacagggagacaacaccgactcacttctgggctcataattattttttaaatgtcaccttcctaatctgactaatgactggcttttaagaaaaattttagctcctctgtatgaaaattcaataaaattcctttcaccacttagtcaataactactatatctaaacactatgcacatacacgcatatttatgctgtttgattgtatatttcaatcttagattggtgctatgtctatatacacacatatgtacatatcaccaaaaacaagatagaaagaaaacaaaacgtctgttgtttaaatatgtctcccatttccttcacaagagtccctgttttcacaaattgcgaagggcatctgttttacaaaacattttttcatgacactatcccagacatacaaatttcgcctgttgctgggagcaatgaattctctcataagctaggtttcagtaagtatgtcttgttttttggygaaattattaaattgggcattcttaactttgtctgcaagtgaaawtctcagtcttgttttacctgtagagaaaggccggtctgctttcctggaaggctaagtctgcatggttacgttctcagcatgaaaaaaatcagaaaaccccgtctcaaagatgaagggggtaagcgagagacccatttactgcaatgtttaaaaatcattaataaaaacagtcaaaackctttggctgagtgtaagaatctctgtgagtgttctatttaaaacactgaatcatgttcacgcaaagcctgactcagtccttggtggaagtgtttcagggttgttcagtaaacccacaccctagcaccgggacgcctcctaacacaaatcccacattaaaagctgggtttttcttacacatggtagcgtggctcacagagctcccttgtgggaaggccctgtggggaggctcagggatggccaggaaggacactgcccagtgagtgaccacagcagctgtgacacggaagcccttaggcacacaggttctagctcacttgccttccttttctggggccttaaaatgtgtgccttaggcagggaagggtggctcatccctgtaatcccagcactttgggggcctgaggcgggaggatcacatgagctcaggagttcaagagcagcctgggcaacatggcaagaccccgtctctacaaaaaaatagaaaaattagctgggcgtggtggtgtgtacttgtggtccctgttcctagggaggctgaagtgggaggattgcttgagcctaggaggtcaaagctgcagtgagctattatggtgtcactgcactccagcctgggcaacagagcaagaccctatctcaaaaaaaaaaaatgtgccttaaagaacaacataatattcagtgctaaaaagaaatgagctatcagagcaacaagaagacatggaagaacctgaaatgcatatcgctaagtgagagacgccaatgtgaaaaggcgacataccggatgattccaactgcatggcattctggaamaggcaaaactatggagagagtaaaatgatcagtgggtgccaggagtttcaggtggggtgtgggggacaaatagttgatgcataagggatttttagggtggtacagctgttctgtataataatgtaatgctggatacatgacatcataaattcatcaaaaacagcatgtacaacacagagtgaactgtagtataaactatggactttagttaaaaataaggtatcggtactggctcatcagttgtaaccaatctatcacaccaatgcaagattttaataacagggaaaactgttaggtgtgtgagacctctctctacttgctgtacacctaaaactgctttaaacaatagtctttaatttttttctaaatgctataaacaacaacagtctgagagaatcaaaacatataagatgacccagttgggggcacatatagcacatacagtttaaaggagagcatttttctcctttttttttttttttagagaggtacaaagacccacaaacaaaaatgtggtttgacatagtttctctgttggagcctttccagcaccagaacagacaggaagtgtgtattaccaacaactgcggcacaaatccagggctgggctctgcacacagggcagtcaccaactatctattttttgatacattaggattcatcgccaccaagctcggcatgttcaatgttggcaagtggrtctgccttggctgcaaagggactgactctacaggctcatgtgccgcctgcatgagggcctcggctatttttaggtaccagctaatccattcaatgcataatgttaccaccgatgactcacagctcacagaagtcaaccaaaaaatagtagaatgaaaggaaagccatcggtagacagccagtaagtacatcatgataacaactgctgtacgagcacacacacaggcacactcacacccacgccaggacagtcgggaggaggaaatggcactgaatattaagcagccaccgagtcagggaagcagtcacctcgggaggcgctgggaagcgacagacggccctaataacacagagcctggcatttaggaaagaagcaaaggaacgtgtcaacccagagcactttaccaatacattttacaactccactgagcaaatgctgtgtactcttcagagaagctgaacctaggaagggtgagacagaaggatgggataatatagaacgccgccagatggaagccaaaggctccccagctggggccatcctgggcagggctgtcccagcgggcacgtcactaacagcctcttgcagaagaggagcctgggagcccttgtttctgcattggttgtcttactgatctggagggctggagcaccaatgcacccctcamatccagttcatactcagaaatacagattgatatgctcacgcaggctggcatgacatcatttagccttagaaacaggaacggcgggaagggtgctcgcctcggccactcgcgggattccaccccgaggattacaggcagggtaaaaatggctwattgtgctcattggaaaagttcagccttctttctagactttcatcagctgcctctccttccataaactctttttagaacacgaggcctttgatttatttttcagctgtgaatcactttctcagggcccgagccatctaagttgaagcagggaagggaaaactaacattgcacaaggtcccagtgctactgacgggtgagggatatgttcagactcagatctcttcagtgccagttcctgcattttccaagcagctaacctacttcctacccaaggaggaggtgcgaagccccatccttcttttgagttgcattggctcccacgttgatgctatcgcctcgggggtcgcatctggatgcgccacagacttatggcctcaaacttggaggatattaagtggattatatttggcagtgaggcccaagggaagtgattctgtcatcctttgggactctcaaccagaatcaaggcatggcaaagcagcaactctcttccagggtggggaacgtgctatcaccctccactgaagaggaaggaggcttcctttggtgcacgcagtaacaatggacaacacctggcattcccctttcctcccacagcacctaggtgggggcctgggggatgcatagacgctttgctcgagtggagaaaagmtgtactgggcagggcaatgccacagggatagtgayaaacacggaaaagcatttttctcctacattgcctcgtctggagcgtcagctgggacaatgctgggggcatctttccacagtcttaatgaggaattcagccccttaaaaatcatccccaaactaaacacccctcagttttatatgccatggctttagttcccatgaggtctgtgtgccgcttagcatgaggtcagtacatgttcatcttaatgctcttcttggtttttkgttaaccgacgctaataaatttttacaagggctgtgctgttctggaaagtataaaagtgaagcattaaaaaacggaaccctctcaagagattatctcctatgaagaatcatacgtggccgggcgccgtggctcacgcctataatcccagcattttgggagaccgaggtgggtggatcgcttgagcccaggagttccagaccagcacgggcaagatagcaaaaccctgtctctacaaaaaaacacagaaaattagctgggtgtagtggtacacacccatagtcccagctactggggaggctgaggtgggaggatcaattgagtccaggaggttgaggctgcagtgagccaatgatcccatcactgcacttcagcctgggtgacagggcaagaccctgtctcaaaacaagcaaacaaacgaacacaaaaacccacagaaaaacaaaactcatttgcctggtttagagaggagagtgctgcagctcagagaggtgaagtaacttgtcctgccagagacccaaatccgcacccctgggtctgtcaccaccatactatatcacactgctttccctgggggtgtgatgttgggggggtcttatgagttcaggcatcctcaagagtctgttcatgcaggatttctgcctagagtcacaatgccatctgttttggagaaaaccatctcttcttccacaacttccccaatcaaatttgtgattttgcttattaagctcaacaatttgcacatttctgaatttctctgtgggtgcagtgtcagcagtgcctaaccagttgagaagaccaggaagattcttcaggctaggggagaaaacccctcaggaaggcactgcagaggggagaaggatgtagcctttggaacctcaattaagtccagatatgagttctctctctccctcccatctccccctctcatgctctctgtctgagtctccactgactctgaacctgtcacttgtggcaaacacagctggtggagtattttagctgtgatgatgtcagccgatttctgataggctcctcggtaaagtgacaaatcattggttgcgtcaggccttgcacttttgtttctacagcgtgaagccctagctgccttttcagcaggtctcagcacacttgcctttctttgaggaagcccttcccggcatgcagcatagccacgcgggggccaacctcacagacctgccaacaggccctgacaacacttctacctgctcgtctgcaccctggctgtcagtagagagatttagtgatctcactatgggaaaaaacatgagaacagggctctgacttcacagggaagccaatttctctttcatttaakcattaattttgcaaagtttggagtagggaaaaacacacctagatcttcctccccaagaacagaagagggctgtaaggggctgggcgcagtggctcacgcctacaatcccagctttaggaggctgaggcgggtgaatcacctgaggtcaggagttcgagaccagcctggccaacatggtgaaaccctgtctctactaaaaatacaaaaattagcagggggtgatggcgtgtgcctgtagtctcggctacttgggaggctgaggcagaagaatcacttgaaccaagaggcagatgttgcagtgagccaagatcaccccactgcactctgcactccagcctgggtgacagagcaagactctgtctccaaaaaaaaaaaaaaaaaaaaaaaaaaaaaatagaagagtctggtttctgcagaggctgccaggcctgggaagtgtggcccacagctgaagtggctgccttcattctcaagctgaagttgatgctggccggcaaggaaccagtcgcatttctaaacaaaacctcttttcacacctgcctctgttcacaaaaatgtgttaaggattctaagtaccatgaaaagcaatgactcttcactcatgtttattttccatgtgtcacctggggtctgtgaagagtcaactttgctcaaggtagttcattttctttctcctagtacccacccctaattcatgcaggaagtgaacagccactacagaggggtagtgagctgtattattatgccatttattttaaaaatcctgattttcttttttttttaaataagatctttggggaaatctttcttgggcccttccaaagactgtaaacctacagtgacatctcataatacaaagaaaagtattcagggctaaaagctctcggcaatgcagggccccggctttgtgcaagcccccatatccagtcrttcacgagtggttctggaaaactgatttggtcctttcctcacttgggcatttaagaaatgctcaaaaaagccagacatagggactcgtgtctgtaatctcagggctttgggaggccgaggtggaaggactgcttggagcccaggagtttgagaccagcctaggcaacacagcaagaccccatctctactaaaatgttttttatttttaaattagctgggcatggtggtatgcacctgtggtcctagctactagggaggttggggtgggaggatcgctggagcctaggaggtcaaggccacagtgagctatgattgcaccactgcattccagcctaggagacaagaaacactgtctcaaaaatgaaaaaaaaaaatgcccaaaacaattcaaaccattaattagtttatcttttttttcttgttttattttatctgaatgtcccaaatagcagctatttcatgactattttcaactcaagctggaaggaggctctgtcccatttgaatgttttcaaatcctagatggaaacacttgtagaaagtacgctcgatagccaggaaagctctcagctgcaggctgaacctgctggactcccagcaacttgggcagtgaaagaaatgggctgtggaataaatgcatgtaatcgatctaagaacctggaaaagggtagattgaaggagcctgtggaaattaagagcgttaaccatacttccagtgactcatcttggctacagctgactttaccccaagcccagcaggtcacctgggacagccctgacttctcagattgtattaaccacgcttttattttctgatgctttgatattttagtgtcttgtggatcccagaggtatagtctctcctaggattagctaattcctagaggcctgacttttatatgcaaaccaaccagtccagagctaattcctaggagcctgactttcatatgcaaactaaccagtccagagcccactccccagcagcctcctatattggtccatcacacttagggctgccttccatctgtttttttttttttgtctgagacagagtcttgctgtgtgtccaaggctggagtgcagtggcctgatctcggctcactgcaatccccacctcccgggttcatgcaattctcctacctcagcctctggagtagctgggattacaggcacacaccaccatgcccggctaatttttgtatttttagtagagacagggtttcaccatgttggccaggcyggtctcgaactcctgacctctggtgatccacccgcctcagcctcccaaagtgctgggattacaggtgtgagccactgtgcccagcccttccacctgtattgatcaccccagcaccagcagccagacaactaaggacagcccctacaccccagagcacactggaattatccactctaaccaatcctaaacccgyttaccctgcctcccatgaaaccacaataaaggctgttgtttgccacatttcccctcactccctccacctcctgacccacctggggcttccccaggtgccccccactttacggtgttctacacctcttggtgtagagtgccctttcctcttgggatcagagagtataaaaattatctcgtcaaagagagttgtctgctgatctatctgttggccttatcatacctaaataataagacattatatatatgttggagaccgggccttgctatgttgcccaggcttgagtgcagtgatagtcacaggttcagccatagctcactacagcctcgaactcctgggctcaagtgatcctcctgcctcagtctctggagtagctgggaccgaaggcatataccactgtacccagctaataagacatattttaaaacatggatgttgcaatgggatatgattgctttagcatctaatcccctcactccaacggcatcctctgtcttttcctggtaagaaaaagtgccgaatgaccactagaaggacctgaagtccagcagcgtttcctaatcagggttcctcatcttaatcacagaattcaaaaaataactagagtggtgagtttctggattgtctcaaggactccataactagccccactctccatgcatggaggttaattcattacacacagcagagatcacggggaaatggggcttattttttctagagaacgcagttgggaaaggccgagtctaaggtctaggtgtacccgagaacccttaatcctgcctcatagaagcaattcgtcttgccaggagatgatgatggcatcacggtrtggtgtcccatccctgtgccaccmtggctaacgttacctgggctcggtgctccccgacggcgaactgtatcacggccacgcccgggctatggctgtcttcaatcctctctacggtgctggagtcratcttcaggtcgttgcttatctctgcactctggatgaaatcttctgtttttaagtcttccaccttctttagctccccgttggccaactggatgatggagcctttcatgaagtagggaggcagcgtagggggagccgccgccggggaggccacggactgcaccacaggcaggtggatctgggcctgcaccatggctgggtaggcggcctgggtgaccagggcctcagggttgaagttctcgctcttgggaagggcggtggtgacgaacgtgtgaggcactgcagcaaactggggggatgacgtgactatggccggggctgcccccgacgcttccatgtcagtgctgccgaccgggatgagcaggggctgtgtgccggggatcaccaggtgctggggcaggctgccggcgtaggtgattgcttgctgctggcygctcaggtagccgatgacagggggttgagtccctgcgtagaaggccgtggctggcagtcccaccgggagtggctctgaagcactgtgtgtggtctgaatgaccgtgtggggtgagagcgcgtaggaccggtggccaggcttccctaaatgcaggccacttttgtcgttgagggtagaaggggaggcytcacgatgagtggcctgttgcacctccaggtcagctgcgggcgtgttgctgttgggcaggaccatcacagaggcccggacccccgaaggatcacgactgctgtagtctgaggggctcgggtggaccaccacgtgcctggactcgtacgggtgaggaaccgacttgccgcctgccttgcccaggcccaggtcggctgaggacggggccccgtaccgccggctcttctccatctcaccgttcaggacctccttggcctggatggcctgctgcagccggctgctctcrgctttcttggtggcctcccgagggacaaagtggctgccggagtcggcgtattgcatgacgacctgggaggggggccccagggtgagcgtgtgtgggatcatcgtctggtgggggtggaggtggacggggatggccggaggagaggcggtgcggccggtgttctgcggagaactggaaatrtggacgtactggttctgctgggctggtgggggggaccccggggtgatgagccccggagccctgctgagbctgctgctgctgctgctgctgctgctgctgctgctgctgctgctgatgctgmtgctgctgctgctgctgctgctgctgctgctgctgctgctcagccttgtgtcccggcgtctggctcagactgcccatgttggccagcagagtggaataggcctccagctgggagcgctgggatggagtggtggcccctgcggccgaggccacygcactggtgacggggttggcggttggggggatcagctgtgatgggatgaagctggcataggttccactgtattgggaggacccaatgaactggaaggtgtgcggcaggtgagcgtactgcacgggggacaccggggtccctggctgcggggtggcgtacgcggcaggcagcgtggtggccacggggacagacctgggagcgctgggcggggagtartccagccctgtggacaatgctttgtgtaaacctattccctgttgtaaaccaagctccaccgaggtccctgccggcccatgcctcccgcccccgtggccccggccaccagggttgcccgggagccatgctgtgccctccacccggtggttgtcgctgggcagggtaggggccttctcctcggaggaccggctggtggcggggatctcgcgcttcttgggaggcaggcattcgttgctccgctcttggttggatttcatttttcgccgtcccccctccacggtgactgtttcactgtctggatggctctgattttagtctgataaacggaaagtcacatttgatttctgtaggggatccaggctcttcatgaggaatcatctccccgtgggtacaatccgccaacagcagctctggatgctgggaaagggaagagggcagtgacaaagggaaaaggaaagggaggagaaagggaaggagggaaaggacatcagaacatgagcaccggggaaagaacatctttggcaagattaagactaggccctggactcggtgtgaactcccataacccaatcataccccaagcactgaagcagagaaaacactagccaacactttgggaggccgaggcaggcagatcacgaggtcaggagattragaccatcctggctaacatggtgaaaccccgtctctaccaaaaataaaaaataaaaaacaaatttagcctggtgtaacattagctggcacacggctgtagtcccagctacttgagaggctgaggcaggagaattgcttgaacccaggaggcagaggttgcagtgagccgagattgcaccattgtactccagcctgggcaacagagcgacactctgtctccaaaaacgaaacaaaacaacaacaacaaaaacaaaaacactagccgtggcagctgcacattataaaggaagattatgaagacactgggcaagtgaacactgtaacacatatattttttaatggagttaacaactcccctaagatgttctcaataccctctctcctgtttttttttctccttttcttcttcaagggcagatgatgcagttcttaaatttccttttcagaaatgttggttccatttctcacctctcctttgcctggctggaacataaaatgaagcccttggagagcatgacaccagctggaccctgccctcagagccaggcactgagaaaaagcaggttagcagtgaaagtccagaacagtccttgcactcgatttctgaatcctcatctgccagagccactactctccaagattccccttagctctgggtccacactggacctacgatttcctctccctaatacacacacacacaaacacacacacacacgccaactcagcagaggccgccagaaataatcctgttctctgcaagtttcaaaagaattcccagtacagccactcatatgatgacrgagtgagactgttaaaaaccgaatttgattatggttaaaaaacccaaataccatacaaaaatagggctagtgcactgaatgttttctcagtgggttacatgcttggtttgtccatctctctcttccttttcaagttgtcattgaagttccccttcacaccgtccyctttctcattggaaagtaacaactcgccattaacactagagacgacagctctttcagacaaatcagatcagtgtgttcaaacctggacatacaaatggtgaccctggagccagttcttatggtcaagtatctcagtctcttactaaccactgaagtctgagttactgctgctgtgtgggcaaaccaatgcccaacagacaagaggccaaatatcagtggaactgacatgacccaggctagcaagcagcggatgtgattgcttccacaggtagcagctgtaggtatgcacagtgcaacatgctgtgattctgagagctgtgggattgggctttgggaattccacacccttgggttttggtatctcacatccagaccctcttttcaatgatctgattttctttctttctttctttctttctttggagagatggggtcttgctatgttaaccaggctggtcttgaaatcctggcctcaagaaatcctccttccttggcctcccaaagtgctaggattccaggcatgagccactgtgtgtagccaatgatccgattttaaaacaaacacaataaagtagcggccttcagcattcaatccttgtccatgttggagcaacactgaaatccctactgaaacataaccccctttctctactctgccccctactttgtaactattttttagagggggcaatgatttttttccttccttccttcctttttttttttttttttttgaaaaggtcttgcttcgttgctcagactgaagtgcagtggcgtgatctcggcttgctgcaacctgtgcctcctgggctcaagtgatcctcccacctcagcctcccaggtagctgggactacaggtgcacgccaccacacccggctaatttttgtactttttgtagaggtggggttttgccatgttggccaggctggtcttgaacaggcctcagtgatccacccacttggcctcccggtgctgggattacaggcatgagccactgcagccagcttggaaggggcaatgatttaatggcccttattggttttgctccaacatcatcaatgaacatcataatgaaatgacaaatgatacaacagaaagttctcaatccttaatgattttgatcagatatctaggaaggtgcaggtttagaaatttggtgtctcgatatcaaaggacatttcagtaagaatagaatttctcatatgacaagagaggcgcttaaagactgggacggaaatgaaaaataaggttaaaaaaaccctaaaacacttatgctgaagaaatgaagtgttgaaggagtaatgtcacttatttactctcgcaacccaggtgttttttttttgagatggagtctcactctgtcgcccaggctggagggcaatgtgccaatctcggctcactgcaacctccgcctcccgggttcaagcgattctcctgcctcagcctcctgagtagctgggattataggcggctgccgccatgcctggctaatttttgtatttttagtagaggcggagtttcaccatgttggccaggctggtctcgaactcctgacctcaaatgatccaccagcctctacctcccaaagtgctgggattacaggcgtgagccactgcgccctgcccacctagggtttttgtaagtgacaaataactgtgttctgtacagccttcccttgtaaaaagaagttctaataatgaacttttatctttaaatttcaagactcactcttaagaaagggaatgccaaacgctcccacatttccataccaacgagcaaggaaaactcatgcgtgagacctactcagagagaaccagtccatgcgccccctgctggccctcctgcagcactgatccaataaaaccccacagggtttcatgagggatatttatgcaagagtgatgtgtcagaatgcaaaatgagaacatttgcatatagtaggcccagccagtaagggaataggttaattagcccaaggcagcactagggaagaaaaagcagcggcataaaagtcctttcaaagccaagtaaaatgtcaaacacattcaggaagggtctattagcaatgcaaatgtaacattgcctgtacaattgaatgcacaatacacaaaactagaaaactcctctgaaggtacttctttaggaagccagctttcgtaaatttgaaaaagaatgctgacttggttctcagtagtgctcaggtttaattatactgtttatttgagagacatcggcttagtcagccctgaagactcactggactggtcttctgcgaaatgattgctaagacatattggccttaacacacaaatccaaatttattcttctgaaaacttatccattgataaacagcatcttttccagagattgccaatgagaaatcaaggacacaatgattaagacagcagttgcagcgagctggggccaaaccgataaaagtttccacccatcctcctcctacatttagggctatttaccagtgcagcacggagcagacagggctctctaacgctgaggtatgtgtcccttctctgggccccgtaagctttcagtactgataaggggaaacccacgggtagagattgggtcttgctgtattttcaatgaaccaccagagggcgccccaggatggcaccacattcctggtctatcgggtgatcatgggactaaacaacaaagaagtaacttatgaaggtggaaaagtagatttggaaaataaggaagagagaaaaagaaacgaaagaagaaaaaagaaaaaaggagagtgggatttctgctcttagagtctctagttgcagacaactggcctctgtgtcctgaatygccctcccaggggmcccccgaggagtttatctctggaagcacctgccacaacaaaaagatttcttccaaacatggggccatgcacaattatatcaatgccaaattaccagagagccacatatgcagatcgcactgtttaaacattcctattggaaaagggaaattggagggagagttaatagatgaatcaagacaaatgtatttagagtttgctacccatggtttgcctgataatcactgttctgaatacattcatcttaagccgctttagagctacattaactatctctctatcataatttctaaatttagcccagtggtataaggctttgctagtcgaagtgtggtcctccgacccgtgacatcagcatcctctgcaagtttgctggaaatgcagactctcaggccccacccagtcctgcattttaacaagatatccagatgattctatgcacagtaaggtttgagaaaccctagcagctatccgattaaattttctactgctaaactcttaagcaaattaaacatctctagcctcttcctaatggagcaggcactgggaaaccaaactaggtgttgtacgtaaacacagagttgatggagcctcggagataaacatctaatatttaggtgatgctccactgcttcctctggggtcatctaaacctaatacggctgcaaataacaaatgctgcttttcttctggttctttacacaactgcagagaaatatactttaaaaaggctattatcataaattttatacacaactcaatcattcccaggaagaaaaatgaaatttaacaaaggaagctccacacttctttctttgctataatttcatttcgagaaattttttgctattaccatggattcagactgcttgggaagtgataggaaaatgagatgcttctgtgctagggatgtggggaatatatgcccactgactgcaagtccagtaaatagcagccaactgctcagaatggaagatgctcttagaatttgatatataaactcctaaaaatacatcttaaacctagggcaagaaaatgggttgcttttcctacacccccaatcctgtgcttctcagtttgaatgaacccatggctgcctggcctgtatatctatggacaaacagggcacggtttcagctttaaagaagaggaagagcaggctgatgagcttgtgccaggactggaaaaactacgtatgcaaacactgaagagggcagaatacctgggtgtgaggacagaggttacttgggcatgtcaaggattctcaaagtgctgactcaccaatctccttccagctttattacatcactaaactggaaggcctgtgtggtgcactggcagaaagcacttcattttggccaagcattaaaaacaggtccaaacccgacatgcttggagtatctagaatggagaaaggtggattggatgatagctataattagatgcctttatggttgactgaacaggcatgcccccaaagtggatcacacattcattcatcaaacactcattccgtttctagtatgtatgacggggacctcaattgttcaatgtcagtgtgaagcaaatggtatgccagaactctatttttagttctgttctattcaatactaatacagtgttttggttatcatatttcgaagtaacagaaggctagaagggatatatgttgcgawtaagattcaaatatatcttaagaagccggaagtgatggtaccaaaccaggaaaattaagatcaatgagaataaatgtaaatgcctgcccttggtttcaacagctcaattagcctactagcagggttgaagagatctggtttaataatggtttcaatgaaagagcccagaaagtttttgtttgactatacactcaatatgaacaaccatttggtagggttcttaaaaagtatagtaattataaccttcattaaaaaaaatataatgttcaggctgggttcagtggctcacacctgtaatcccagcactttgggagcccaggagctcaaggccagcctggacaacatatcgagatcctgtctctacaaaaaataaaaaaaattagctaggcatggtggtttgcatctgtggtcctagctacccaggaggctaaggcaggaggattgcttgagcccaggaggttgaggctgcagtgagccatgattgctccactgcactccagcctaggtgataaagcaagaccctgtctcaagaaaagagaaagaaaacaatgttcagaataagggaataaatactgcaaccatagatggcacgggtaaagccacagttgaaatcctgctgcaaaggcacgtgggaaggatggggcatgtctagggggagtgatcagttgcgcaagaggtctggaggcaagcagatgagtaacagctgagacaactgggaatgagtgccctggggaagaacagaaaaagctgcagcattaggaagcaatgagaatggttaaaaatggactgggctgcctcatgagtcagggatctctgggtcaccccaagggtcaggatagaaactcagggatatggggtaggggtccctgccctggttgggtgttcgaactacttactctacatttttttgccattaggaacattctgagactgtgattccactctgtgtcaaggtggctggcttgtcatcccagtctactgtcacaatttcttcttgctgtgtcctcagtggaaactgactattgaccttctcttccatgtctatctaagcgtggagcttcatggggcaggcctcttggcccaaaatgaggaggctcctgaaggggactgaaggccctgtctagagacatccaggccagaaaccaccagagaggcgagctgggacctggcacaactttgtagaagatgctgtctgagagcctckccccaacgcgctcgggtttcccttctcggctctgcacccctgggacatgggatcttgctcttcacggaagtgtagtgagtgagaagagaaaaagcaagaaatgaaagctcgtaatccaagctagaaggagtccacacgagggcctaaggacataaaaaataaataattttatgtatcttaatttttatcatgaataaggaaggacagtgggttgaatggtagatccctaaaagttatgcccactcagaacctgggaatggctttatttggaaaaagggtctttgcagatgtaattatggatttggaaatgagatcatgctggatgatccaggtgggccctcaattcaaagacaaatgtccttataagagaaaggcagagaaagatgtgagatgtacagaggcaaaggccctgtggaggcagaggcagagagactggaatgacgcagtcccaagccaaggatcacccgaagctactagaagcagcaagaagcaaggaaagattatcccctagagcctatgaagggaacatggctccaccagcaccttaattttagacttcaagcctccaggagtgttagagaatacttttctgttgttttaagccacgatatgttttggtaatttattatggcagccctaagaaaccaatccaaatatcttccatttattgattacttattatacatgccaagaaccttacttaaatatctcatttactcttcataacaaatttgtgaggtttgtattattatctccattttccagataaggacactgaggttttcccaaggccatacagtcagaggtagaactagcactggaaatcactttcttagtctacccaaccatgatgcgggttacactcacctcctggctatggcgatggcagcctcatagcaaatatgcctatttatttttcatgtagaaaagggacagaatgcacagggataagtaggggaaaagatgtctaggggacctctgcaccatgttgactaatcaagaactgcagctggtgagacgttcagtaaggaagagactgatcagtgaccaaggaagagaggtcaggatgtttgtatttcccaggcaagcaagcaggggacctcaggctcagcagccaagttcaagaccacccacccaattgtgatccaggccataggagtggtgagactgcagaaggagcctctggcacaggtcggacgtgaggaactgagagcactaacatgcttttgaaacaagctctctccctctagtgtcacaagaagcaagttcaagcctgcaacctggcacaggctcccctgagtccgtggcagccagcagcacacaccacattttccttttctttgaggcaagaccttcctgggggtggttgggtcaggggaatctgccactaccactgccagctgggactgcagtgggtcaagcaaaggcaggagaaaagcagccccactacttatattatcagcaccacgaatagtagtgttttttgaccccatgcatctatagactttttgggcaatggatacgactatacttgaagcaatgattaaaaaatttaaatccacccaaaataatagtctcattcgggtggtcgctggcttgggtagctctgcgtccagtggggagttgttctttgattaagggccttgaaggggaggctggaaagaattcctcaagacacacagctgcactggctgccattctgctgaacttgtctgcttggcacgtggttaagttgctgtctcccttatccctaagtggggctgagtgatttgctactacctgtccacataatggagggccaggcttcatcaattcttagattcctggcttctgccattgctattcgtagtgagcagatgacagttctgggggtgcagttagtgagctctgccacccctggaaacatcaggacatcggccatgtggctggggtccccctgcgtggctcatggcacatgtccgtgagagctggaggatcagcctggatgaggaaggaggaggggcggggccacagcttggctgggccatccctagaagccggctcacatggaaaacgcgctgcagtggctgtgtagccagtgtctctggcggcctgcccatgccggaattcctggaaaggctcaagatggaaaaataaccatctggatccaagctggtcccaaatgaattgtctgacagaggttgagttggagtttttaagaaaagctggaaatgcctttctgtcaagacctttcctgattcaatacagaagcaaatacttttttgctttaaagcgtagtgcattccaggttagctacccgggggcacccacgtttctgtttatccaccactctggttgaaggctgggaacagttacacagatgctttccacgctgcctggagttagtggttctcatcccagtccagactaacttgtttcaaagtgagaggaagtgagccctcttcattatcttatttcaaggactgatgcaagaagatgaaaagtattggccaaggtaacacagtaagaactggggtcaggaggatgagaacctgtcactttgactctcacttgaatgtttcttaccaccactgtgatagatctcactacccgatgcaygaagcattcacatccactgtcctatttagaatatcaagataaatattaatattattattactaacaatgatgataatagatcaataatattccactgctattactactaaggacacacagaattgtagttagagtgggctacgccgtaaggtagagaacaggttcaaaccttggctttaccccaaaccacctatgttatccatttttaaaaatataattttggccgggcgtggtggctcatgcctgcaaacccagcactttaggaggctgaggcgggcggattgcgaggtcaggagattgagaccatcctggataacacagtgaaatcctgtctctactaaaaatacaaaaaatgagccaggcgtggtggcaggcgcctgtagtcccagctacgagggaggctaaggcaggagaatcgcttgaacccaggaggcggaggttgcagtgagccgagatcacaccactgcactccagcctgggcgacagagcgagactccatctcaaaataataattttaattttacttgcgattatacatgtgcccaagtttaatgaggcaaaaatttcatttcaacaatgtgtaaagttgtaatctctgcctttaaaatggggaagaattaacatgcacagtgcctagtataacacacactcagtacatggtcgccatcgtagttataattcartaaacatttcctcatgaattctcagtgatcacccacacttatcygttgctcatctctcctggccatgatgtaatcaatacaacaccttcaaactatcaattctttcaaacatctgttttttcctcacatctgtgatagaaaaagaggaagtgatgggtgtttgagagttcatttttttcttcacttgataggtgggataatatttataagtgcccaatgtgcagacccctatgcacaccaacaagaaggaaggcaattcagcacacaagcagaataaacagaaagctcagacgctaaactcaaggatggcatttccagggaagggttaagtgcaatgcctccgtgtttcactctgcctgcttttccacaatactttttggatgagtaattcccaagacgcatggtggggaaatgcagaatcctccttccacatcccgcagggaaggctgccagctgtctacccgcacacacactcacgagcttcaccacacaacacgatgcaaagcgccagcaactgctccaggaggcctaggctggatcctgccagccaccagggggctgggtttccaggacattagacagccccagtctacaacagagaacataaaactctccatcaagtcaggaaaaaggtctcgtgggaactgaggtactctgggagagtcttaaaactattcactgtccttggtgtggctgaatgaaagcaaagccaatgcctccagataattcataaactaaccagctgttcctccaggtgtcacacactggcttaccttctatggtggtttcagtcactgagacactgcacaattcaatgctctcaactgcaaagaccccaagacctcccgggacccaggctctctaaggcacagcaggcaggacaagtcacgatgcttaatttgtgcaggctacagcaatgctttacatataaataacaactagcatatgatcaccccatttcaaagacaaggacattgaagctcagagtgtaagtcacttgcctaagattacatggctaaaaaagggcagaaacaacacacaaaaaatcctaatatgaaaacttgggatctagttcttgggttgtgtagtgggtcattagtgtgtagtgaagaattttttttcttttttgagacggagtctcactctgtcaccatgctgtagtgcagtggcgtgatctcggctcactgcaacctctgcctcctgggttcaagcgattctcctgcctcagccttccaagaagctgggactacaggcgcatgccaccatgcccagctaatttttgtatttttagtagagacagggtttcaccatgttggccaggatggtctcgatctcttgacttcgcggtctgcccacctcggcctcccaaagtgctgggattacaggtatgagccaccgcgcctgaccatgaagaatttaacctcacccaaactcaggtctggcctttgcccccacctgtggggaggtgatctctcggcctctggaatgtcctgcctcacagaagtatgtttattggccactggatggagtaacaatgtgatttatgatgggggctttgggccatgaggtatacgttccaacctcagaggaactaataatgaaagatatttgcctgatctccaggagggcctagggactagaggtcagtcatgaggacagtagcaattgagctccaataaaaactctagatgctgaggttcgcgtgagcttccctggttggtgattcttcacatcatggctgggaggaggtaatgctgttcatcacttcatgggcagagggcaacagaagccccatgtctggacccctctagacctctcctatatgcctcttaccctggctaagtttaacttgtatcctttccctgtaataagtatgagtagaacagctttcagtgagttctgtgagtccttttactgaattatcaaaacggagggtggtctgggaaaccccctgaacttgcaattcgtggtgcaggcactgctctctctaacgttgtagttggtcaccttcttatagctagtgatggttatacacttaaataggccaagtaataaaatataacaacgttgaagtaacatccatcagcgttcagtgataagaatgccttgtgaaacaataattaggttaatctaaattggtataccccaaactgtggccagggaacaggcagatgggtggtacagaaaggaacagggatatatattactcagtgtaatgtcaccagggccaaaggctcagagaaagcctccctgtggaaatctccccaatggcacatacatgtaagaagcactgagtggatcaatttttggggtacagagttcaaagtgttggagcaatgggggaacacatcagctaacttccggtgtcttaatatcctcagcccactgagtgaaattgacttactagaaatctaccatagaatactgaacatcccaacagaccaaatggaggagttggctcccgcacttggctctgcagattttggggacatatttcctccacaatacaaaggaggatgcacatgtacctgggacactactggtttcactgtgtttgtggtcatgctgaataatggtgtatcagtggcagcagctctggctgagagaccagaacccttgcagccttagtactagggccatactctctcacctgcagaataagaaatcaatgctgacggcacatcagactcacccagggagcttttaaaaacataatgtccagatctaccccagaccaactgaataagaatccctagatgttgggaccaccactggcattttaggaaatgcaccaggggattctaatttgcagccagaggtgagaacctctggtatagaggattttttttttttttttttttttgagacagagtctcgctctgtcccccaggctggaatgcagtggcgtgatctcggctcactgcaagctccacctcccgggttcacaccattctcctgcctcagcctcccgagtggctgggactacaggcacccaccaccacgcctggctaatttttttgtatttttagtagagatggggtttcaccgtgttagccaggatggtcttgatctcctgacctcttgatctgcctgcctcggcctcccaaagtactgggattataggcgtgagccaccgcacccggctggtatagaggatctttaagccccctaactccatctgtccttggcagtatgtctcagtgattttttttttttttttttttttgagacggagtctcgctctgtcacccaggctggtgtgcaatgggtgcagtctcggctcactgcacctcccaggttcaagtgattctcctgcctcagcctcccaagtagttgggattacaggtgcctgccaccacacctggctatgttatttttatttttatttttggtagagacggggttttaccatgttggccaggctggtctcaaactcctgacctgagcgatccacctaccttggcctcccaacgtgctgggattacaggcgtgagccactgagcccggcctgtctcagtgattttaattacagcagccaatccttttccccactttgccaacacaaaagtcgtgttctaacctcctttaatcatacttaaaattatatgctatgtccacaatgagacaccacttcacactcattaagatggacattatattcttttttttaaaaaaaaaaacaaaacaaaaatggaaaatagcaagtgttggtggagatggggaaacgagaacctatgtgcatcgttggtgggaacgtaaaatgatgcagctgcatggaaaacattttggcagttcctcaaaatgtgaaatacagaattaccacatgactcagcaattccacgtctggatatctaccacaaagcactgaaagcagggactcagatattccacacccgtgttcatagcagcattgtgcacacgagccaaaaggtgtcaacaacccaatgatcatcaacagatgaataaactttaaaaatgtggtatatccttatgacgagctattattcatccccctctccttacaaaggaatgacattctgttacatgctatgacattgataaatcttcaaacattatgctaagtgaaagaagccagacacaaaagaacaatatcatatgattccccttctatgaggaatctagaatagtcaaatttggagagagcgtagaacaggcgttagcaggagctgggaggacggggcaatgggagttgtttaacggttccagaatttcagtttggtatgatggaaacattctggagacagatggtggtgatggttgaacaagaatgtgccacttaaccgtgcacgtaaaaatgattaagatggtaaatttcatattatgcatattttgtcaccagtcaaaaatttttaaaaataagtatgtcatggctgggcgcgttggctcacgcctgtaatcccagcactttgggaggctgaggcgcgcagatcacaaggtcaggagatcaagaccatcctggctaacacggtgaaaccctgtctctactaaaaaatagaaaaaattagccgggcgtggtggtgggcacgtgtagtcccagctactcgagaggctgagacaggagaatggcgtgaacctgggaggcaggcttgcagtgagctgagatcgcaccactgcactccagcctgggtgacagagcgagactctgtctcaaataaataaataaataagtatgtcatgatcttaaaagtttgtgaacaaactgcatttctgttttgaaaccacacagcgccccgctccctcatctgcttggagctacaaggatctctgagatacctgctggcattagcctgtattccaggactggacgtcagggcatcctttaagcccttaaagctgtatgccctttctcacatccgcaaaggggactgtgagctgtaaaaagtgaggcagcagtatcttagtgtcactgctctatcatgtcattgctcactgaagactgaaagctggccgatatccctgtatgcctcttctcccctgattctgtcatcaggttatgtcagttccaccctctgaatcagggactggaaaaccttgacgatgcgcggccacctagtaaatcgtgtggctttgcgggccatacacctctgtggccattactcagctctacctctgcaggctgaaagcaaccacagataatttgtaaccagtgggtgtgggtggctgtgtcctgatcaagcctcaaatatgcctgctgcaggcctctgggtatgtgttccctctgctctgttagagtactttccacaccagccaccgctcctccgcaaggcactgtcacctgttttctaatgcagtggttcttatactcgagcgtgcgcatcacattcacccggagttcccagatgctgctgatgctgctggtccaggaaccacacttccagaagcactggcctcacccatctttcaggtctctccttccatgtcacctccttaaggctctccccactccaaccccataccctctgcctctcctctgtgcctccttagcaccctgctccaacattctcatccacacaccgttcaggaaccgtttcctcgactatcctccaaggctccaattagtctaacaccagccaccccygcatgccttcaccatggtgggcatgatggttaatactgagtgtcaacttgattggattgaaggatgcaaagtattattcttggttgtgtctgtgagggtgttgccaaaggagataaacatttgggtcatgggcttggagaggaagacccaccctcaatctgggtgggcacaatctaatcagctgccagygaggctagaatgaaagcaggcagaagaacgtagaaggactagactggctgagtcttctggccttcatctttttctcgtgctggatgcttcctgccctcgaacacccgacttgaagttcttcagcttttggactcttggacctacactaatggttggccagggctcttgggcctttggccacaggctgaaggctgcactgtcggcttccctacttttgaggtyttgggactcagactggtcaaccactggcttccttgctcctcagcttgcaggtggcctattgtaggacttgaccttttgatcatgtgagtcaatattccttaataaactccccttcatatatacatctatcctattagtcctgtctgtctagagaaccctgactaatacagtgggtcccctaactgctacttccttaggcaatcattcctaaactctcagcaaagccacttccggctgctgcaatccttgttttcacgtgttttcgtcattagaccgtaaactccgatgctgcttagagactgaagttcacaaccccttgggtttctagggtgctgtccgtccttggttggttactgttcttatcttgtgtccatctcttgcagtttgtcttccttacaagctggttattaaaaggcaaaggatttctggatcattttctagattttggatgtgatgataaaaaactgaactcattacggagggmcataaaataatgttgtggtatctgcaaagaatctgccccttgagattccatttcaaacatactttctcacgtgagattattaactcctgttacttctcgggtcaggaagtacaagtataatatattgtgtgagatgttaaagacacttgctatatgggaaggcctctaaacattcatatccaattatccaaaactaattaaagattgtcttaggctcaatctcaaggaaacacctcggtagtctctggatttactggaagaggtgtgtatttacaaagacaacaattttgttgaaaccagcctaaatcaatcgtaggaaggacaaggagatcagctgtacacatcggccaagataagaattctctctgcaataaatgtttgttttaaaattaggggtatgactcacactcggtgaatgggtggctgacttctgaccctcaaaagatgaatggctcattttgaaaagcccagcaagtgggaagcctactttctacctccactgacttcagaatgaggctgcagtgtagtggagcccaagatggccccgagttgtttccagtcactagcaagatggacaatgggatgactcgctacctgcagctgttttcaataaaaaagctgagtaattacagcagcctctcctggggctcacatgcggcccagcacaaagccaatggaacattaaggacactgaatgagctgccagaagcccttcagcattgggctgccaaactgctcctcctcccccagctcagcgtcattaacttaatcaggtattcattcaataaaaaaaaattgacactccctggatgtaggcaacaccctctgaatgaggcacactgtcaaattgactgcatccggcaggaagtgtgagggcggttctatattcttttaattatttatttatttatttattttgagacagtagccagagctggagcgcagtcacgtgatcccagctcactgcaacctccgcctcctgggttcaagcgattctcatgcctcagcctcctgagtagctgggattacaggcgcctgccaccatgcctggctagtttttgtacttttttcagacagggttatatcatgttggccaggctggtctcaaactcctgacctcaggtgatccgcccatctcggcctcccaaagtgggagtgagccaccgcttgggattacagccctgagccaccacgctcagcctatttaatttatttttaaatttaggggctgggaagatgggaatcctcctctatgcagtaatccttggacatgcagtggaagagaggttatagtgagcagctgctggtcacagactaaagagaagaaacaccttgctccctctttgcatttagaagcattaacacttgataatatcgttctgactcctgagcaggaagcacatagttgattcagtgtcatgttagaccgggctaactggcatttgataactcgtgactttaggaaagtctttcaattttctctccctcttttttgtcgccgggtctcactctgtcacccaggctggagtgtagtgagaggtgacagcatactggcagccctcacagccctcacttgctctctgcgcctcctctgcctgggctcccactttggcggctcttgaggagcccttcaccccgccgctgcactgtgggacctctttctgggctggccaaggccagagccggctccctcagcttgcgcggaggtgtggaaggagaggcgygggtgggaacccgggctgcgcgcgttgcttgtgggccagcgcgcgttccaggtggctgtgggctccgtgggccccgcactcggagcagcggcggaccccgccggccctagggcagtgaggggcttagcagttgggccagcagccgctgtgctcaatttctcgccaggccttagctgccttctggcgggcagggctcgggacctgcagcccgccatgcctgaacctccccctgcccctccgtgggctcctgtgcagccagagcctccccgacgagcgccgccccctgctccacagcgcccagtcccatcgaccacccaaggactgaggagtgcgggcgcacggcactggcaggcagctccacctactgcctcygtgaagatccrctaggtgaagccagctgggctcctgagtctggtggggccttggagaacctttatgtctagctaagggattttaaatacaccaatcagcactctatatctagctcaaggtttgtaaacacaccaatcagcaccctgtgtctagctcagggtttgtgaatgcaccaatccacactctgtaactagctactctggtggggacttggagaacctttatgtctagctaagggattgtaaatacaccaatcggcactctgtatctagctcaaggtttgtaaacacaccaatcagcaccctgtgtctagctcagggtttgtgaatgcaccaatccacactctgtatctagctactctggtggggacttggagaacctttgtgtcgacactctttatttagctaatctagtggggccctggagaacctttgtgtctagctcagggattgtaaatgcaccaatcagtaccctgtcaaaacagaccactgggctctctgtaaaatggaccaatcagcagracatgggtagggccagataagagaataaaagcaggctgcccgagccagcagtggtaaccttctccgatccctttccacactgtggaagctttgttctttttgtctttgcaataaatcttgctgctgctgttcactctttggatctatactgcctgtatgagctataacactcaccggaaaggtctgcagcttcattcctgaagccagtgagaccatgaacccacagggaggaatgaacaactccagacatgccgctttaagaactgtaacactcaccgcaagggtccacggcttaattcttgaagtcagtgagaccaagaacgcacctaattctggacacagtagcacaaccatagtttactgtagcctcgacctccctgtgctcaagtgatcctcagcttccttagtagctgggattacagacttgtgccgccacatctagctacattttaaacttttttattcagatagggtttcatcacgctgtgcaggctggtctcaaactcctgggcttaagcgatcctcccattttggctttccatagtgttagaattacagatatgagccacagcaccgggcccattcaactttctaagctttgatttcctctttaagaaaatgaagatagtatggcgaggcacggtggctcacacatataatcccagcactttcagaggccgagggggggcagatcatgtgagatccagagttcgagaccagcctggtcaatgtggcaaagccccgtctctactaaaaatacaaaaaaaattagccgggcttggtggtgagtgcctgtaattccagggaggctgaggcagaagaatcacttgaacccgygaggtggaggttgcagygaaccaagattgtrccattgcactctagcctgggcgacaggagtgaaactctgccttagaaaaaaaaaaatgaagatagtaatacgccttatttcatgaagttgttatgagaattgcatgggacaattcagtgcctagcatgcaagcaggcagtagtgcctcaaaaaatgctacctctcatgatgaactgctttccagttcaaactacctcctatgactgctgcagcaaacagcacaggcctgggatctaggccacctgatttggaatcctggtggccttactcctcagctgtgtatatctgatgcaagttaattaatttctctgatctaagtactaaccaggcctaactaattcatttctctgtgcctcagtttgctcatctccaaagtgggaataatactagttcctaccccacaggcttgctgtgagttcacacataagaagaatttagatgagggcctggcgtactcaagacctacaattactggctgtggttgttccgattattttctaagaaaggccctcttctctacctccttcactgtggtcctattttcatctgcataaaaaaatcacattttcaggctgggcatggtggctcacgcctgtaatcccagcactttgggaggctgaggctggtggatcacgagatgaagagatcgagaccatcctggccaacatggtgacatcttgtttctactaaaaatacaaaaattagctgggcatggtggcacgtgcctgtagttccagctactcgggaggctgaggcagaagaatcacttgaacccgggaggcagaggttgcagtgagctgagatcatgccactgcactccagcctggtgacagagcgagactgtgtctcaaaaaagaaagaaagaaaaaaaaaaaacacattttcctccctagaattctttctcaggttacttcctgcatcatagacaccagtcagctccagcaaagatggtgaatggaataatctctcattaaaagtttccctgcctcacttcccttcatgaggcatttcaagtcttaccggttcagaaagtttactaagtctctaaaattgtcttcttttagaaaatactccacactagtgcactgatttttttttccccctaaactggaccaaagccttgtttgcagaacaaatggtcaattacatctacattcaaaaataaaattcaaatgtgctcatgttttcaatttaagtatgtctgttgtttgctgtttattcctttggtataaatagaagctttctggcttatttgaacgcrgaacacatagtacactgtttagatacaattattcattataaattaaatcaatgcttttcctttttagaataccatgccctaactagaatctctacaacattataaaaacataaaatatgactaacgatttaatttaaggccctaattcccaatgaaagataaataatgctgctgtaggcaccaatgactgtaatctaaacaggcaataaaatatttaatggacaagcggaaatgcaaaaaaagtaaggcagtctcctgtttacaacaaagctcattttctatactagcactgtggacgtggaagatgcagttaacctctgtaagcctcagtttcctcatctggaatatgtgaatgatgataatacgttttcaaaagattgttgagatgaaataaaagcaactataatgcctagcataagaaaaaaaatccaggtgtgttcttcttcctgaacttcagtctcagctcaagagtctgtgaggaatttccacttggatgcttaccacccctctcaaatcagcatgcactccggttccatatttctgctaacggttttgcaccatttctccaagcataggccagagcctgatatttgatacctctctcgcacttcactcctatatccagcgactcccctaattgtgtcagtctttcttcaaaatgtctcaactcttggggtgaagcttgaagtctctctttttcccatatttactgtgtaggaaagaatttggctttggccaaagacgggtctgccctttgcccttggctcctgggaaatgatctatgtgatatctgatagtggtgtccctatttgtggggagggaaggattttcagtcacagcaaatcaccgaacccaagccttggtttcctcattttaaaatgggaattggctgggtgtggtggctcacacctgtaatcccagcacttcaggaggccgaggcaggaggactatgtgaggccaggaattcgagaccagcctgggtaacaaagtgaggcctgtctctacaaaataataaaaaaatttaggcaggtgtggtggtgcatgcttgcagtcccagcaacttgggaggctgaggtgggaggattgcttgagcctagcctgggagatcaaagctgcattgagctgagatcgcggcactgcactccaacctgggagacagaacaagaccctgtctcaaaaaataaagaaaatggagataataacacgtaccctacagggttagggtgatgactaaatgagatgcattcaacaaatgtgaggtagaaaaaacttctcttattcagcaggaactttatcaatgttcatttctttttcttttataattatgagaacatgaaggaaatgggcagaggattccagcagaattctgccaagattttcagtcttttcctgattggcagcagagcatttccattttcattttgagttttgctggtattcttctactaagaaaccaatttttcccccagtgaatgtttttttaatttcagggtttttttttttttttgaaacaaggtctcactctgtcatacaggctggagtgcagtggcccaatcttggctcactgtagcttcgacctcccaggctcaagccatccacccacctctgcctcttgagttgctgggactacaggcgcatgccaccacgcccagctaatttttgtagtttttgtagagacggggtttcaccatgttgtccaggcttgtcttgaactcttgggctcaagagatctgcctgtctcagcctcccaaagtgttgggataacaggcatgagctaccacacccagcccattcttgagtatgctggatcaatatttctccttgtaatgtaattccaacagaagggaaaccaggcctcctttcagtatcgcagcttgagcctgtcagcatcccctgatttcagaacgtaggctacaaacagtcccagatgtgtgctgacggtactacattcctggtctttcacagcatttactttggattgggaaatgggaagtgaggtctctctttcagtatgagattatttcttagaacaggttagtttggcctttgctaaaatataaataagcagaggcttccatcagaaaaacatctgagtgttaagtagataaatgcatcccttcaacattgagacattttatctccacatctgatgcactcttattttttcatcaggacacgttccagaaacttggatctttttccctgctatagtttcgcgaataatatagtttgcttctattttgctctggttaacccaagggatggtgggtgggatgatgaaaagcagcaataaggcagtgactgagtctcaatctataacgtttccaacgtagaagataaaatgaacccataataaacatatttgggaaaatatacaaagaacttcacagaaagctctcaacggagagcmtgaagggaccagccagggagtctaatgcaagccaggaacagccaggcatgagtaatgccttagatgggtgggttttgttttctttcacagctgatttgaaacttccctcaatgacactgtagaagataatgttttaacaaaacgcatggatttacaagcttcctcacactcaagccgacagagcatcacacgaggctctgtctggtagtctccacatctcaggctgggctggatggaaggaaatgatcacagcaagggaatttaaaggaaatgaccacagcaaggcacatcgagggctccctttgtggctcaaaagaagcatcatggcagagttattgtcagatttcagtacaatagtccccgccttatccatgaggaataggttccaagacccccagtgggttcctgaaacccactggatagtaccaaaccctatgtacgctatgtttttttcctatatatacatacctacgataaagtttgatttatacattaggcacagtatgagattaatgataatagctaataataaaatagaacgattgtaacagtatgccagcatcactaagtgctttgggaccatsattaagtaaaataaaggtgacttgaacacaagcacttccatcccaccacagtggatctaagcaccaagatggccgctaggtgactcaccggcggggagcgctgcgcagcggacaagctggagaaagggacgattcacgtctgcgttaggatggggtaaggcgtgagattttatcatgctactgagaacagcacgcaacttaaaacttaggaactgtttatttctggaattttccatttcatactttcagtctgcagttggcctcagaaatcaacctgcggataacgggggacgtctggctgcggtgttctaggaaaatactccacactaaactaaaggaggtgtctcaacaaggctgagaacgaggtctatgacagaaatgtgccaagaaagcagaaaggaaaagcgctcatagaatggggaatgctgctggttggttagtggcttcagaaaggtgtctgattctcttaacaagcaattacaggaggcccggcatggtggctcacacctgtagtcccagcactttgggaggctgaggtgggcggatcttggggtcaggagttcgagaccagcctggccaacatgccaaaacccccgtctctactaaaactacaaaaattagccaggcatggtggcttgtgcctgtaatccctgctactcaggaggctgaggcatgagaatcacttgaacctgggaggcggaggttgcaatgagctgagattgcaccactgcactccagcctggacgacagagcaagaccttgtctcaaaaaaagcaaaaaacaaaaaaccacaattacaaacacacttggccattaaacttgaagcagtgaaaaacagcttcgtctacgagaataaataaataaaaactgctacaggcattatgctttaagatcacaatcgtgcatgaggacattacagtgagggtcccctgagtcgataatcagaaatacatgtgatgctgtaaaaatacacatcctctgtagtttcccaagattgtgtaggtctgggctgggacctaggaatctgtattttaaaaatctcttttggtgattctgattggcagctaggttggggaactactacactagacctgtgcttcttaaccttggcagcacaggagaatcacctggaaagattttgaaaagtcttgccggtcacaccacactccaggccactgaactcagaacctatagggtcggagtgggtatcagtgatttcaatgtgcagccatggttgagaatcagtgcagtggaccctcagttccctgacggaggaacatattcatgtatgtacctccctaaaacagtgccctccacaataaagccagacccccttccttctatcttatttcacttatttttttttttgagatggagtctcgctctgtcgcccaggctggagtgcagtggtgcaatctcggctcactgcaacctctgcctcctgggttcaagcgattctcctgcctcagcctctctagtagctgggactacaggtgtgcgccaccatgcctggctaattttttgtatttttagtagagacgggatttcactgtgttagccaggatggtctcaatctcctgacctcctgatctacctgcctcagcctcccaaagtgtggggattacagccaccgcactcggacccttctattttataaagctgggttacacatggaatttgtttgtattaaaccaagcttttcccagaaaacaaaatcgagtccttttaaacaaagtttttagatatttagaggataatataattatctacactttgaggggtgagagctctaaaaagaaccttagttgcttggaggcaacaagtagatcaagaggaaagaccaacaggtgcctgacatcctctctgggttgttcttctgatttgtgatgggtacaagaaatattcatcacaaatgtcaggtctcagattttctgatatgcaagaaactctacagagtggagcagcagccatgtggtcttgtagcctatggtcagagcacagaaaatacctscagcatagctggagactggccagaggccctgacagctgcacactgtgtcctgtaacatatttgactttagggcaccttgcatttctgcatcacactgtgcacatctttctttttctcctctcttggtggagaggtatttattttaattacgaagtcctctattatgtatggtgaactgtttaactctggggcagttgaactgcctcaaactaggctgcataaaacagaaggaaggtccacagccatcttcccttggactggcctgggcttgcttcagtttgctgagagcagaacccagcttggatgcccacagatgccgctgtacttttgcacaaacttacatacagagcacctaaaaccaggggcacctaaaaccagtagtggtaatccaattttacggaaaactgcagcaggaatttgctgccaccttccattttccccagcactaagaacacctacttttagtgacaggtgactcatctgccactcttctagcaggctcttctaagcgaagacacaaacaagagcagtgtcgaccctgatggatgagcttggtgggggaggagaagccccatggataagaaagggatgacatttttctctgctcaatcttccccttcctgcaggaatactcacccaccctttttttttttcttttttgagacggagtctcgctctgtcgcccaggccggtgtgaagtggcacgatctcggctcactgcaacctctgcctcccaggttcaaacaattctcctgcctcagcctcctgagtagctgggattataggcatgcgccaccacgcccggctaatttttttctatttttagtagagacggggtttcaccgtattggcaaggctggtcttgaattcctgacctcaggtgatccacccgccttggcctcccaaagtgctgggattacaggcgtgaggcaccacgcccagcccctcacccacccttttgatgggcaacttgagctgccctctcctgcttattcctgtaactgcaaacacgtcttgctccaaccaccacttcttaaaactgcagatgaagggctgactctgggcatgccattggttgggctcgttccttccccgcgaccattctcctcctgagagctctgaagtcattacatcgaagtaagtaatttagacacattgcctctaatattcctcttgctcacatctgtgaagtttagcaaataaagcaaatgtctgaatttcctatctctggacatacagggaaacactgaagaagtgatgtcctctcttcttcctacatttcctgcccacggcactctttgcacaaaacctcagtaaaaaatcgtggcacaggtcacggattttcttcctcctccctgcttattctatgactcagaaggttcaaagcaaaggtttttgacctaatttggccttaagtcagaaaaggttccactgctgtctcacactgagtttcaaagcaaagaagaaatggaacagggctgtatttaattctgaatataatctctttgctgttggcaatgttatgggaatagtaatgaatttttgctttccatgaataaatttttcagaatctaaagttgaggctcacataattgttagtattttccccacagtgtttttcaattttccttggaagggaagtagactgaattacaatacctcagtttctcattttgtaagctgccaagaacagtatgaactgtcctggaactaaagaaacataaggacaaatgataccaggaaagccgtttgaaattctttgggggaaaagcatataacttatgcagaccaccctgggttatccagtttttaaaaatccctgcatactagacaaacttcttttggaccacgtttctttcctaagagaagcttgaagacagcaaactaatttkcaaattaggcatttgtcaaacatttttaggaagatgaatcttgagcaaaacaaacttttgattatattcaaaaaacaccaaaaaaattctggagatctagattgggaaagcaggggtcatataaaaagctaatatggaggactgtggtgacaatcagaccataatacggacagtaatatgtacaccacaccacctctttatattcttttcaccaacagtctcaaatgctggtttcagcataaggccaagaaacccaaatctatatggaatttatgcaaattccacatcgatttatattcatttatagttattccatttataaaatgcagcttattttataggtggcgaaacaggcctagagacaaatatgcactactaaggtcctatgggtttgagacatttttatttttattttattattttttwttttattttattttatttattttattttatttttttttgctttttgagacgcagtctcactctgtcacccaggctggagtgcagtggcgtgaccccggctcactgcaacctctgcctcccgggttcaagcggttcttctgcctcagcctcctgagtagctgggactacaggtgcccgccaccatgcccggctaatttttgtatttttggtagaggcgagatttcaccatgttggtcaggctggtctcaaactcctgacctcaaatgatccacccacatcggcctcccaaagtgctgggattacaggtgtgagccaccatgcctggccaagacattttaattaaatgcttaaccgagtccagaatttgatctttctaactccacatccattacactttccactctacaccatggctccccgtgcagaagactgcaatccaatcagctcagttcccagagggtctagactcaggtagcgacaataaacatggaagagagacaaaaaattggcaaggctcgaggaatgattgatggaagctgggttgaaccaaaggagtgggagctctcaggtgggaataggaaaggtacaactgcaataagatacacagaatggacagagtgctaagctagaggaggggcagataataaagctcgttaataaagatagtaagacccatttagctttacgtggctctaagataaacatacaggaactctcctgaaaggaccaagagtaggtaagggaacggggtgacagaagcagcaccagtacccgggagggaagctgacactgggagaaatatccaagaaaggcaatcaaaaggcaagaagagcaaacacctaccataattttggttagagagaggaaaagtagtcaagaagggcraagatgcaaaaatggccataataaaaaaaatgatagatattgatggggatgtggtgaaacgggaacacttttacattgctggtgggaatgtagactaatacaaccactatggaaaacagtgtggagattccttaaagaacttaaagtagaactaccatttgatccaacaatcccactactgggtatctacccagaggagacgtcttatgaaaaagatacttgcacatgcatgtttacagcagcacaattcgcaattgcagaaatatggaaccagcccaaatgcccatcaatcaatgagtggataaattattgtatgtatayatcacagaatactactcagccataaaaaggaacaaaataatagcattcacagcaacctgtttggaactggataccattattctaagtgaagtaactcaggaatggaaaactgaacaccgtaatgatggcagtggctgctgccatcaagctggctgygcggctggtgctgcatactccatggagctggtggcagccctgttcattccgagttgggatgggagctccgcgtgccactgcagccacctgaactgcagctgcagacccaggcctcctgctccacagagcaagcaggagccccgccctcttggggccacagccacccaaactgcagctgtagatccragtctccctgtgctcttgggggagcctggaacaggcaggatctgccttcccaggtgcagctgcagctgccgcacccacggctgcagacctgggcctcccattccaggaagcaggcaggagccrggaacaagcgggagccctgccccttccgagttgtcagggcgggagctcccgggtgcagctgtggccaaccctcccaggcacaggacctgggcgtctctgcagcctgcacccttgggcgccccaggaaggaccctccccatctctgcatgctcagatgtgtctgygcccactgcctggcctctctccgttccaggcacccactcagatctcagagctgggttggggccaagccccggggccatgaatggcagcaggaggaagacagggtccggggcagaaaagaggggagtccccaattaggccccaccttcaggcgagggagggcctgaaggctgggggccgggctgccagtcctgccgaccagagtggggactcgtggtgcctcttccgtccacccatggccacccatggaccaattggcacatacttcctcccctctgaggtccataaaagccctgggcttagccacagcaggcaggaggatggccagggacaaagggggcagagagagaatgggactggatgaccagttgcagagaggagtaccctctctgctgatagctggagacgatgggacaaccagctgcagagatgacctgctggcagagaggagctaccctctctgctaagaggagtgcttcagagacctgcagaatgacttgcctgcagagaggagccaccctttccagggcctcctctctgctgagagctgaacactcaatgggacgatctgcttatagagaggagctccccactcctccgagttgttctaacactaaataaaactcttctttttcacccttcacatgtctgtgtacctcattctttctggacgcaggacaaaaacttgggcttaaaaggcgttgcggccacagaagtttcccatcagaaaaattgacaccccagagatcctataacagtatgttctcacgcataagtgggagccaagccatgaggatgcaaaggcctcacaatgatacagtggactttggggacttgggagaaagggtgggaggggggtgagggataaatgactacaaaatgggtacagtgtatagtgctcgggtgatggctgcaccgaaaatctcagaaatcaccaccraagaacttattcatgtaaccaaacaccacctgttcccccaaaacctatggacgtaaaaaataaaaataaaaaagacrgaagaaaattaagacatcaattatattaaatgcagcagagaaacagaaagactaagaatggccattggattagaccatgggttctcaatatctgctgaatattagaagcaccggagagcttctacaagacactaacccagaatctgaattaatgcccactggattaaactgtatggtcagagatgacttcaaagagaacagctctatagtcctattttaaagtaggggaacagatatacccagtgacatcggaaatgtgttttccattcccaagattcaatatgtaaatttgcattattattttatttttaaatttacatatgtcaatgggaaataatgtgcttgaataacatattcagcatttgaacatctcatgcctgggattacactggctgagcctcccacatcacgaagcaaatgcttgaataaacatatgggctctgagaaagtgccctcagagccagggaacatgactatatttcaatttaagagaagtaagcctcttggaaaacactgttcctcttgtttgctccctcttcaacgggtttttaagtccagggctcattccaaaagtcctttagccaatcttagttcctctaatcgtaacatattcagtgagaaaggagatcctataaggtcaggcaaattgttgttagaaatgtgatccagcaactttaggtttgaagaaatccagtggagaaaacacacacacaagcccacgtccacacctcacattcagacctgtctgtctccattatcccaatacaccactggggtctttccctgtattcaggaagtgggttctagaacagccctgtccatttgtaaggaataacacaaggtaagacgcctgaaactagcaagtgagaaagtctttacttattctaagtaaatgactcccaaggacaagatgtagctcgcagcttcttcagtgttgctgcacatttacgacatacatttaatttattttagctaatgaaaatgctcaatagtgaatatgtctgagcccctatggagaataagtagtgcaatacccaaagacatttaactgtctctgagaggcaagaagaatctgtgttaggggtgtggctctatayatagagacattaaattcatagccaaaagggtaatagtgattattacaaaattcaggggtaacaagggtgaaagagaaaagagagggatgagagaacgtaatgtttccttcacattctgtttctgaaacaggattcaagcaggacattgtaccatttggtattcattattttcgttcacgcacatggctaattatttctacagcattcagatctctttaaaacaaacatgttttgcacatacacgcccacctttaaaaatatgccttttatccccttttccacagccttgaggaaatatctgatggattgtctcaggagcagtgttttgggaataaatgtagattatatgctaaaaaaacgtaacttgtcccctaaaacttgcataaacaaatcaaaggacattgtagcatttcgagtataaacaaaatgactctcaacttaacttgcagatctttttttaatgttcagtaataaattttactcccagaagattacactgtcctctctcttcccaaacttctcctcctcctacaatcccccagttgttttaatgtcagatgcataattcagttgtctggcttgaactcattatgggaatcattacatttgattttcctgtgaggccagccttgactgagggtcttctgattctaaatggtcaatgtttctgtagtgtcaggaatcattctctgaaaatgcttcaccttcttgaggctgtgggcatgtggccatatgaaaacatgttgtgtgattatctggtgaaattgggggactcctcatccagcgaactaggaggttctgtgtgttccttcacctgaattgctgrgtctgacgtgtggatggcctttgttcccttgctgggtgagccgggtcagccctgctgtgtcttgtcataactgtagacattccgtaactggtgttcatgtaactgctggagcttgcttcaaaccaaggcagaaacccgtgaygatggagaccattcttgccttcccctcacattaaccagttcgtgactatggagaaacagggcaagtagctcttgatctgactggacggatggctytggagaccaggctctgaagagatgcttgtaaaaatctggagcttaacacaagaagcttaaaacaagaagctcctttaagtgttggagcttcagagaaaggagccacgttacccatttcagagcagggagattccagagaagtcacctgggtgtcggcttctgagcactgtcttctcacgctcacactcctcctgttcctggcccccacyctcccgctctcagcagttacccccattatcaccatcatcacttcgctccygcccggtccctctcctgtcatcacccccgctccggagtgaaagaaaggagacaccttaccacggctcttcccaccagcagcaccaggaagctgctactgccatttctatttaaatggatagggatgttgggcagagagacactttcggagcctgtaagtttaagtgttcagatcattctttgcagartataatgtgaacatcttgctcttgcttgtactgtaraaggttctctakcatatagatgtgatattcagtttatgtataggtttacatttcagcactaaatctcccacccactcatgtcgcaaacctttatggagtgcctactacatattagtgatgagcagtaggaataataacagctaatacctacaaagcactttcagtctgctagggctttgcatggagccgctcatttaagtaagcactcttctagttgccatgataccatctaattaaatgaggtgcttcacagacacaaatatacagcgatataatctatatgtatgctgttcctttataacggaatcttccccattgccatccctaccctgcctacttttctcagatcccttatcatgttatttcaccccaacagactttttctggaaaaatgattgcttactacatgtcagttggctgttcacagtttcagaaatacaagtggagaaacttggaaaacagcatctatcaacttctagatctaagctctctgagagcaagaactatgttttttcttctccatcctaaggccgtggcactgtgcctgatacatatttgataggtgcatgctaagtatgtgttacataaattaattccatgatgtgccatatgctaatatcctgtctagtaataactgctgaggacttcagaatatttgctgaccaggttgtcctggtgtctgatactccactgaaggacaaaacaaaattgatcattgattcaaggttccactaagagtaaataaagtgtgatgtggtatggaagccatggcataaataagaaaagttgatgctctttgacatgaattgatctgttcagcacaatctaaccaaagaacaaggcaaagttttccttcaagcatagaatgagttccctctgggatttataaagtggaccagtacagagggggcatggctcccacccgtaccgtttaaaactagttgatttttagtgtattctccaatttcacctatcttccccctctcagcaatctattacggatttgtttgctggaatgacttggagtggcaggtggggtcaggagtgagttagtaagcatttcgtttcatccccagtaaagggtaagatgattgaatcagtcagtctgctgagatggggccagagttacctgataaatattggggccatgccactaggtgaaatcttttcgttaagtgactctaaaataaaatcccaacctaaaattgctgagtcagtgggaatttctcagggaatccatgttccgctggctctagaaatgattttgattatgagacaaggtattttggcagcaggtgctggcttttatttaccatgttcagaacttgaaagtgtccagttcattaagttcaagagctggagtcgcttaaaggtagaccctgaatgatgccttaaggaccccccactgtattttcattacactaaaccatggcacttaggcagccagtaaagctggagtcagaactctgattcagagcacctcatttacagaaaataattccccaaactgaattgcctgaatttgactaagtatagggcaccattttaaaaatggcttcatgctgaggttctagattttttttttttkgagatggaggctcgttctgtcgccaggctggagtgcagtggcgcgatctcagctcactgcaagctccgcctccacgttcacaccattctcctgcctcagcctcccgagtatctgggactacaggcacccgccaccacgcctggctaattttttgtatttttagtagagatagggtttcactgtgttagccaggatggtctcgatctcctgacctcgtgatctgcccgcctcagcctcccaatgtgctgggattacaggcatgagccaccgcacccagccagttctagatattttgaggtggtaagaataaggtatggttcccctactgctcaaggatacttgtttctcatgtgccagggacccaggcrttgagcccaatagaaagccatagaaataagcctggatgtgatgctattcatgaatgtcacagtctccttaaaccccattttattaaactgttcagggatccactcgttcagattattcaacattttacgtgccaggcacatcatggtggtgggatatgaagtaaaatgtgacttggtgccttgtctccttcaaggagcttccagtccacaaggggctaacagggaaatgagtggtgactacagctaaaaggcagttgctcctgtcttcccagaatggcggtgataagctagaggtatacccaggagagacaaccagcaaaagtgtgacacctcaatcagcactgttgttttctttttcttttttcatatatatatatattttattacactttaagttctagggtacatatgcacaatgtgcacgtttgttacatatgtatacatgtgccayagcagagcaaggagttccaaaacagaattaccggttttcttttttttcttattgagacaaagtctcactctgttgcccaggctggagtgcagtggtgcaaccttggcttactgcaacctctgcctcccaagttcaagtgattcttctgcctcagcctcctgagtagctgggactgcaggcacgcatcaccacgcctgcctaactttttgtatttttagtagagatggggtttcaccatgttggccaggctggtctcgaactcctgacctcaggtgatccacccacattggcctcccaaagtgctgggattacaggcattgagccactgcgcctggccgaattattggttttcaaagtgtttcttcttcctcttcttcatactgtaagaacattcaaatgacatttgggggcttaacaccccttggctttagccagatgtgtccatggaaaaaaatgacataaccaaatagaaaatctctagaaacattattttacttttcatctgtttgtcagttctagtcaatgtaaagcatagactacagtcaaagggtgcattcagtcccaaaactgtttacaagcagtgtttagggaggacaatgggaatctgcctggacccaaacaacctgtaatgacctcatttttaaaaaattaccttttccttcccagctgtagaaacttcctgctgctcttccacatttatatagaattacctgtgtctacatctatatattaatcatttccacttacatgcctgcctgtaatgggtctattcagagtcctatatatctatatagccgtctatctatctaatccccatatctactattgtaaaatttttttctgcttacttcttttttcccctgtgtttcaactcattctgatctcttctcagcatcagagattatgtttatttttgtggctaaatcttggtctgcccaacagcaatctttaaagaaacaatcttggatgtytaccttttcttacctatgaggcyttggtgatatatggaaaaggggacctctatggcaagtttcatgacaggtctgcttgttaaaaacaacaacaataataacagttctaatactatctccaccttcctgaccacttgtcctcttggaggtcagctagatgctggcagttccctaggaaatgacattatattacccagaataccacattaattcagaacctgccacctagctaacttctggctctggcaccctatccgctgacccctttgcaacaatcagaagcaggaatgaatttagaatataacaaaagggcctcttggattttgttagttgatcaagaatctcagagacacttaaactatatatgcatgaaataaaataggccaggctgggcacggtggctcatgcctgtaatcccagcactttgggaggccgaggcaggtggatcacttgaggtcaggtgttggagaccagactagccaacatattgaaaccccttctctattaaaaatacaaaaattagccgggcatgatggcgggcacctgtaatcccagctactcgggaggctgagacaggagaatcacttgaacccgggaggtggaggttgcagtgagccgagactacaccactacactccagcctgggtgacagagtgagactctgtctgaaaaaaaaaaaaaaagaaaaagaaaaaaacaggcccaaacctctaatcaacccacatgttacatgttcacaaaaatatccaatgggggttctgacccagaatattaaagtcctggttttaatgagctatgaaatggggaacttaaaaaaattacaaatgtgcaatttccttttatatttctttgacttttaagaacaatctcatgcatagagcccaaactggagatctgtagcttttagtgactttgtctctcaattaccctgggggaagtttcctcccctgtcctccgacctgtcttaacagacacagacacatagcataattcaatagtgctgctgttattagcagcctctgtgaacccgagtaaccttgcatacaagtctcatggaaagcacacatttgccagttgctattaatcattgacatattgatagtgtgggggtaacactgcgtatgctgatactggggagggggcagagatgggaaaggggcagttataaattgctaagttattgtgtttatattcagcacatcttgcagccaagattctgtttctctytctctctctctctctctctctcwcwcacacacacacacacacacatacagacacacacacaatcagtgtaaagattctgacctatgcctggaaatacaatcctaagtctagataaaggggagagctaatgaaggctcacagttgaagttgtctgatttgtacacacccagcacacattcagactcgattgtataggtcaaattttcccagaaacatgcgatcacggctttttgagctcaaaacctgtggataattgttgcttaccccaatatcccactttccttcttttccttagaagtagaaaccttggttttgaggtagacacattgctgcccaactgaatgacctgatcttcttcttgccttgcaagaaggtatgcctagmcttgcaagaaggtatgcctagccttgcagctaggtatgcctagactaaattcttgttgacatgaagtaaacaaaaatgtggtatggttcctctggcaagtgtctttggaaagggggtaggtccttcgtctcttcctcctttctgctttctggaatggtaatgttaaaggctagagctatgcagccatcttgtatgtgagacataggctgaggcgggtgsatcacttgaggtcaggagttcgagaccagcttggccaacatgtgaaaccctgtctctactaaaaaatacataaaaattagccagacatgttggtgcgcacctgtagtcccagttactcgggagcctgaggcaggacaattgctcgaacccaagaggaagaggttgcagtgagctgaaatcatgccactgcactccagcctgggagacagagcaagaatctgtctcaaaaaaaaaaagaaagaaaagaaaagaaatatactacagcatggcagaatagaaaggtgacaatgtttctgagcctgtgcagtgaccataatcaccctggactgcttacctctcaaaaccacttttatgtgagagaaaaataaatgtctatttctttggcttgacttcttcttctttttttttttttttttttttttggkgatatggaactgaacctaatcctaactgttacaaatagaccttagaggtcataatagacttcattttacagattaggaaactaatgattaaagatcaactttgataaatgtctcaatcgggaagcagagttggcaaattaattacacttctgtttaatcttctttttctaaagatagatgatgaaggttctattttatatgcctatcagtatctgctaaatgaatacggttttatatttcacatgtctgtgaatttctgaacctctgaggtcttccaactggcacatctaatcccaagtcacacatattcaaggaataagctattaaataataaaaaatgtgatgaggaatagtaatgaacagacttgagaaaattttcttttcctgctatgttcattagattccacatgtcttaatctgcatcttagtacataaatctacaaaactatattaattttcactggtattttagaaagtgctaaatggagattttcaaatttgggtgaaaagtcagtatctggaatgttgaaaggtatctttacttcaatatgtgtgcaagataatctatgctgtagctgtaaaatatatccctggatgcttttacagaataatactgaaacactctctgaaactaatggatattgctaaactgacaaaactcacttattaaattcaattaatggggaccaataaattaaccgcctcttcctggtgttcgtccgtgccccctcccaatcttcactcccacaaatcatgcactagccattaaaaatagaaggaaactttcttcctctatgttaaagtaacttgaaatcatctaccttgtcttctaaaactcctctcttgttgctttctaaatatccaaatggaaaatgatcctggaggaatgggcagtatgtggtttcccctattctactagtctccaacccacacagacaaagaaacccgatatccaacagaggttcttccctccttcgtacctccacccacatggatgaataaacctgatctccaacagaggttcttcctttgggccttccctcacggttatggcccaaaaagctagaaaggacaatgggcatcctttcagataaagaaatacgctacagaaatgagcagcagaatcacagtcctgaactctgcaataaatttttactcatgcggtaaatgcccatggacaggggttaacctctagcatttgcacgcagccacccgttcgctcttggctcctggtaagcacttacaggcatttaaagatgtgcaaagggtataagtcttcaatgctctctgcccctcataagcatctctgataatatccaacatctacttaaatgctagcttaccttaaagataaactctccttctttatttcattccaccaggactgaaccctgacttgggactatttgccttgaaaaatgagttttctccagctctgcagaggatggctgctgtgtataatggtctctgaaatgctaacggaagccaagaaatcacctgacatgaactatgaagctattagttatgaaaagcaatatcgatatttaccttctaactcttcatgctggagggtaaagcagcacaacctggacgtgcctggtgccgagccaacataaagagaacatctgcatcttccctcctctaccatttttgaaatggaaataatgcttatggtggtaataatgtggtgactgtcgttcaaagccccttcacacacattatgatctgatctgctcctcccaggaatcctgcatgaggtggatatcatgaatgttataatgtccagaagcaggaactgatgtagaaagttaagtgatgttctccaggcgaccccgacagagcctggcagggctgctgctttgaccctggagttgagaggaattgttctttccacatcaacccccgccggacatatttcaaaaatgcaactgtttttcatttgggtctatcttttctttgctaatagtaatcaaagatctaaaagctacagatttatcaaagaactgaagctactaaaattgtttgcagtgtcgtgaaagaaactggcaaacacgattttaagaaaagaggcaactgtgacagaagaaataaaaacttgtgtttaggttatcttcaaaactaatatttctaatgtacaatgcacaactaagatagcttttttctgatataaaaataaagtgtgatcatatgtggaaacacagaaaacttaaaaaatataaaactgctcctaatatctccaacatgatatatccactatttacattttgattgtattttggcatatatatataattttcttttttaaagctcacatatatctatgcatgtttacaaagttagaataattctgaatatataattttgaatcagttctttcacttaacattgtattgtaactagaattataaactagttttttaaagctagttaaaggaagaatgaagtaaagccagaaaaaccttaaactacagtttgtaactaactgtaaaatccaaaagcacttggcaaatggtaaggaatttggacacataaattaatggagctaaatattaatcagtgagcaaatattaattgagtcttaaagagctgaaattattctaggagccatgcctgggatgtcgtggtggctaagatggagtccctactattgggagcatagagtgtcagaaattaagagaatgcaataaattccagtagagatgggctcaatttgctttcacaccaactagaatggtgtgaaagaatggtttgcaaagcaaatgaatgatgcataccatcgtctaagaatagcacttaatttacttacaagaaggaactgttttaattggtttaaaaatactcactacacacaaatattttgttaattaaaaatgagtacctatttgaacacttatgtgaactaaataggagctaatacatgagataaaaattatgtagttacaatttttttttttttttgcttttcattaattgaatcagactggactttctccaagcatgtgaatgagtgaggatttattgtaccatgcaaaaacttaggatctttacaggttttattatttgtatttaacactagttccatttcagctggtcagataagaagaaatgtgatagcaaaagatatgcaagatgttaatctgctcttaaaaaaaagaaaccaatatttgacctgaattgatacaagtgttttcttttttttgagccgagacagggtcttgctctgttgcatctagagtgcagtggtgcaatcatagctcactgcagtctcaaactgctggctcaagtgatcctcccatctcagcttcctgagtagctgggactacaggcatgccactatgcctggttatttatttttatttttatttttatttttatttttatttttttcagtagagattgggtcttgctatggtacctaggctggtctcaaaatcctgggctcaagtgatcctcctgcctyagcctcccaaagtgctggaattacaggcatgagccaccatgcccagcccatacaggtgttttaatttggtttaatcccaaatgtctacagaggtcacaggactttacatatttctttgacttctttctctactggatcatgtgttattgtaaaatttctttatgtgtgattaaacccagggcaagccagagtcaataaatcagttacatgtatgtgatattgttgatacacatttttaaaattgctttttagaaaatcaacaaattaaggcactttgcaaatccaatctatttttcttttataaaacaggaaggaatattagaaacacaggaagttgaacatctcagtaaatgccaagaaggagattgtgccttggaggaaaggttggcatggagccagtatccttctgtgcccttggtctcaccagacccagggccagaccaataagaaagaagggaaaagggaaattaaaagaagccagagatatggacagaaacaagaggaaggagagaatggaaaagaagttgagagggaacagaaaagaagtacacaggtagaattggtgggtgagctgtggagaaactgcaaaccgagtgaaagccctctaacactgaaatgcaataagactgcattactccatcccatgctcagccccaaccatgcccatttggataaaatggattccatttggtaatggttggcaataactgtcatttctgaaatgccaagggcccacatatacaaccagttgacacctttatagtagtatttatagctcagacactttaaaacatgactgtgggctgggcacagtggctcatgtctgtaatccaagctctttgggagtmtgaggcagaaggatcacttgagcccaggagtttgagaccagcctgggcaacccagtgagaactcatctctacaaaaaaaaggtaaaaattagctgggcgtggtggcacatgtctatagtccttgctactagggaggctgaggcaggaggatcacttgagcctgggagacagaggctatagggagctgtgattgcacactgcactccagctggacagcaaagtgagacactgtatcaaaataaataaataaataaatmaacaaayaaacaaacaaacaaacaaacaaataaatgaacctgtggtagagtagagaatgtagagacagaagtttatgtggtaggaaggggacatgtgatacgaggttgaacaagaggcccaagtggagggacacatagggccatgtaggtgtcctgttaactccatggaggaggtttctggggatgtcccaggccatgttgcctgagaacatgtctgcctgagactcattctattcctgaaagtctgaaaccatcagttgtattcttacattgattatggttcaatggtatggtttctccgtataaacgtcctggccaccatttagaaatgatccataatttcttgtttgggtcttagtttttccacttatacaattttttacttattttattttctatctgcttcacgggcatattaatgtgtatggttaacaagcaatcattagcagttaccaagtgaaagacaaatggcagatggaaacttttgatctgtcccacacacgtgtcttggtgaaggtattcaggccactccaggggccagtctggaagccatatctgatcaggttagggcatgatatagtttggctgtgtccccacccaagtgtcatcctgaatcgtagctcccacaattcccacatattgtaggagggacctgctgggagacaactgaataatgggggcagtttcccccatactgttctcgtggtagtgaataagtctcacgagatctgattgttttataagaggtttccccttttgattgcctctcattttctcttgcctgctgccatgtaagacatgccttttgccttccaccatgattgtgaagcctccccagccacgtggaactgtgagtccattaaacctctttttctttataaattacctaggcttgggtatgtctttattarcagcatgaaaacagactaatacagggcatcacacccaaattagacctgtttctcctctacttccatatgaactctgtaatgcttttcctattgctgataacaacctggttgcagaccaacatgttatatcaatgttctgtaaataggcacatgttacataaagcaccacggcataaaccaggtgataatacattgtaatgacactctaaaaatgtagtaatcactcaataaaatccttagcatctgctatatacctcgaattataccagaagcttttaggatatgagcaaaaaaaaaaaaaaaaaagacatagaccctgctaaaaaggaacttacaatccagcttgaagaaataaagcccacacataaaaaaattagggaacaagaccatattcagttaagtgcaaaaattgaaaagtatgctcrattagcaagctagagggtttattagaaataacagtagcttaaaaacttccctactataaaaaccatagtttaagcctgctttaacattagatctggtttcccacaactgattaacctgaaaatggtttagcacaacactaatcctttaatttaacaacctataaatgccgtatataacaagttccacagagccctttcttggattcataatgataacctgcatctaccacactatccaatgttcattttaatgagcacctctggactttaatgaacaatcttaggtctaagtgagcatcaattaaagagaaaatgcctccaaaggtataaatggtgatgtatcatctgggttagcagggttgaaaggacacctgtgagcatcgtgaggtttggatggcaagtgtgcccccttgatcagcagctcccacctctgtctgatayagagcgaagctggggcctgggatgaaagaagaaagccccagcacataaatattaggggaatgctatagaaggaggaattctgaaagaagagaaatacatctgagcaacacagaattgctgcagagttacctgcacgcattcttacagttttccaaggacaagaggagggtatggcattaacccgagcccctgaatatgtctaattctgtaggcatgcaaatgagaattggtctgactgactttgcggcagcagctgagccctgctaacttcccttcagaactcagcttgggctagcaaagaaaasacgcccactcacccacctaccccagcagctttgcagaagtgctgcagggtgaagacaatgaagaaaggcaaggctgaagaaagccgaggcattctgccctctcccagcaaagacagcctggacgtgttcagaccctatcgccgcatcaaaagaagaacaccaaggagaaaggagtcacaaaagctctggcatgatcaggaaggcacctggatttgaaaaggatatattattgcccaagcttaacttcactgatttccatgactaagccacttgacagaaaactcctttttttcaatttaaactttaagaactacagctctgttacttagaatccaaagcaaatatcatcaggacaagtgtctctgaggaaacagctgtcaacaactctgcaattcctttatccactacatgctaacacccatcctgagcccagcgaatgtccttctatgcctggttacaaagattggggcattacaaaaattcatcattcccccttctctcaccctgataatcacagtagtttctgggggacctagatggaaccctttattaaattttggaacatgagaaaggctgggtggtacccacttgtcatttgtaagtgagtgctggataatttccatcagaccacaatgcttgtatctttatttttttttttcctgctcattgccttcctatgatactaatttaagagttctttcaaacccaaatttagctctgtgtgcccacctagattgctctgggaattgaaatagtccaagctatttgctttggaaaatatactccattgtgaatgaaaggcctatggccaaggtgtttccttctggcacaagaaaagagaaaagacagaacagggaaggggcagggggaagtctgataaaaatggactatctgttcaattacctacagwtttcccactgggctttactttagaaagttgtacaggttaatgctatccacaagccctgggcactggtgccccatggcacagctgcctgcgggatggcacatggtacactaatagcacacttattattagattttctgcatggttacataagcctacaaaagggaaaaatgtaaatgattcaagaagatattcttcatgcggttctcatgaaatctttaatatcttaagacttaggaagaactctcctggcaagatacgatcaattttcatgcttcattaggaaaaaagccctttcagtaatgttacagaaatggctataggcaaaagagagaaaaaaattacactctggactgaacaaaaccccaaggcactttggactaaatcctttctttgtacccacagcatatctgaaaggagaagcaatgctcacttggggtgtgtggggattgtattttgactagyctgtctacccacagaatttcatttaatctaggtggagttgttatcaatctgtttagtctttcacaaatttgaagggactgtagcttaaaccaacaatcaccctcaaagcattgcaatgatatgaaggaaacagctgacatggggcctgtggaggtgggaaaatggtggattggagagaggccatatacacttgaatttctgcaaaggcagaggcaaattatgtcaccttcccgctttccttttcatttaaaatctacagcttttcaagacaatttccctttatttcaggagaatcgagaatacaaaaataaatgtcttaagcacaycatttacattatttttttctgacacttgaatagttgacaaactctgaaatcacttcttttaaacctaatgttgataccaaattctactttttggactcaaaaaaacagtctttagaattgttcaatttaaaagccttgtcatactgtagttatatatactcaaggaagttattgtatgcagagagctgcagacattcttgaaaggtaaggagtatacaaagatataacctgcaggaacctagcaatctagcttcaaaatggtttcattcattcattcattcacacgagcacttccatcaatttactttcagtatccctcatatatgggattagtgcccatctataagggaccccagagagcgaccttgctccttccaccatgtgaggacacaccaagaaggtgtcatctatgaaccaaaaaaatcaaacctcaccaaatcctgaagctgctggcaccttgatcttggacttcccagccaccagcactgtgagaaatgtatttctgttgtttataagtttacggtattttgcttagcagtccaaatggactaagacactgccaaaagccaaaaatacatccacctcaaaggaagaaaagtttgaaaccattcaactggagtgaatgtggcacactcttgttctctgcctgggagaacaagtcasctgatatgagcctgcttttctgtgtgaagaatgtacagagtttgaaaagatccttcttcttccctcatccttcccattgctgtgcaccttcatgggtcatacaggttatatgagggtccggagggtcagagctgaacaggctacagccgctgttcaccaagagcccatggtctcgcggggagacagacaccaagaaaccatcacagctcactgggattagtgctccactgggggtagctgaatggtgctctaagagcagagaggaacaagactatstctgtacgcctgtgtgcacaggagcgggtggtgtgaggtggctgctgacaggaatgtggcacagagaagacaagatgtaagctgaatcctgaaagatgagcaaagcagttaccaaagacagaagggcagcatttgcataaacgctgaaaaatgcttgtaaaactatggcggcatagcataagcacacgcagtgtttgggagaatggccagtgatttgctaaggctccaccaggtctttcagggttagaacagagcatcatcacacataacagcacgtgtatgtaatatgacaagcaattgagctccatttgggaaactagagctctaagcgccttctgcctacttcatggcaaggagggccatctcgggcaccaccagccctctatggcagccatggggctcgttcatatcctcctggcccaccacaacctgtgtgcaggtactcaggccacactgcttccctttgtctatgccaggtggccttattcttcaaagctctggccaagttctaattcttgcacgtgccttacttgctaactcctacccagcaactcagaacattaactgattgtaccactcccctggtctgtcctaactcagatactgccttgtgtcataaaagcaacataccttagatttagataccatgctatgacttaccaagcactttataatatacattatacccttaatatccccagtaattctttcagataggcgttaggcccactttttagatcagtaaactcaggctcatgtaggttaagggaagttcccaggagcacagaatatgtaacttgtggagccaggactagaaaacaaatctacagattctatgaacagtgctcttccattacaccactgggcccctctcttgacwttatttatttatttatttatttatttatttatttatttagagacagggtctcactctgtcaccgaggctggagtgcagtggtgcaatcacrgctcaccgcagccttgactgccctggctgaaatatcctcccacctcagcctcctgagtagctgggactacaggtgcacaccaccacccctggctaattttttaacttttttgtaaagacaaagtctcactatatttcccaggctggtctcaaactcctgggttcaagcagtcctcccacctcagcttcccaaaatgctgggagtataggcatgagcacagtgcccagacctcctcttgacttattaagttattatgatgccgattcagcaagcccactactgggtatctacccagaggaaaataagtcattattcgaaaaagatacttgcacacrcatgtttatagcagcacaattcacaattgcaaaatcatggaaccaacccaaatgcccatcaattgagtggataaaggaactgtggtacatatatatgatggaatactactcagccataaaaaggaatgaattaacagcatttgcagtgacctggatgagattggagactattattctaagtgaagtaactcaagaatggaaaaccaaacatcatatgttctcactgatatgtgagagctaagctatgaggatgcaaaggcataagaatgatacagcggactttgggcacttagggggaagagtgggagtggggagagggataaaagactgcaaatatggtgcagtgtatactgctcaggtgatgggtgcaccaaaatctcacaaatcgccactaaagaacttatgtaaccaaataccacctgtatcccaataacttacggaaaaataaaataaaaattttaagaagttattattatgccacttattttgaataagtacacgttttacccttgtgatgcaacgcaactgaagaatgacctactatcaattctattcctttgtgtcctccatgacactctagaacagtgctatgcaagcagaaagtaacagcttattcattcattcattcaataaccatacactgaacatccaggaagtgctaaccaggtactgcactaggtattagggaaacagagatgagtaaaattcagttgagactccatgtcttgttgggaaccaggcacgtgtagaggtcactcttacgcaggtaataaatgactctacagaggcatcagcaagacgctggaaggagaaataagtcagcagcaactcactctgcaaagaagtgtacaggaagctctagatgggtcatttttgaacatatcctcaagatgagttttgaaaggataaactcaataagtggcttaaaaagtaagaaaagaggaaggaaaggaaaacaagaaagaaggaacaaaataggaaacttaggtgggtccacatggactgtacacatccacccagcaggctatagaatgtttctctcccaagggcaatgaattggtttagccacaggattttcttcaaaggaggtcctcaacatgccagygggtacttccctgattttggtcaggatgcaatccaggtgtacatcactggcttgtgacatctgtaatctgcycagatcacagatgcgcagaaacaaggcatcagattccctctgcttagaacagaagccaggagaaggggctgaatacatgcatctttaagattcatacccacggaacagagactctcctagtcatctgttcacaaactttcagtgagtgtctactatatgccaggcagaccacagtgcaaaaaattaagcttaataacccttaaatatcattctctggttccaggcctcttcagaagcttggctatttattatctaatattcttgtgagttcctgtgtctggatttctgtgtttaggctcttttagggagatagtaaggaactggcatccatgtgacttttttttttttttaaaagccttctctgcctgaaaatgccagacacatttcagatgtcaaaactaacgtggcattcagggtgggtgactgatccatgtgagtgctcttaagtgggtgtagaagcctgtctggctcattgtcttttctgcacacgcgcattcaaatgtgcacaggcttgtaggccataaatagctcttaggggagtgtgagattacatcacagactcaagagggccccgttacctcaaatcagtgaatgcttgacactcatctccccaaaaaggcatgctgttgaaaatgcagatactagactcaccctgacccccaaaaaactaccactggcaggcattgttatgggctgaattctgtccctccaaatttatatattgacatcctgacccctaatacctctgaatgtgaacttacttggaaatagggttgttgcagatataattagttaagatgaggtcatcctggaggagaggggttcctaatctgacagaactggtgtccttgtgaaaaggggaaatgtgggctgggcgcggtggctcacgcctgtaatcccagcactttgggaggtcgaggcaggcggatcatgaggtcaggagttcgagaccagtctagccaacatggygaaaccctgtctctactattacaaaaattagcctggcgtggtggcgggcgcctataattccagctactcgggagaatgagggaggagaatctcttgaacctgggaggcagaggttgcagtaagtgagatcgcaccactgcaccccagcctgggtgacagagcaagactccatcatgaaaaaaaaagggggaaatgtggactcaggcacacaggcagagtgctctgtgaggactggagtgacagagccacatgctaaggagccaccagaagctagggagtgacctggaacagatccttcccgagcatcttcacagggagcatggccctgcccacaccttgatctctgacttccaggccccccagctgtgagacactcaatgtctgttaagtcacccagtttctggcactttgtaatggcagccctggaaaaatattacaggcatataatgccgtttgtgtgtgaaggaatgacttcatcatccagtggctggaatttaattatkatgtgatgctatcaacaacattcacttcctcttcacatatattgtgcccctcacctgactgcaaaattcccattgcaagttaagacaggtgccttacacagtgacctgagctgcctctcttccagaagggacaactctgccagtcaggttatccacagtgaacattacagcagactccactatttctcaggtatctacgtttggtagatacttctcctgctccttgagaagtccccagtggtcagtcatggagagttattattaaagtacccaatctaagagccactgacgtttctatactgatgtatgtctacatttatagatttagacatggagttatacagaatgaaagtttattcaaatagataaaaacatcccaaattgaagttccactaactagtaattggctattagtaattctacccaaaacaaattaataattcatttgggccaggcctggtggcttatggctctaatctcagcactttgggaggccaaggcaggaggatcccttgaggccaggagtttaagaccagcctgggcaacatagcaagaccccatctatacaagaagcttaaaaaaatagccaggcaggagaatggtgtgaacctgggaggcggagcttgcagtgagctgggatcacactactgcactccagcctgggcaacagagcgagattccatctcaaaaaaaaaaaaaaatacccaggtacggtggtgtgcacttatagtcccagcaacttgggaggctgaggtggaagcatcacttgggcccagaagtttgaggatgcagtgagctatgatcrtgccagtgctctccagcctgggtgacaagagtgagactctctccctaaagaaaagaaaaagaattcccttggaaggttttgcttttttagaaataagattagctaagaaaattaataatgcaaagaagttaggggtgggtggggtgagagaacaggaatatttaaactatttttttaaatccaaaattgttttaaaatagtttatcccatttccattcctccataacaatgaagatgctgactttcaacgtctgttactgtagcctaggtagagtgaagggtggtcatccaagactcacatctagagcaggggtgtccaatcttttggcttccctgggccacactggaaggagaaaaattgtcttgggctgcacataaaagacactatcactaatgacagctgatgagctaaaaaaaaaataaataaacttgcaagtcttggccaagtgttcctgggaaggcctggatggcagaggtgaatgggagggggggagtggggagggtggaagtggggagtagggagcatggcaccatgctcagaaagactccctgaaagccttgttactcctctctgtcccaagttcccttttcccaggacgattgctcttcctcccatctcgccctcctctcttacaggtccctataatggctgttcttatgttccccactccctaccccgcaccatatcttctcttaaggaggaatttggcctaatctaagtttaatcattracctttctgacctcacaaggaatagcaagctaaataagcacagaacttgtcctccttagatggtgaggaaagagaattgtaaatgtttatgacttgctatatttttctttaattcatggaacattttatattaatgtaaaaagaactgggaggactgttgggaatactctgtcataccagcatcattccacttgagccctttatgctataatattaaatgtagttatatatttcctattttccttcttttcaaactataaaacttagtctttcacgtaatgggagaggcgatagaatatggtgcttatggtaaatgctcaatatatttatctattattaatgataatactggatttatactgaaataattcaccacttattaaaacacaattcttaaaatataagttgcccttccccaccacacacacttttctgtttgtggtcattagatcatgctactaacggctttgcctaaacaatttattcatttaacatctacacaccaggcacccagctagtctggggacaaaaacgggtaagacagcatcttttctgccccaaagggatgatggaatggaggmacgaggacattactttgacatggggcactcctttggccaatgaagtaaaggtcagtgagtgaacacacaaagaaatgattaacctgtcatagaaaaggtcatgaatgtagtgccagctacaggatacttcactttgctctcatgagatttggtcagtraaggaattatccgtgtaaagagaaaatcaggagcaaccttgccagcctgtgaacaaaagactagccaatgccacttcttaccagcaaggtccaaacagtcatgccaaggttatgtggggtatgtagaatgtgttctctctgtaccctgtcttgaattctattttgcacatccaggaaagccaagaaaygcatgcacctgattgcaacatatatagtcatattttgataccacagtttggatggcaagattattcaatcctttttcctatcagagagcttcatctgttttctctgacttctccatggatccacaacagtcaatgctttaaaaaatactcaggacatggaccaatacaaaaataaaggtaatcgtgattaaacaactgaacatggaataaggccacagaaggttctctaaaaagagtatctgaccttgctcagactggtgtgaccatgagatatgagatggaacaaatggcacagatagcaaggaatgcaggtgtgtggtatctcttcatattcattcccacttcagttcagcctaayacttcattcaccaaatgagtgatcaccaactgcctactatgcatcagacatataaaacagamgatctaaaagacacagttcctgttctcaaggagctccattgatatggttggcatttgtgtccccacccaaatctcatgtcaaattgtaatccccagtgtttggaggaagggcctggtgggagatgactggatcacgggcttagatttctccctctctgttctcatgatagtgagttctcatgagatctggttgtttaaaactgtgtagcacctcccctttcccttcctcctgctccagccacgtaggacgtgctggcttccccttctccttctgccatgattgtaagtttcctgaggcctccccagccatgtttcctgtacagcctgtggaaacatgagccaattaaacctcttttctttacacattatccagtctcaggtagttctcatagcaatgtgagaagagactaatacatctgtatccagtgtgcagagatggtcaagagaacagacactaaaaatcttacatatgagtttcatgggtgggaagcacagagtggctcagtgagaccaggrgggaaaagttagggtgggctccttggagctgatggcagggttgagttttgaagagtacacaggaatgtgtgactgcatgtgatgtgagagggaacattgtctagacagaggagggagctcatgcagagtcacataaggggacatgccacattcagggaagcacaagtatggcatgccaggaggggaggaaggaggtaacgagtgcccttctctccccaagatatctcttgaaggtatggagaatctcagaagggttaggcaggaacattttttgattaaaaatgtcactctggtcatagagtagaagatggatgagaagggaccaggttctacaggcaaggcaaacagtcgggaggaacttgctgcaatgccactgagctgtcatcaggtttggcctgctgcaggggcagtaagcatggagaagaggaggcggacaggggagatgtcccaggcagactcagcaccaaggctgctgaatggctgggcaggggcacatggaggaacagcataggggcttctggcttggctagtgccatttgcacaagagatatgggagaaatcatggtctagctcctttctaactcagtgccttaatttctcgttttacttctaggataaagtttaaaatctctaacttgacgctgaaagttctctacaatccccctacatgcagtaggtactcgatacataccagttgattcaacaactgaaacaaacacacaaaaataactttctctatctaacatatcaatatttttctgattacaggtttggcttactactttgcctttgtgaaagaagagaaatagcttgcaacttattcaaagaataagataagtgcaaacatttttctgataacgtgctaatctcaaacacattttctctcctgatacagggctacagtgtgttcatctgattatcaccaacaatcattcctaatcattcctatcttactctgggttagggtctctgtcctctccttcacccttaaggctattagtcttcacgataaaaaatttctaggtagagatagatgcttggggttctaaaagagcaagtggtaatcctcacatacgatgacacattccagcctctaaagcagtctgcattacaggatcattattattttttccagcaaagaagccacaattcaggaatctatgcaaaaataattaagtgaaggttgctccatcaagtttccatcaatcactcctccttgccattctgcccttcctgagatgacaacatgtcagctgctttgaacaagatctacatcgcgttctctgcattgcacttgctgctgctttgtagtctgctgggtagtggtgacagcgcgttaaccataaaaaaatggggagttcaggactggagggggctgagaacattttaacatatttgcaaaggcacaagattgtaagaatagttatgctgagaacttaaacttttgctttcagatcagactgaactcttaacacttttacatgaaagaaatgcaaggagaaacctatgataaaaccaatacattaacatatgtggatatcgtgtgcctctagaaagtcaggagagcaaatgtgggagctccttgagttattctgatctgctgcacaaggccaccagggctgggtctctgacactgataacaggtctctggtgaaggaccttgtgtaaagagtataatggtaacaaaaataaaagaaatgaagaaacgcatattaggactaaaagatgtacatagagagaaatgagcgtaactccttgggctcataggctgaatgcctctgaacatgaacaggatgttactccttcaaatcactttttaaaaatattttgattatttttaaaggagacggggtttcactatgttgcccaggctggtctcaaactcctgggctcaagcaatctgcctgcctcagcctcccaaagtgctaggattacaggcgtgaactaccgtgcccagcctcccctatatcatttttactcccagggctactatttctttgaggacaaggactgtgtcttagtcattgtagtatgatgcgtctaatagtacctgacacatagcagatgcttagtgcatgttagcttgttaaatacatgcatctggcacaagggatcaagcaaatctctgaatgacagattgactaggaagagcgggagatcaatgactcaatggtggtcacggatcagcactctcaactaaccatgagaacccggatgaagtagaagctaggttaagctgatcttttcccctcctcattaaattgccattgctccctatagggtcatcagaaagcctggatatggcccctgtggaggcaccacatatctctgaatgctgagtaaaacagataatgtagagagacatgaacttcttcactgaaagttcactgtggaagacctctccatcagccactgagagggaggtggtgccctgctacttgggtacagaagtcaaactcagactatgcttgctcgtgattctcaaacaaggcaggggttaccctcccagggacatctgaaaaggagtggggccattctgaatccttaaaacaacttggaaacattgttgggatgagtaggtagggatgaaccgggagtgcttgttgtgttgtcatgagcgggagagctctgcatagcagagggccgtcctgcctgcttcgttatgaaacactgcaactttaacgaaacactctctagaacagatagcattgtcttagggttcttctgtatttaattcttccttccacataaaatatcgaatcaggctatcagatatctcctgtcaaaaatataatacctgaggatatctgcaataattttaatagttaccattgaccaaacatccactacatgccaggtagtgtacaatacacaactaaatcttaacaacaacaacaatgaatttagtggatactttttaaaactcccaattgcataaaytcagccagagaggaaaaaagcaactaatctaagcaacttaccagtcagtggaggagccaagatgtgaatccaggttcctccgaccccaagtccatagatgtgatcattaaacgacaatcttggttttcatgatggccaataacccaaagcctactatgcacaggggagtgtgaagatcccgagaagccggggcagagccttgaccactgacagtctcttaaccaaagaatctgcagtcacggtgaaaggggctgcaggtcccatgcartgctgtcagctgcaggcctgggaagagttccatcagcagtaatgatgaacagcttattatgtgtatctatctcactgccttcttgacaggatctctgctaccaaaatacagaactttcctgagagtgattcttcacataaaaacacatgaaattcctcaaaaaaactgaggatcaagtggtggtttctctgagtagcactagattgtctgcttccatcagacatatggactctcctaagacccgggaagaccacaggcaggtatgcttttgaaataaggatgcaggagaaattctgctacgtcaaataaagtgtattagattaggtctagtatttatcttctaaaggaagtctgctgtcctcacagttgggaacttcacatgtgatttctatcagcattttatggaccatatcagaaagctggcatgattcaataagattcagaaaagatgagaccccaggaggtcatgagtgctaaccacagcccagctagtggaatgctatgtgacctttagtgacttgttttaacattctcatgcctctgctcatgggttactgaacttttctaatccaagggtctctgcatcctacagtctgtaaagctaattcataggcttgctgcaaagataaatactgctttagattcaagtaagctctggatatgactgtaagaaatatataattatcattatttaaaaaaaatagaacaagagactttctattttactttgtttatactgccctcctgaccaatgctgtcttcatttacttaattaccatccatcatccttgtcttttcctgagcactatgtgcctaaattaaaaagatgatagtggcccggcgtggtggctcacgcctgtaatcccagcactttgggaggccaaggcgggcagatcacgaggtgaggagttcgagagaccagcctgaccaacatggtgaaacctcgtctgtactaaaagtacaaaaattagccgggcgtggtggcacgcgcctgtcatctcagctactcgggaggctgaggcaggagaatcgcttgaacccgggaggcggaggttgtagtgagtggagatggcgccactgcactccagcctgagtgacagagcgagactccatctccaaaaaaaaagaaaaaaaaaaaaggaaagaaaaagatgatagcatcccttggtagcaaatatacacggaaaatttccatgtggtttatgcagttctaaaagaaagcracagatattgcatttactgtagacccacttcccaatttcatttgacttccttttgccttgagagtccttaattttcttgtcttctttaggctgtaagactactgaatgaatgaaggggaggcagcagtagtcttggtttctgaacttatcgacaatcctttcactacaagaactacgcagcagataaaaagcgagcatgtgacacaccttctgctcattttccttctggaggaaaagaaaacatagaagcaaaattgaaaagggttaatggaaagcactaactaaacattcaggtgtaccctgactcacataggcactgcaatcgttctatttcaaataagtgggaccagcccacagggctcacaggttcattgcacacaactaaatgcttaacctgttccttccaacagcaggtgtcatgtgcaatgacatgactagcccaggatcagtattaagagtcctgtgtacgttcaccttttgtaaatcctctcactgactcactgcaccaagctatgttcttgctattcatttcccaaaattagatttccttactgcaagaaatacatacagattattaataggcctactccttattttaaatataaggatagtgaagcttgttcaaggtgacataaaaagtatctgtaatgtctggctaacacgagcttcccaggctttaagttagcagctggtcccaaactacagactcaagtccaccctactgctactagtactctaactgtgagatccttgacccatagctctgtacttgttttacttcccaagaacttctggcaatggtaattctcacctctgaatgctgatgttttttcattgccatgttttcagtatctgttgtcctatcaccttcctggctaatctttattaccctccatgccctgcatcttgggccccactgagagctttgctgggagtatgcatgcaagcatctttctctcatacactgcactgcctttgggatgcctgagttcatactatttccataactgcccatccctgaaatagatgaacagtggccttctctctagtttagaacttgggttgttagactccttgggtctatcttagcttctctccctgttttcagtttggattttctacctccatttggcttatctatctctagcgtcatatctccctgatgatccgtggtagtggcgttaatccatttacgaaaaacaagacaacatagattcaaggagtcaaataaacacatmacacacacacacacacacacacacacgcatgcacacaagcaatgaagatggaacagcagagagtacaccagacaagaagccgtaagtgtcggttctagttccaattcctctccactgcagcatctcagatgtaaactggcgtcagtaacaggtcctgtcatccacctcccaggaaaattgtcaaagataatagttatggccaggcgtggtggctcacgcctgtaatcccaccactttgggaggccgaggcaggtgaaccatctgaggttgggagtttgagatcagcctggacaacatggataaaccccatctctactaaaaatataaaaaattagctgggcgtaggagcacacgtctgtaatcccagctaatcaggaggctgaggcaggagaatcacatgaacctgggaggcggaggttgcagtgagccgagattgcgtcactgcactccagcctgggtgacacagcaagactcyatctcaaaaaaaaaaaaaaaaaaaaaaagttatgaaggtcttctgaaaacaagaaaacactattcagatgaaaactattatatttatagattactattttttttwwaaaaaaagaagctcttctttgaattacctataatgcaacagcagcaccatcaaaattgtgcacaattcaatcagaggttctcaaacatggctgcccatcagaatcaccattgtgccttttaggaaacacagattctcagacatttgcagtctctaatggccctggattttctgggccagtgcacaggtaatggtattttttaaaaacatttcccccaagggattctgatcagttaggtttgggatccactttctaaaaataacatgtttctctgtgacggaggaaatttaagtataactatgattcatgaatttgttatctgtttttttcttcagaggatatcagtttaagtgttggtttttaaactgtaactctgaaggcaaacaactggcaagagagagttttcaggaagaatgctggctctggaaggcagcrgaaggttctggaaaagcaatgtgtcctatgaactagacttttcacctgtaagcatggcaggaagaggctgtgcaaggtggtggatgactacagggctttgttgtggactccaggcctctaatccctttcagtctttttatttctctgccctcaaagcccagcagcctggaggggagaaggcagtgcccttgactgcagcctgatgtttcctcctggcttctggtggcctayggtctcctttactgtaggtttctggagcaaaaatccagcagtcaggttaccaggatcagtgacaactatgcaataattaggggcaggcaccaggaggcagagaaacagagctgggtggcagaaactctmtgataccccaaaggaaacatcaactcttctcagaggtggtcaagaacatgccagaagctttgcctgcctggttggcagcagaaatggcactagccagtgatcactcgtaaccttgctgccttctttacagatggctgctgtcaggctgtttaatttggaggaaattccaatgtcatcagcagagacatggcattggggagggctgccaagcacaaagacagaacttggcttccccagctgatacccatggatacagaaacaggctagtcttaacaatcttttagacctgaccttagtagcaaactggataactgccagtcataaaagtgtttctaaagtggcctgattttctcccctcctgttaggatcctggatgcttgtaatgctatttatcaatggttattttgtgcttactgatgtgcagacattttttccaacccattcttttytttttttgagatggagttttgctctatagcccaggttggagtgaagcggtgtaatcttggctccctgcaacctccgccttctaggttcaagcgattctcctgcctcagcctcctgagtagctgggattacaggcgcccgccaccacacctggctaatttttgtatttttagtagagacagggtttcatcatgttaggcaggctggtctcgaactcctgacctcaggtgatccacccgctttggcctcccaaagtgctaggactagaggcatgagccatcgcacacgacctcaaccattctttatctctaaactcacaagacagtggttctcaaagtgagtcacccagggaaagcggcatcatgatcacctgtaaacttgttacaaatgcaaattcttgggctttccagcaatctgtgtttgaacaagtcctccaggcaatgcccatgcacttgaaatttgacagtaactctcataagaggtcacatggctccccttaatgtaaacacaccaaaatgaagtaagaaccattttcttttaagaagtttcaagaccttcagacattttattcgagtaaattcataagcaaaacacaagcacatattgacttttttgcttaataaatatgattttctcagacccactaacagatcacatgtttcacccacacaaaatagtgtatgacttacgaatgatcacagagaagaatcacagtggctttttaaatttttaatttatttttattttattgtatatatttattttttttagagacagggtctttctgggttacatccatagctcactgcagcctcaaactcctgggctcaagcaatcctcccacatcagcctcctgagtagctaagactacagagatgtacaaccatacccggctaatttttaaatttttttgtagagaggagttttgcttttttgcccaggccgstcttgaattcctgacctcaagtgatcttcctaccttggccttccaaagtgttggaattgtaggtgtgaaccatcatgatggttcatagtgagttgtttagtttaaaatatgtgactctatctctacattatttgcctacaaatatgtctaccaaattcatgacatatgaccagtgtgtctgaatacataccagtgtttatggcactgacgttttaagtcctgttcggaaacacaaaatgcactacttagcttccatatgtgactaattttaaaatatgctttttaggccagacgcagtggctcacacctgtaatcccagcactttgggaggccaaggtgggaggatcacgaggtcaggagttcaagaccagtctggccaacacagtgaaatcttgtctgtattacaataaagtgtaataccttttcaacatgggattctaacatggaatcacctttttttttttttttttgtaattcgtgcctccctcccctagttttaacctatgcttggtccaaatatcatgggtctatgtttctgtggtctaagacacttctttaagataagcccgatgcctaacacacatctaggagtaagttaacaattctgaaatactggtttctttggcttttagacctgttgattgttttggttataaaggtctgcctttaacatttttccttctgtgttcctaactaggcctctgagtctccactgtcaaaatgtggctgatcagactttaggcaaccctcacctcaacctgtgattatggaaggaagtacaggacatcttaacactccttcccggtcacgtgcatcatgaatgagctaaaatttcaatcttttgttctccaccggccattttttcccgaacccttaaggatagatagccagaaaaataaataaataaatctcttcttgggaatattttctagaatgttttcattttaaaatttaatttcattttattccattgttaattgacatctgataatttcttatatttatgggctagagtatgatgtttcaatacatgtatatattgtgtaatgatcaattcacggtaattagcatatttttcacttcaaacctttatcagttctttgttatgagaacattcaaattcctcttgtctagttttctgcagtcttctcttaaggaccaaagaagaaaataaaagaccctataaaattcagctctgtttaagtcctatcttttaagtaactaaaaagttgaatactagctccaataactagatccataaaccatttttcaatactaattttcttagccaaagagatatgcagtagagaatgtgagaccaagagtagacagccagtccaaagtccacagaaataaaaatccatttatgactgcattttccacgctggctttccaggatggtcctgaacttgctaattcatggtataactttgtactgtaacacagccaaggagaaacagtagcatgttggagccaggtctgtgagagctaacagttaagcttgacagccaagcgttcaacatagccaatgttaaaaattaacttatataaacttatggtttaataaattatattaaaaactcctgaggcgaggcggatcacccragatcggggagttcgagaccagtcggaccaacatggagaaatcccgtctctactaaaaatacaaaattagctgggcatggtggctcatgcctgtaatcacactactcaggaggctgaggcaggagaatcacttgaacccgggaggtggaggttgcggtgagccaagattgcgccattgcattccagcctggccaacaagagcgaaactccgtctcaaaaaaaaaaaaaaaaaaaaacaaraacaaaaacaaaaactcatcatcatccctcatttwactctatttwactattatctgtatgactgaggttaattacwtctacttgtatagtggatataaaktcatgcaccacataacaacatttgggtcagccgcggattgcatatgtgacagcggtcacataarattataatggagctgaaaatttyctactgcctactgatgctgtagctgtccaatgtaatagtgtaatacattactcatatgtttgtggtgatgctggtatatataaacgtcctgcagtgccagtcctataaaagtatagcacatgcaattacgcacagtacataatagttgatagtgaaaataaatgactatgttactggtttgtgtatttacgatactatactttttattgttatttgagagtggactctttctacctataagaaattaactgtaggccgggcgcagtggctcatgcctgtaatcccagcactttgggaggccaaggtgggcagatcacgaggtcaggagatcgagaccatcctggccaacatggtgaaacccatctctactaaaaatacaaaaattagctgggcatagtggcacgtgcctgtaatctcagctcttcgggtggctgaggcagaagaatcacttgaaccagggagtcggaggttgcagtgagctgagattgtgccactgcactccagcctggtgacagagcgagamtccgtctcaaaaaaaaaaaaaaaaaaaaaaaaaagccaattaactgtaaacagcctcaggcaggtccctctggwggtgttcwagaagaaggcattgttatcatcgcagatgatggctccattcatggtattgcctytgwagaccttacagatggaaaagataaggaggtagaagacagtgatactgaccatcatgaccctgtgtggggstaggstaatgtatgtgtttgtgtyttagtttttaacagaaaacttaaaaaaaaaaaactttttttaataagaaaaagcttataaactggatgtggtggtgtacacctgtaatcccagcattttgggaggctgaggcaggaggatggcttgagcccgggtgcgcgaaaccagcctgggcaacatagtgagacttagtttctacaaaaacaagcttatagaataaagatataaagaaagaaaatattcttgtacagctgtaaaatgtgtttgtattttaaactgagtgctattatgaaagttatcaaaaagtttttaaaaattaaaaagtttataaagtaaaaaagtaagctgagcgtggttaatttattatcaaagaaagaacaatttaaaaaacaaacttagtgtagcctaagtgtacagtccttataaagtctacagtggggtacagtgatacagtgatgtcctaggccttcacattcactcaccacccactcactgactcacccagagcaacttccagtcctgcaagctccrttcatggtaagtgccctatataggtgtgcccttttaaaatcttttctacttcatttttactgtacctattctatgtctagatgcacaaaaactatgtttaggaacattgtgttacaagtgcctacagtattcaktacagtaaggtgctgagtgctgtaggcaatcgtaaccctatgtccaagtttgtatcctaggagcaacaggctgcattatatagcttagatgtgtagcaggctgtaccatctaggcttgggtgaacacactttatgatatttgcagaaggacgatgtaaggatgcatttctcagaatgcattcccattattaagtgatgcacgactgtcctatatggtggtgtgctactgtgcatctctttacaatctcatggttggtaatgtcacattggtagtttgaaattagtcacagtgagagtatttatattacagaaatcagtaaatgctacaaatcaaacgtcctgttattcccgagccagtagctaaactttttgttttgttttttgtttttttgttttttgtttttttgagatgaagtctcgttctgtcatccaggctggagtgcaatggcacgatcttggctcactgcaacctccacctccaagtgattctcctgcttcagcctcccgagtagctggaattacaggtgcccaccaccatgcccggctagtatttatatttttagtagagatggggtttcactatgttggccaggctggtctcaaactcctgacctcaggtgatctgcctgcctcagcctctcaaagtgccactgtgcccggccgccagtagtagctaaacttttatcagcacactgctggtatccattccaactttttcttaagtgaaatagaactaggggagaacagtaggaatagtcaactttccatgattacatgtgcaggtacataccaccaagccatatgccaccaaatcattgctgtccagagtttccaactaatctattgctgatttactccctctgtttatctgctactgaaatcagtctgactcagaaatgtaattgtatgtgtgttggcaagaactcacacaagaatactatcttcaagaacaaaaacgccactggatatttgtatcatccttcaccacggccacagaatttgayggattacctcattaactcctygcaaccattgctatgttgagtttcattgtccctgtttgacaggtgagattaggtgatctgtccaaggccacatatctagtaagttgcatagacaggactcaaatccagaaatccaaatcttgtattctttagactttaccacaggttattgcttttatgccaatctgtcatgaaaatggracttttttttcaaaaggtcaacatctgggctcacttctctccttcctttagttagcaacgcagccaactttgaggcacccacatctacgtttacaaatacgaactccaccatctaagctcccttcctgcccaaaggcagaaattacatccccactgctgcaacgtcttagataaatcaaatgcaaacacacttccacctgaattcctaaagatgtcctaggcaggtgggcatcattaggaagtgttttatactttgtgtctaagttattcaaacccaaagagaagcctaaggcatctaatttaaattcaaatagaagtaatcgtgaataaagaatccaagttcttgcacttaatggtgaaaataatatatatgtatatgtgtatagagtttattttacacacacacacatttcatgagggggaaaacaaactatatacatacacatatacacgtatatatatgaacatgtgtgcactctctatatacacatacatatgcacaaatacgtgtgttttgtgagtgtgtatgtgtgtgtctagtttgtttttcgcctcctccaggagttatacagcaaaaaagaagaaaaaaatccctgccytttatcagatatgtacacattttatccttgcaatatgtctaraatgattttatgactaaatcctgggaaaaatgtgaagaatgcttggctagatggcaagcttttccagtaaaaacacaacactgcttatgaattgtagcacttggagaagacttttcaacatgatgtacatttttgctctagcttgagactaaatcctgtttggaggtaggttttctttggctttcagaaaaagttgaaccgattgtacaacatgggtctttgggccctccaacgtggactcaccatgagaggacgatcgtgtgctattccattaaacatgcctccstctcacgactccagccagggttaaaaccttcagatgttttctcaacacattaagcagaactaaccatcacaaaggcaaaaactaaacccatctgtccccttgtcaggatttttgagattgtcaatggactgaccttgtggctggaaaacattktggaggccgtgtaacaaaagttaaatgtggcagtgaatgcacagagaaattcttagaggtcactagtgaattactaacaccattaccctggcaagagatgatggagtttccattttatctcagaggtttggtgggtgtatggtgatgacttaaaatgaygttaggctacgtagccaacactttcttggaaaggactttccctgctgttctattaaaactgtcagcaaatagggccaaggcgctcactgrtctatgccgaggacaccttaaagtaatcaggcygtcaaataaaggcaaacactttctcaacatttctaaagacrgaaatagcgaaaagagtgttgcgttccaagcatatcagacttaagtcatttctgcctcatggttctagaagacaagaggtggaggtggsagcaagcggggagggaagacacataattctycttctaaccctctggctctcaaccggaagcaattttgctctgcaagggrcacctggaagtgtctgaggacatttttgattgtcacaactgccgggtgctaccagcatccagcgcatagaggccaggaatgctgctaaatttctcmcaatgcacgggacacctccaccccctccatctccctgcttccccaaataggatgatctgggccccaaatgtcaacagtgctgttgagattccctgctctaaagrgaagcagaaaagatcagctgcagccagagaattttccattgaccttctaactgttgcctgggctcctggaggacatcctctgaagatgcttgtttccttgacctaaacgctagcctcaccatggcccacagcccagcagcatcagcatcactagggagcatgtgggaaatgcagaatctcaggtcccacccagactgacagaaccagaatgtgcatttccactagaacgctgggggcttcctagacacttgaaactttcagaagcaccagacagacctctctcacctatccttaggtctgtctgtccttctattcactcagtattaattatttccactctgccctctgaatacacagtaatctagtaaaaagtagctctcttcttgcttcagcctttcctcagaacattctctccaacccagactgtaaccttggctccctgcagacagccctgtttctcctacagccctctgaggtggagagagctcaacctcccaagcccctgttcagggctccgtggctacttcctctatcctcattcgaaaattccttctcttctgaccacgtggccatggccagaccacatggccattggcttccatttattgttgcaaggtacaagttttcaagccagttctaggtacctggatcatggcattcctatttgccctcaacccaactgtggaattctccagtgactatgtggatgacatcttacacaagaattcctggttcctgaaccttttctacagtggcaacaaccacattccccttcagaacattcatttgttaatccaatatttatgatgtgtctctttcatatctgactgtgtgctaaagatattaagattaccatattgtccttgttctcaatgagcttacagtctaaaagagggagggagggagaagtattttggcactagaaggagcttcgggaattacaagccagagaaaagctcaaagaaggtcatggtctactttttggccatttttattggctaacactccaacccagtagttcccacatgctggtctgagaaccagggccaatccgtggaaatgaagaaaaataaagacaacatagtaaatgtaccataatattaaatttctaggacttactctgatattatattattttcactttggggatgttaaaatatcccttcctttttaaaaagattagaaaacttattttaaagtgtccagtgtccttacattaaaataaagagttgacccacatatgctagtaccccattaattttctaaaactcatccttgaaacctggaagtggctttccaggtctacatgggaggggcttgcttaggccagggacagtctggttgtagcgagggttggcaagacttgctttgaagccacatttgcccgtctctttacacaacatgggaagtcattaattgttcttcataaaagattcaatgtgccaagtcaagcctgggggaccaggctcacacctgtaatcctggtgttttgggaagctgaggcaggaggatcacttgacaccaggaggtcaagatcagccggagaaacaaggtgagacccttgactctaaaaaacataatttaaaaatttaaaaaaaatagctgggtgtggtacatgtgcctgcagtcccagctactcagaggctgagggtggagaatcgcttgagagagctgtggctaggacttttagttggggcagatgaaatrgtctaaggttagacagcaacaaaaacaactttggcagattttgcctccattgggaagagtgctcctggtggacacacttttgagtctcaaaaaggaaaataatgttgacttttagctcttcagttctcagcagttacaacaaaagtactatgtttatatctcatgagtgtaactgaatatttttcccctttagggtcaagggctctgtctcagggatcacttgtttcttaaatctcaggctgctacattttctcaaccaccagtcgtattagtccatttttatgctgttgataaagacatacccgagactgagcaatttacaaaagaaagaggtttaattggacttacagttccacatggctgaggaagcctctcaatcatggtggaaggcaaggaggagcaagtcacatcttacatggatggtggcaggcaaaaaatgagagagagcttatgcaggggaatgcctctttttaaaaccatcagatctcgtgagacttatccattaccacgagaacagcatgggaaagacctgccccccatgattcaatacctcccaccaggtccctcccacacacatgggaggtcaagatgaaatctgggcagggacacagccaaaccatatcatcagttgatctatatggctggaaaaaacaagacttctcgccaaccactgacagtttttttttttttttttttttttttttgcttctagttctaatgcttggtcattaatttctctagaactcagaatatatttgatgcacattattgactgttctccttcctttttatttaccctttaatgttttcacaaaacagggacaatgtgcataggccagaggattttatggtttttctaattcgtttttaaaactthgagacaactggcttatagcaattttccagttaacaacacgaacacaacccacaagccaagaacaacagaagaggagagacagaaagaacataaaacattacttatgagatctttcccactgcttagcaccagatctataatgcatgcaaggcttagctggaacaaatgatgaaagctgttcctcctttcaagggaggatcatttacatgggcccagaccactcctgttctcatttattcaacttccagccctcactgacattaaccaggagcagagaacatctggtgtcagaaccaactcccgctgtgcccagggctgttgtctcactgttgcagaaaaggccagagggcaaggctgcttggctgaagatgggcctcagaggttctgggctttttatggaattaggcatgggaagcagctttgctctcctacatcaaacgttatcttaactccacagaaaaaattcacgaactccaaaaccttcctcttgacaaccagaggaggaaggtggttttaacccagtctgaattcaaatctgtagatagtgaattttttttaactctcttaaaacagcgctttgaattttgaacatcttgattatatatacatacacatgtagatgtgcacgtgtatgtatgtatggatataaatacatacgtcacacatgcacacacatgtacacacacatacactcagaaagactgggactctggcaggaaccagaattctgccacatcccaaacctagcagaccaagttcaactttggaaatgcatcatcaccttcacgccagaatcacaaacacacgggcaagaggttgaaatcccaggtcctcggcttctcagctgacacatcagagtttatgcgttttctaagaagaggaagttattcaagctctttaaaaaaaawttttttaagacagggtctcactttgtcactcaggttggagtgcagtggtgtaatctcagctcacttcagccttgaccttctgggttcaagcaattctcctgcttcagccccttaagtagttgggactacagatgcatgccaatacacctgactaatttttgtatttttagtagagatggggtttcgccacattggccaggctggtctcgaactcttgagctcaagtgatcctcacaccttggcctccaaaagtgctaggattacaggcgtgagccayggcgcccggccctaagctctttaaatgcagcaactttcataccatatttattaccctgtcccctcctgagtcccatcctctgaccacttcatcttcttctacctccaaaactctcctcatcctgaaaaaaagcacagacagcaggaatggacaatctataggttgtggggctgcatgtgatatttctggctttcacgttctgttcttgaagtaagcttaaagacaataacatactctcccwgctatggttaaaagaattcttaggatctttgggaaaaaaaaaaatctcaaagtaaatatgacaatatagagacactggagggagctctaaacatctagtgataggaaaaatgctgaaattatgtatcctaaaattgaaaagttactgctttgtgggataatatggtaaattctggcttttagtcatctctgtgcccattcttaatactgattcagagcagaagatagttaaccatatcaacgtgtgtgcatgcggggcaggaggtggggggagcaaataaaactatcttaaacatatgactctttacccaaaaaaggaggccatttattcttggcttccacagggcctctgaaaagtatactctgaaaatattttcttggagagttctttaaagcagaaagatttaagaggcaggaacataacaaaggaagtactggaccaaagtgagccttgtttgaactgagcatgwtttgttttcacattttccactaaaaggtgctttgtcctttgggaggaatgtgccctcttcatcccacctttccctcccagagcccccagcaatgagagggcgtctggttcacatctgtcaggtccagaacctgactaagcacaagttctgtcctgatgggactcaagagatgctgagtgagggggcattttgacacccttggggttcctgtcacgctcagcttcctgctcgacttttaccagagtctgcctggtaaagtctttcctccagttaaggtccctgggttgtattcaagctgtccccagcccccaccacatgtgcaccatacgcacatgcacgcgcactcgcgcgcgcgcacacacgcacacacactccacgttgttagttttctgggtcatttcctgtgaaatgtcastgttccctctttagtggccggatctcagcctgggagtccgactgagagcaaggggctgtcggtacagcctggggagagggtcccacccccacctcacaccagattttgtattaataataatcacgtctccactcacctgtttctagcctgggaaactttcttccttcattcagcactatttattgcacayctaaaacattaatgctactgtgtggggcttggaagatgtcctggtrtttgggtactttctcagaagcaagactttctcatttgggtctctgaatatcaaatgtgaccagccaacaagtatgtacatttcagtccctcaccttttcctggagaatagagtttgatatgaacattaagtggatttacatcagtgctcctcagcacacacgacagaaaatatatctgctctggactaataagtatatcacaggcacaaacaactctgtagccaacttttgattaaagacacagtctctaccattaaggagcagcgcatctatatcacaccaataaaagccaagagtcctagcagtttgctacaaacgactacgtagtgagagttaggaactattctggattctgtattttatcctaaagacctttatttaaattttccagcctatctccttcccattccactcagtctcatttgacattgcttcccccaagtccactgtgatgtcatgcaccttgtggatggcaatgwtctgtgctataattcaaaatgctctcagggagctgggagcararagaaaacacattggtgatgcaggaagcaataaaacaatctgtttgaaaagcacaggtttcataaaatgttagcgctggaatggaagcgatttcagagatgaactcttgcaagcactctggcggccgaagcatccaaattcctggttgctgtggttggctggaggagtctacaaccccaactcctgcctttgactcttatcatagactgcttgcagctcatcctgtccttggacttgcctaatatttgtgcataccatgtgcgaagtactgctaatgtcctttacgctcatgaaatcagtgctcagctgaagacattaaatttactggcggtgaaagaaaagtcgggaaatggaaagaggtgctggaacgggggctgggaaggaaggccgcactgcagtgctcttggtggggttaactctgctccctactgcttcatgaaatgccagtgtatgaaccatagcatgtgaaggaccttttactgcacaatgttcactctcagaaagaaaatactataaacctgtgtttgagctatttctcttgctttcaatgcagatttagctgattgttcaacgtgaggtcttaaaacaaccctctctcttcacagccttatcttcttttctctctcttttttctccctatgactttccttcattaarttaaaatgagagwctaaaaaagtggaacatrtgaaggaatgatgaggtcaacagcattctcagattcctttctctctaaattaatcataccaaggagaacccaagttaaataattttttcaagaatckaaataaaactttaaataaagctttatttggttttactcacagccaaccaataattgagtcatctctatttttaaagtaatgtgaagatcagttagttcaaacctaacggataccgggcattcataacttttgagggcattactagacaccctatttccttaatgtaaaaagtaaagtagaggttcctcttcaaagattttcctccccatctaattaggaattaatagtactttctcttagaagcaaaatttattcaaagacctgtgctaacattcttaaatatctgctagctgtaataaagaaatcaatgtactttatgttcttagctcccacaatttagcctaaatatttaccctagcatgcttatactggtccaagcaagcattaggtcatagcctgttcctcttccttatttgaaggttttttacctttctcagcatttcacaagttacttcctccttcctttgttctcttctgcttttgctgcttttaaaaagttctaagctgctagccattcgggacaaatacagaatgtgaggtcccattccagccaatggaaactggacatagcagtagggtggacgcgtcaggttataatgaccctgtctcctttgttcygtgtactcttgtggcaaaactgctggcaagtgtaccctttctgcagaaagtaaaaatggtcttgctgaggaaattaaatttatgttcaaggtctatttctttacagcaccaaagaacaagcatttctaacacttaagatgtgtactatggaatcagatttgtaaaagttcacagcggcaggagactagtgatcatccatgaggaagttatagctcagagagataatgggcatgcctgagatcacagagtaatgactgttaacttggcttcattttaaaagattgtgttgtgggcactacccttatcttaaagtcttaacttcatgttaatgaaacaaatacattattaaattttttaaatgttctcctctaaggatatgcctttatgattcaaaataatatggtcggaatgaatgggaaggatactgctgtgtccaccagtgcctaactggacatttaaatggcagaagctcttcttccaatggcacattgaaatcactgagagatgaccttctcatagtaaggctgtcctaaggaatatgttgaaacatgctcctcaaaagtatctgtatcaacttttggatgctgaagctggttttactcacaacatctggtttgcttatatagcatatcaattcaattagatattaaaaggtacttatttagttggtgaagttgaaatgcagagaggagactaaaattcccaggggcacagttgtggagttaggctagaaagctgtgctcttaaatcccaggccagtagcttttcatcattagactatgtagctagaagccccattggagggtctgagctgcagacacacggttaacccaggcaaatcaggtctcatctgggcatctctggatacgtctgggtggcctgtgaagtggatggatgttctgtttgtgtggaggcctgtttgatgagcctcctggaagaaaaagaaacaggcagtgacaggaaacctgccagggataatggtgccatgtggtatctgaagtccagtaattcttcaaccttcttagcagcttgctgtgtgaggaaggaactgacccagagtggttgggttaaggtgcatctgctaggcatgcgggattgggggcatgggggtgtcaacaacaggggatataacattaggaatatctaccaacccagccccttggggaggggtgcaggaagagaccgtggggccataaagaacctgaggccaccatgttttgtggtctcagaagagaactttcaccactcaggaatagagaggacacatatccctgctgtacttggcaacaaaataaaagaagaaccgatcatcaaccctcatgacatcacagggcagaaacgggagttgataataacattcgagaagggggtctggggccttgtgaaatctcagttacttcgtgtctcctttaaataaactatagttattttaaatagtggcctcaccaaagcctgctttcacactgatttctcccatttctatatccattccattattaagtatgttaaagaagtattgtcttaaatactttccttcatcaagtgagaaccctggaagaagatgagaatgaggaacatgatgaggatggtaaaaaaaaaaaaaaaagttaacagtaactcaggcctatcatctgacaggcactaagtgtgtatcacgtattttgtcacttacaaccttttcagggttttaatgataaggaaagtaaggataatgtggttaaataacttatgcaaattgaaaaacatttgacatttattttctcacaactaataagtagctgaagtagaacttgaacccaagtgtgtttaattccaattttaaaaaacctgttttttagagttgaggtctctgtcatccaggctggagggtagtggcatgttcttagctcactgcagcctcaatctcctgggttcaagcgatcctcctgtctcagtctgctgagtagctgggactacatggatgagccatcatgctttgcttaattccaaaatttaattcttaccttggcacccaagagggtgtttggcacacagtaggtgcttcataaaaattggtgactgaacaaataaaaagaatacatgggttctaaggtttagtcaatcaaatggtgcaatgagcctcattcttcacctaaactggttaagtatacctcagtcatttaacctaatagaaacagtcattataatcaaataatgtcacaggatcgatatttcctgctaaggaataaatgactcggacttgctttgacatttattttctaaaacttactcagttttgccccgatatttatacatcagcaggagatggttaccccgagaagctgctctgttccacacaatwgccttagcgtctgtcctctttatgaaactaaaaaaaaaaaaccacagtaactgtagttgttatgagcaccaacattttaagtctaattaaaaatttgacttgctggccaggcaccgtggctcatgcctctaatcaaagcactttgggaggcagaggcaggtggatcacttaaggtcaggagttcaagaccagcctggccaacatagtgaaacactgtctctactaaaaatacaaaaattaacctggcgtggtggctcacgcctgtagtctcagctactcgggaggctgaggcaggggaatagcttgaacctgggaggtggaggctacagtgagctaagatcgtgccactgcattccagcctgggcaatagagtaagactaggtctcaaaaaaaaaaaaaaaaaagaactcgacttgccgtttatgcaatttcaaaagctggcttttgtaggtctaaaattrttgtaagacaattttaaaagcttccagacgtgcagaatctggggctcttctttgccccccaccccacagcctcacatgtcttggtttgcrgcttttaaacagcgarttctagagaagttccacaaaactgtgctccacctgctggcctkctggggaagctgcgtctgggctgatgatgctggttgcgggttgagcgaaaacaargaacagatttgagtttgtccaaarcatgcttggtacttgaaaattaacccttcaagactgggcatgtgtccagtgatgctctgaagctggcaaagatgagcatcaaatcaccagacgtgcatggagagcatgagctgaacgaccgtcgtgataggcttggcagargatgaagcagagggtggcaccggagccctacctgggtgctggcactgcctcggcctcttgcttactatgacgccgtgtgaatcacagcatctagcggccctccttcccccttactatgacttccaattttgaaatactgtgactctgctgtgtacttaattgacatctctttctgaaggaatttacaatccagttgatgatgtaagacccactatcataagccaattagagaaccaaacaagtgctgaagggacccctatggaggcagagaacctgaaatgaacagtgaagactaaatctgacttacaaaggtgaggagcagggagtacatttctttcctaatgcttgcactgggatttctgacgaatacctcagaggctatgttgggcttttkctgatgtagcgatattttggagattatggttcaaccagtgatttgtctaaacctgtttgaggattctttctaacatatcattcccttccctacataaagataatatgcaaaaaatccaaaagggtgcaatcatttgttttactagaatcttctttatgttctaaagtcttaatcatgcatttctttcaaattgtgagcctccaatgaactacaagcttgtcagaattacatctattcaggtcatatacaacatccgtggagcaaagtgaatttgaagttaagtctcctcttagtgtagcagtacgtattttgaatgagaacggccagtgctaaagatggaaaatagrtgggtggccaggcacagtggctcacgcctgtaatcccagctctttgggaggccaatgcaggcggatcacttgaggccaggagtttgagaccatcctggccaacatgctgaaaccacgtctctaccaaaaatacaaaaattagccgtgtgtagtagcacatgcctgtagtttcagctacttgggaggctgaggcaggagaattgcttgaacctgggaggcggaggttgcagtgagctgagatcacaccacggcactccagcctgggtgacagagtgagacctctgtgtcaaaaaaaaaaaaaaaaaaaagaaaagaaaagaaaagaaaaagatgtaaaataatttgaaaacaaaagcctaaagatgcttgctgaaatcagctattagtctgttctcttcaggaaaatgacatattatgcataatcaataataataataacataactaattttatgtcttattgactctaaggtatggctatctctatttactactacctcatatgactttaatattgatattgaattaaagtcagtgcaagatctgtagtacattagtaagtatgcaaaaatgggaaattgaagccctgtttataggtggtactcagagaaggcccagggttgttggtgccaactggaaaaagtttatatctgattatattaatagcaacattgatctggcattttgccctggcatagttttttaccttcttgaaggttaaaaaaaaaaaatctccctggctgcatcaggatttaagacattggggagaaagaaaggataaagagggaacaagggcaaagatgaggatcattgaagacgttcaaggataattaaacttctgcccatagctggcctgggggagaaatgaatgtcaccgtagtatggatgtggctggctcacagtgtgaagagagaagaccttgtttccagtcattcacagccctgttgagatataccttcatgcctaattccttcaccctctgaagtccaacattatttaattgataagatatgccacatatcatcttgtcctttgtgtttaagttgttcttattaatatgtatgtcttatctcccttagtagattgtcagcttcttgaggttatcttgaatgttttaacttagctctctctctcgcactatcttgcttagggaagacacccaataaatattagttgaagacatgaccaagtgcatgaagtactgtataggcttgctaaataagggcagtaaaaatgccattggatcttgtaggcaaattctgaggttgtaacggatgaaattaatataaatgttgattcactgaattgtgaactatagaatatgaaccctgtcaataggagaaacctttctaaaagccttcttctttgttgtgcatgtttttagggattcagtccagaactttcacccggaaactcaaaacaagaaatttagtttgaaataaatcaggtcttaacaagtgagagactattaagattaacagactgtcttggacagcctcctgcgtgtcccttatcatctaaagggttactactagactacatccttttctgctttatctcagaggcccattaaagcatgtaaccagactgctcagattcatactatactaattttctctttccaaaagaaaccaaacaacaaaataaaactccaccaagtgactaaactaaattcaaatatycatacaattctatccacggcaacagcgtcagtttctcagaaatttcattgccaggctcccccacttcaatggacaatagaagaaaatgtgcctcaatgtcgcaaacttcagtgccgctcaaggagctaattaaatctcctaggatgccctcacccacaccctaagaaatttgaasggtacgcaaaatccaaactcaattcaacaccattaaaataaaaggcctttacatataaagcttaatcttgactttctttgtccttttctccccacaaagtagtagatttccaaattccccaaaggtcatgagtttggcaatggaacaatggcatccccagagtgactgccttggggagagagtttgctcctctcttggccatgccgtgggggctgttgtctctcttgggagctgcaagcatcatcaaagtrgatgagggctggccacagcaagaagtatggtctctgtcctatagttttctagtgttagggtgatgaggtctctatctattcacaagaagaaaaagagtcatcctaaaccattcccaaactatgttagaaatgaagaaaggggaagggaaatagcacttgctgagcacttcgtttaaatgtgccagtcattatgctgcatattttatatttaatcctcacacaaccctacaaagtagaaatgatgactctatttaaagacaaactgaaactcaaaagaacttcctcgaaatgatacagttagcacattatggatgcagaattcaaacccaggcctgtctagttcttaaatccgtgttcttcccatataccatgctgcctctcaaaaggaaacactgtttttgttttttttttaaggtacaaatatagtttgtgcatttggaagaagatgcggctcgggacccattctttttgttataggcttgtgctataaacayccatcttactcttagtttgacctttgtgccgtgggctcatgtctgtaatacaggaacccaatcatttctgaaagtctgtctaacagtgatattgtgtgcagcaaatgtttaatgaatggatgagtgaatgtgaatcaatgggtgggggaataaataaataaatgaatgaatgaaagtgaaactgacgagcccatactgggactgaatcggcaatgtgggcctcctgaaagcactgcatgttaatcactacttttttgagctttgtgacatgatgtttgggtgtctggagaaaaatcctgtgtggtggtggtctgggcttttttactgacgcaatggcccacctgatataattttgatttccatcagccactaaacttagcctgaagacaaaatttcctttgaaaggattcagcttaggggaacagataataaggaggtggttatttggggaaacaagagttactttacattcctataacatatttctaaaaatgaaacattctcaaagctggaaagtaaggaaaatcaaacattgctctacttggggttttgaaaatggaacattgattgtttgtaaaagtgatgcttaatttggaggataagaagcgaacttctttctatagcctcaaggagctaattaaaatgtgacacggcagtgattatatacttagaggtatcgataggtcctcatttttccacagcacagataatctcacgccagctctcacctatattaagtgttagacacttggtacaggaacggatttctgctcttccctatctctcactgttcagggacctttggtcagttcctcagcatattgtaccctaaatgaggtgmtgagacagcatcgagccaactgaactatcagagagtgaggtcgtaatgcttatcggtcactgttaaaacccatccaacccattttggtatgattcttgcagttactaaggcctggccttcattctctctccactcagaattcactttaagctattataagaaagctaaagataaaacagcttctgcataatgaaacactaatccccagagtgtgacgcccacgacacaaatgaatgctagacagaagataaccaaatgtctagacttattcaaacctgcttctcatagttcaaacttgtactcactgcttcatcagcttatgaaccataaactgatttaaaaacacacatgcaaaactgaacaacaacaacaaaaaaacgctaaacccagtagagcctcttcactcaggcctttttatttgagtttatctatccgaatgcagtaatgcctccttaagcagacacagcttactgaaaatatacacaatttgtagcatctgaaagagaatatggcctttgtccttctttctactcaatatgttggtggactggaatgtttccaatgtagtcaatttttctggctctttaaaattaaattaataaaagtatacaatttaaggatctatagatttgtgttcagcacaatggactaaaagttgagctactggattctagaacaaaatgtcacttataattagctgagtatatatgacatctcaggcattgtaccaagggcccagaaaattacctcatttcatttttataattttcagaagcacccactttcctagctaggatacctaccaattgtgttcttgggcaaattatcttctatcttggtttgtacaacagaagaagaaattattttaaaatatatggaatataataaaatagaaatttggccaattaattaatattaggcagtgaaacaayaagtggtttttttgtttgtttgtttttggtttttttgagacagggtctcactctgtcgcccagactggagtgaaatggtgcgatctcggctcactgcaacctctgcctcctgggttcaagagattctcctgcctcagcctcccgagtagctggaactacggcacctgccaccatgcccggctaattttttgtatttttaggagagatggggtttggccatgttggccaggatggtctcgaactcctgacctcagatgctccaccctccttggcctcccaaagtgctgggaktacaggcgtgagccaccgcgcccagcccaagtggttattatttcaacacagaagtccttgtttacccgaagcagctgggaaatagggcttcgcataaaaccagagcagaagtagcagagaaagggacctgygagtgagtcctgcctggttctcggctcacactagtccagccttgggaaagagctgggacaccacaggtaaccaccttaatttaccctttgcctgtctggcgaagacaaagtaaactgagtgccacttttattaatgggaaaccatcttacttatagcaaaaacaaatgctcaaacctcattcattctgcggttatctggatccttcatgctgtaggtagggaacagaatggggctctgagagctccctcctccgcgcctctgctgggagcaaaaataatctcaaaacaggaaaaagaaggaggggaaatttttaatcgtttttttccctcccttcagaatgagtggggagaattatacatgggcagctacatatgagccagtacatataagtcaataatgcaaacaggatcgtcaggaaagtgtttaatttattcacaagaagaactaccaagctttcaaaaaaaaaaaaaaaaaacccaggctttcttcatcatccattttgcagtcagtgtgctgataacaaatggtcattatctagtttctggaaagtaatgtctatgaattggaaaaaaaaaattggtcaataatttatatggctatgtatacttgaagtaatgcaacttattttcttagaaggatctctcaatatagattaaattaatgtaaaatgtaaaatgacttcctcctaaaaaatctaaattagagagattttattggctcaataattaatactgcatcacacatctactttcctctctgccttctatccctgtggccttttacagacaaagcttttgctataaccatggagcacacaatagtgcaaactataaaatataagaaagtacaatacctgccttacagggctgttgtgaggacctaatcagacaatgcatgaaaagtactaagtatagtccctggcccagattaagtattcataaatatcaactgtaattattattccttttatataaacttttatttcatagggagatgtttcctaaagaaatctcctactcatcttgctcgtacaccctaaacgtttaaaataatctcactgtatccaatacctctgacccctctgaatcccatcacattttcaccgcttagttcatggttcctatctcttcctcactgtgttacagccgagctggtacacactggaattcctgaattcctctagtaggcctttagtttccataaagcagaaaccccataccgtgtatcattgcatactcagtagaatgtggcttttatcttgcatggtgtaggcttttaataagtatttattgaatggatacatgaagatatgagtgaataatggaataaatcctggggctcaacaggcacctaaccctacaatatttctaatgttttgtcaacttcccctaagatattattttatttattttttagagatgaggttttgctctgttgccgaggctggagggcagtggtgtaatcatagatcactgcagccttgaactgctgggctcaagtgattctcccacctcagcttccccagtacctgggactacaggtatgcatcaccatgctaggctacttaaaaaaaaattttcttttgagacagggtctcactatgttgcccaggctggtctttaacttctgaccttaggcaatcctcctgcctcagcctcccaagtcactgggattacaggcgcaagccaccacaccaagcccaatcaataataatttccaagttatggcttttaatggaaagcagaataagaaagtctttcctgatgtctacttcatcaagtagagagagggagttacaagtttcttattttttttttttcttgagacggagtcttgctctgtcacccaggctggagagcagtggcacgatctcggctcactgcaagctccgcctcccaggttcaagcgattgtcctgcctcagcctcccgagtagctaggactacaggcgcccaccaccatacctggctaattttttgtatatttactagagacggggtttcgccatattagccaggatggtctcgatctcctgacctcgtgatccccctgcctcggcctcccaaagtgctgggactataggcgtgagccaccacacgtggccacaactttttttttaatggcctaatctgtttctcagcatacgaacactgtatctcactcccagacaactgatgccattcatgcttgaagaagaaatccatgaccaggtaccaaagaaggctaaatataaaggcagttttctacctgccactaccctagttcatcctcgaagatttggttcaaaagttagcctctcaaaggccctccatattattccaccctgaacctcagagctcttgaggttaaaaactatgagaaggaatggatgagtaaatcaacgaatgaaggtaaagcatgttgtttgagacagggtgattaatgggagcatggtcccaacgctctggtgtagcaaaagattgagaagtgaacactgttgtagagctacgaaaagatatttggcacataataggtgcttaaaatgctcattaaatgaaagaattaatgcataacccttcctactgaatgtttgtgtctagaagatgcactgtctcaaactattcccattataaaagtaaatattgttcctgtgtacaattagtcccttcctctagactattaatccctggctcctggcaaaaactccttgcatttgtayagaaatggaatcggtttttggccacattaagcgatacttctttccttaagcacatcaactccctctgtggctttcaggaatgcttagcctttggaataaagtagaaagtacagaaatccactggaatacatggcctggcacatgtcaaatcaaagaaggaatagagaagcagggagcattcatgagatctgaacagtctgaccatgcaatactccttttttttattttattttattattattatactttaagttttaggttacatgtgcacaatgtgcaggttagttgcatatgtatacatgtgccatgctggtgtgctgcacccattaactcgtcatttagcattaggtatatctcctaatgctgtccctcccccctcccccctccccccaccccacaacagtccccagagtgtgatgttccccttcctgtgtccatgtgttctcattgttcaattcccaccgcaatactcctaacgctaataattgtaggtgttaatggtaacaatttgttataaatgatacaacatatttctatttgttccttagctttcaagcattcgcttgatgtcatggtctgaaatttggccaaggtgttcctattttcaggcctcgatatgcccacagatgcttccctggttatccttcattgaaccaactcctccacttactagctgtgtgactttgtacaagtaaggtaaccacccaccctaagccccaatttccttttctgttgaataagggtaatgatggtacatatgtcttacaactgtcatgagctttttgtattgttttcttctttgagatgggttcttgctatgttgcctaggctaggctcaaactctggggctcaagtgatcctcctgcctcagccacccaagtagctgggagtacaggtgcatgacactgcacatggcttcccatgagcttttgatgaactgctgcatgtaaatattttagcacagtgcttggcacataatacatgttcaataaatgttatctattccaatcattattataattaatagccaatcctattcttatgatagttctatcactgtctactcatttgcctggtaatcatatactctttgtattttataaatatatacattaatatattttataaatatttttataatattttgagtaatttaaaatgcccaaatggctgttttcttgtgatacaaccatggagtactttccagggtgggtatggcagtgtgcaaaggaaaaggcctggccctgggcagtgctattttcagagtgtgtgagggccaggctgcaccacatcccatatttccctttgaagaaatcagccaacgtaacaagcaaaggtgccagggaggccttgagggtaccagtgtacaggggacactgctacatgtgcatgctgagtggctgcccgggtctgcctttgtgtactaggggaatgtgtggtgaggctggaggggacagagctggccacctgtgagaaggactctcagggctgctgtcatcatttggcagagtccatccttctactccaacccaacctcactctcagggaggggacggatgaggaccgctcatcctatcatctacagggtttttaaagtgtgggtcctcattctctggcctgggtggccatgatccgagggcattttgttctggtgcacagatacaaagactggggatggggaggacagtaatcttttatacaaggacacatgaaccaccacactggtgccttagagaacataggcaaygaatactctgctgcagcataagtgatcgaaagtcacacgttaatgcaaattatgtaaatcctcactaaatgatttgaatagaaaggaaatcaccatagcaccactgttctccataacgtgagctgcagtgttctatgctgcattttacttccccggtatgarggcagctagagagatggtgggatgactttcactgtctctggggaccttcaracaaattagctatcttgtgaacagtcccaggatgccawctttctaaataaacatcaaaatgcatttactgtctgtatcacttaagaggttgagaatggaggggggagcctaactgcaaacatttgcgtgtttttatttaacaatagcttagctattagacaatatagagtattagaaagactgtcttagaagactgaagaggtgaagctggtgttctgagtatgtctacacagcctgcatagaggcagatgtatataaatgatcatgttactctgcctaaaatggataaaactcggaacaaaacaatccacatttagyaataccctgaagctgactctaatttgtattcactgtgacaactccttactttcaaatctgaagtaattattagaaagtgagaaaacagacattacttttgggaagctgggagatggctttatagtctaagttgccactagatagaatgacccataaaaattacttggaaggctattatctcataaccggggcctataaaatctaacagttacagattctctctctctctctctgtctctctctctcgtgtgtattttaattaaagacttaaactgctaagagacaaaactgaaaacatgtacgtaatccaattttgcataatgyctctgcggttttgtagttgattttccccatctgaccctgacttacatgtgatacacacacatttactggtttatggtaggaaaactgctctggctgggtactggcactcgcctttgtgattcaggcatgaaaccatgaggtgcccagctggaattcagaagaagtacattaggacagaggggcagctttgtatttatttattaggttcttccaacttaagttgccagggtagcatgagctttttaaaaacagttgtttctggccttcctgttttaggcttttatctaatagagtgtgagaagacatgagttcacatgcagctaaggatgagattattcaaactgaaaccaaccccacatatcaaaccgtggtgtcattttcgtcactttaacagtagaaaggacacaggaaaaaaaaaagaatgaaatcatttactgaactaacagttacatttgtcccctcctgccttggataaataatgactaatttttaaataacrgattggtacagctctgagattaggagacagaaagcatggaaaggtcctcagaccttttaggtttggtgctttcctgttcctctgamtgggcatttttcaaaaccattttgaatgtaaaaggctgtagagttcaacactgggcttcttcctactttatgaggttatacacaggttcaagggtgagggtaaagacaagcaggtgcagagtttcacacgggagggtggggggggcgtgagtgtgcatgcatacatatttgtgggagatgagcgtgcatgcaaataggtgtgcagaagtgagtgcacacaaatgcacatgtgtgggtgagtgtgcatacaagtacatgtgcaggcgttgatatgcatacatgtgtgcaggcgtgagtgtgtacacagtgtgcaggggccatgactgtgcatgtatatgtacactgcaggggcaatatggaaaaaaacatggaatacaatgcagtttagccacgactggcagccaagattgacctttaagcccatttcatggccactgcatatgcattttttattatatgccaatcccaggacctggtgcaaagatagccagtaagaagtaagatcttcatcttttgaagtatataagggtttttttttttatttgcctctgtgctaagaagaatggccaaatcatattcctcttcattccaagttggagcagaacagccttaggttgctgccaactgttatccttcgagagggccacatattttgaggtttcagagacagtgaggtagattctgccttgagaaatatcagacactcaagtactccggcgacacactgagcaaatgtttttgccagcagaaagatataggtgggttcaccgtggcgcaggtgagggagaggaagctgtgcacagtaagcgcactttctcttctccagacatcctggtgccacagtagttcccattctctctcctcttctgtaacttctaagacctttgccttaagtgaatggatcctcctaagacagccataactgcatttatttacgtccctgctctttgacttgaaaagttcaccctttcttggagagagagacttggaaaagagaggcatgaagggtctcaagccctggcaattctgcctcagtgaatccgacttctacctccacagtgaaatctccctagctagttgaggggcagcagtattaattgttccttcctaagagttgtcaagcaaatcaacctgagaactggaatccacccaagacacacctatgccttttacaataaagattcagtgaagaatcctgcccttcacaacagcctcctcaagtagggaaaacgctacaaaaaatggatacatgacaaccaggaactccttcacccacagagagatgtttctttgatctgccttatctctgccatctgttttcccaacctgggccaatgtggtctaatttcagttctttcatattttcacaagtcagagggaaaccaggaatcttaaaggtttactactgaaaagcactttattttcagtaaggtgctttaaaaaatagaattgtcatatctgatctgattcaggtaagaaatttcagaaagggaactctagaattcatttttcataaagggacagtcagtggaatagagcaccaggggtagggggagtctttataatcacacacctctctctgaatacatttcacttgttagccatcaggtctgaaaactgtagtgctggctctgttcagttattgttcaagtgtgatctcaaygaccctgaaattcttctttgtcattttgcatcaggctgtttttcatgatttcactttgttcccatcctcacggccttctactacgcaaggtctcatgatataaatgaaggttatcttcttttccttccagtcactcctctttacagaaatctcctacataattgagaygctgtcatcaatcagtcaaccaaccaagccccctgaactgggtccttgtgatgttccaggggtttaatyacaaggaatgctagctcctaacatctcagataccatgggctcgaagacttgtaacatgtgatattagggcagcaatggtttcctctactggtccgggatttggggttttaggggctctcttcacagatgagagaattttgcagcttcttgccactggctgcaatgacgctccccagtgaggtggaggcctagagagaggggagggtgacttaaggtgggcagggcctagccttgattacaggctctcaaggattaacctcgggaggacagagaggagagaagacaaggtgaagctttgtgagtggacagaaattaaataaaggggtttccaagttaagtacagtgctcctggagaagcaagttggaggctgctggtatcrtgcatmcacmtgcaggactatttagtggtacctgattattctgatcacaaacaatggtgtttttatgcatcatttatcttcagagagwgtctatctgagctgcttgaagcaaaygaaacttatggattggactagccttacgagaatgctagtttcagagctatggctgtgcctatagcagtttgtaggaatttattatataaagtccttttaaccccttggagcacttttacatccttcgcatcacatgatcctccaggtaatcctataagactggaagaacaggtgtgaaaagaccatgtcttatcaagacccagtgggcctaagtgatctgtctaaggtagacagagggcaggtggcagggagcggcctggatctgccttctgattttgtttcttttgtcatggttgctacaacatcattgctcctacaggcagaatcaagagctacgggttcaagggacgagagggaagaaggacacaagccgggtgtgtgcatgcgcatgaatggagcctgcgtgcacaaacattcggtgatttggagccatttacgcagctcatctggaaaatcacagcagaggagaggtttcctatggggaagtctgttgggagcctgattttacccctctctctttgctccaggctgcactggcaaaccttcggctatttaataatagtatctagttgatttacatccagggttgcccagggttctagtgtgtgcactgccaggcacaaacaagtacagaccagctcatgccccacaacaaagtggccattttatggggaatcaactggaattctccattgctgtctctgtctgccctgctactcagaagacggtggaaggaatgctgaagtaagcttctgtaagagctcactggcctggctttgaaagagaggatcagctgggatctctgaatagatkaggagtcagggtgaagacagaaacaaagaagtgtttcaggtgcaaaggaamtgtgggtgctccatgactctctgaagggagtccaagggctggaccattcagaaccttcaggaagactcagaacagctccagcctgcctgagctggaagcagtgtcactgttggtgttgcgtctcctctgaggaccttccagaaccatctaatggcatgggtcagaactactgactgctgcattttgcactcagggccttccatgaatggcagtttctggtacctttgcagactattccctaacatgccctttacacataaattcagccaactgaaatcagagcaatatttgagctayggccttttttccctctaaaatgctaccaaacactagatctcttagttctttcatattttaaagtgsacagatgcctgatttcagattctgtgaaacagmgcacaaattaatatttacaaatgctttctgtctcaggacccctctgtagctactaacttcacatttgggaaaaagtagaccctactccatcccactgtgccacgttgtttaccaaaagtatcccaccaggcacttgtattcctcacccacgtgtattactttaaaatgcctttcggtaaaggagaatttgaatagcattttacgcattaactgtctgggaatgctcccaacataatatactgaaacacagaagactggctgtaggtccagatcacctggtagtgaaccatggaaaggtattattcacacaccttggagcctgcggattctctaagccttcttaatcattcttcaggtattactttgtccttcaaaacagcagatttcagacgcatttataaaacaattcagttgtaatctgggtccctaaagcttcagtatagacatttatcttgtaagtaacaaagagatgggaagatttcctaagttctcatgctatcccacctcctgcttgtgttactcactattcaaaatttaagaatragaagtcatctgggagaaaggggatgggaccgagcatccctgaaacacggctcagggcttggttccctcctatgcccatcacctgctccctcactcaaccacaaacacggctgcaatatcagggtcagtgttccacatcccgtagcagatgaccctctgttccagaacaaacaaagtgtgcaccctataagcatgatgacattagaattagacttcaaagctagcctcaagatgctcacagactgatattaaccactgtctgccacaagcatatggcacaagacaggctggagcagatcacaaggaaagactcgttggcatattggcccacaatactgccacagaggcagagcttagagagggtgctaggcaaggcattcatccgctatttcactctggaaaggggatcagttgggggaaaaaaatctgcaaaccttttgaggacagaaggcaatattgcttgaaatttatgagtaatgagccattttgggagaaggaagttgattctgtcattcattttgacagggcttattaacacaaaaggaggagagggctggtggggagggtggggcacttgtgggaaggtgcagagaggacagaagggtgaagccagccaggcaaatgagaatgagaaattgcaattatggaccttatggaggagctgctggtaagctaccctggccaaaggaaaatgttgattggaccaattttcagagggaaacagacagctcttctgcaagcagatggatgacaaatctctaggaggaggctgtgttgttcatgtgtgaaatggtcttagccaaggagtaaaagcgccaagccatgtatgtaagcagagccacctggcctgtgtgtggtggtggggccgagtgtgtgtgtgtgtgtgtctgtatgtgtgtgtgtgtgagagagagagagagaggcagagagaaggatggagagacactggcagcaaaatctcttgctgaaaactccaggacactttaaccaagcagcccccatttgtacatctctgtctatctctgtctctctgtcttgttttttcctttcttgtttccctccccctctatccagcatccccttgctgctttaaccttttcccccatctcttagatgtatcttgtcctgtggaactataagatccaaaaactgggggaaagaaaaaaaaaaaaagaccaagtagaggcaggatcgagattaaagtggccagaaaataatctgccagcagaggccaagctcagaacaagcccttcaatgccgctcacctaaagccccgccccctcaccaataaagtctattctcatggaccagattgtaygtcggagaagagcaggaggcatctttgtggatggacacggtctagatccagacatggaactctccatgtccttgactgggggccatgcttctctccagtacagatgtggcagacatcccttcccaagcattcgaattgttcttttaaggttaaggtaaaccagggtttctcagccttggcactgttgacatcttgtgctggatgattctttgtggtgggggctgtcctgtgtgttgcaggatgtttagcagcattcctcrcttctactcactagatgctggtagctcctccccagtcgtgacaagcaaaaatgacttcagacattcagacattgccaacttgcccacggcggagggagcaaaattagaatcacggaggtaaattttatagagagttggctggttctaagtggaaaactactctcttattgcatgaaggttaaatgcactcacatgtgacacacactcacattcataaacacacacacgatacaatgacaaaatccctaagacagagtggtcctcgtttctgatttttccacactttcatttgcctgatttgttgtaaatgcctctaaagtttgagcagaacatcaagggttccgttttcaaagtgacctcaactgcctccagcgtttcaggtgttgagctctagaagccaggatggaagttttcaggcagatacaactcccaggctttcattcagcttctataaaacaacagtgcacacaggcacatgcctcatcaccagtgtctgctgtgtgcacccaaaaaagaaagcagacgcagaaagatgattgaaaatgtattccatagggctctagggttgtcttgaaatgctctgttctgaaacactctataaaaattcctcacagattttcagtgactagaggcatggggctgtgggagggggtgctcagctgcactcttttattattgagctgattcaaaggaacagattttatgttgataaatgtacctgatactgactttaatgttcatggactgggtcttttctatctgtaaaatatggttgcaaggctttcatggacaagacatggcctcttgtctctggtagaccaggcctttttttttttttttctgagatgtagttttgctcttgtcacccaggctggagtgcaatggggcaatctcggctcactgcaacctctggctcccaggttcaagtgattctcctgcctcagcctctggagtagtagggattacaggcgctcaccaccatgcccagcacatttttgtgtttttagttgcgacggggtttcaccatgttggccaggctggtctcaaactcctgacctcaggcgatccacctgcctcggcctcccaaagtgttgagattatagacatgagccaccaygctcagctgaccaggactagtaatagcaaatactgggttggtgcaaaagtaattgtggtttttgccattgaaagtaatggcaaaatcacaattacttttgcaccaacataatatttcttaagcgcttgcactgttccaagagcttgacattcatttaattatcacaacaactttttgaggtagctatcattattaagccaagtttgcaaatgaggaaaggagacagggagagtttcagcacttaccccaattrcagcacaagctgatgccagagggagatttgaacccaggctggctcactccagctaacacccaaccatcacatgcagggccaccctgctctgctaacacattcacacaactcactacacatcaccagaccgacgtgatgctttctcctaaccataaataataaagggactcagaagccccaagtggggagaggttaatgggtttgcggttagaaggctttgcggaagaggggatgggagctgggccctgaagtagaggaaggattttgacgggctgggtcagatggagggaaatatggcgatgaacacgcacagaacattagaattacaatgtgaagtaaggtttggttgggacatagsctgccagtggagcagtgggggcggcgagggtaggggggtgggaggtcacctgctggacaccctggcgacctgttcctgcacctgttccctcctcactaggtgatggaggcagagaggacactgaagagaggagacatgagggctgtgcggtggccctggtgcatcatttcctaagaaccctaaatttaaattctctgccctactatttcttccccatagacagagatcccttagttctttcaaactcctttttccttactgactgtagagaccccaagtttctcactggcactgcaaaatatatgcagaaatttgacagtgggtgataacaggatgtttggagtccttttagcattaaaaaaaaaaaacaaccagtagcaatagcatcagagtattttttgttcgttttttttttttttttttgagaaagagtctcctccaggctggagtgcagtggtacgatctcagctgactgcaacctccgcctcccaggttcaagtgattctcatgccttagcctcccaagtagctgggattacaggtgcccaccaccacgcctggctaatttttgtatttttagtagagatagggttttgccatgttggccaggctggtctcaaactcctggcctcaggtgatccacccatctcggcctcccaaaatgctgagattacaggtgtgagccactgagcctggctggagttttctcttatcatagaagcattctgtgtttctatgagttttaggcccattcgatccacataaaaaccrcagcaggtattaccacctccctcttgacaaacgggggcatggaggcacaggcagttcagtgattcttttctgaagatcacgtggtgactgtgggacgtggagctcaaacccaagtctgtggattcctagctggaggcaaattctaccacatcacatttttaagtacacgtgcctgaaaagcttgccactcaggcaaaatcacaataagactcagaatccgtaagcgactaaatttgcctggagtgacattatttttgtggcgggtgttgagactgagaatagagttaaatgttaggaaaaaaattctgaagtttactgatacattgcttggaccccaaagtccctgcactccttagacaagtgttggagggaaacggccacatcaggggtgaagtggcatttatccactagtatactccaagatgtcgcgagtccctgaatcccccacatctctgatttggtcttccagcaactattggaataaggctatatgatttgtgcaacaacaatgaaaagaaggcaggaaagagggaaggaaggataggaaaaaaaaaaaaagaaagggaaagaaaaagaacaccgtactgcgaccactagttattaacagcccagcctgtggtacacaaagctgacagttattatgagtaattagcacaaaggaaggttctgtatacacactatttccagacatgtttttgaaacaagggctttgccttttaccaccaataatttgtcttgttgtatgttgttacttacacagatgttccatgattttttgcatatggctcagccaaagaaagctttttccccttccatttttgggaaagatgcaactgactgtgtaagggagaggagaatgtctagtttttacataatgtctatggcgatgataggggtgcagtggctggtgctgctggtgtgtgtgtgtgtgtgcgcgtgtgtgtgtgtgtgtatgtgtgtgtagtaacaagattccccacccaatcttgccaaccatatttcatctaactctcttgactgagtcattcctatgggattagggagtactgcgtacatccaagttcgtggtgtttgctgagataacacattatcaaaagcctctctaaaaagggttgaatatttacagaagaaaaaagaggcgggagaaatgtgaatgcatttgagatttttttgttgttctttcttggcagtctttacaactgacaacagcagagccctctcatgtttctatgaccttcctcagcacagtcggaatgcacatgtacggtatcagagagcagcccgcctccatgttttcttgggaaggagggtctgtgcagatgtggggtttttttgggggaaatgggtgtgggggtaggagcaggagcgtagataggagtggtgagattaaatccaagcataccaggtttttagaatagagaaatacaactggctgaaattatcagggaggaagagcagactaaaaaatatacatctcttttattgcaataccaccaattgagagaacattctgctgggggggatgtctgccaaggacttctaattcagtttgttccacccgttttatttttaaactcgagtgcagattttattcctggaatgttataagattggtgtgggcagaaatgggcaaattcacttcagaagtgctttataacaacttggaaaagaccctctaaaattctccaagtacattttaggggtgaagttcatttctctcttttctgaagaaagctgccttgattttgcagaagtaaaactcgagtataattttgaaagcatttcaaaatagtgatgctatctattgggtatttaactattttccagggagtattataacaatttgcatagtctctcatttaattctcacaactacctcatcacccccatttacgggcaagaaactaaggcagggagaactgccagagttgagttcaaatccagatctccacgatatcaaaatccttcttcgccactatgcaactgtgctttcgtgtattcatatccaggacatcataaactatcaatacagacgatgtattaaataaatatacaacttggccatcaggctactatttatcattctaacaggatgggggcaaaagcagattccttagcctgcttttctgatgagagatcgcgggggagccaaaggcagtttgcaaaagaggaccagtctctgcgcaggagttttggtggtaaacatgtgagggtatccagagagtgatggaaatggtggataatctatttattttgaaatrccaaatggtactaatataaaaacttgttcaacctactttggcaacattaaatatgaagggaatgtaccttcttcccctcctccaaaagtatttacttcaaaaatcgatttcctctgtcactggttattgctgcattttgctcagtggttctgagaaaccgcatggaaaatcacaatgttacactcgttaaattgaccctgcagggctctaccaccagtacatgcatcatcccaagaggtaaaaaggcaaggctgccaggctcatgctgagaatatcatcatgaaatcaacgaggatatgcaaatctctctgttccatagctcatttgcatggttttcattggttttgtagaacctctayactaaatgtcaatttccttttctttcctaaagcttattagctgtgtgtgatgtttacagcttgaagaccaaacagatttaatagttaaaacatttaaactatataatttaaaagcatgcaaggaagagggaaaaaaagaggctctgatgtagatcaaacatgtagatatatttgtgctgttaaaatatgctttccaagtttggaagatgcggaggcctcatgcatgtctgtgcacacataagcaccaccacaaaatttgcttaacctatttcttttttcttttcttctcttcttcttcttcttttttttttttgcaatgatctagaagaagcagagacatttgcttataaactatgaagggcttgaacccagccactgagtacacattttactcacaatgaaatctgcatggaagcctgccaatgtctgggctgacattcaaacattccaagtttctatgtatttcaatctctcaaaactaatgttttaaaactcttgatattttctgaggcactacacagttcaatcctcacctctcagttcagagtgaatatacagcaataattctgcttgaaagaartgcaaagaaggtcttttgctgtgcagcatgtagctcgatctaccgcaacaatacaatgaataggttatgggttttgtattattattttcctttgtgcatcagatctagaaacagggtgagaaaagaaggttgaagaaatcttttaaaaatctataaatatttaaatattagttacatagtagacaatgtcctatagccatgctttatggaataaagcatagaatcttttgcatttcatgtggcatctgagtacattatctactgctactagttattagttcacagctctgccaagaggtaattggtgatccacaccttctgaatacttctttttgggaactttagcacaattagctgatacctcaaatttcacctggaccgcaacagaaacagctgttcaacattaaattaaattttatagttgttggctttaaggaggataagaagaactgagtgctccaaggagattttagaggtgggcaaaaaacagcaacctgcccctacaagcaaagagagatgtccctcctggttaagcacccctttgtcacgtgcagcccagrggaagttgtgataaagcatcatttgaaagttttaatgccgttggggctacaagcacattgtcttgatggaattcagctgtacagctccttactgtcaaatacgatccattctgttttaaattcctttaactgtgacaggcagcatgatgaaacaggtgcattaagtgcatgaaacagaacaaaagtaagaaaagtgctcaaaggaaggccagaaatagtgaagccagagtgacagtctgcagacctgggtctcagcagctccgcccaggagttcctgccggagctcaggcgagccacggatcggctctgtgccgctacctcctcacctgccaaacgagggtcacgacgcgtcctctaacctcagagaatttttgtgaaattgagaaacttacaacaagcactcagcaaacatggatgccaaactattatctcataattcaatgtgcccaaatcagactgaaacaagtaaaaccccaaattaatttgacaccatatgctatgggttacattttccaaaagccttcggaaattggcatttataatatttgtgggttcatccttctccatgtacagaaacatgtgcacacatcaaaacagacccagttaagtcttaattatctagtggaagattatccaagattcttactgtttctcccttttcctgttgcccatttttagccttttttggcaattcctccaytattaaagaaaagagatggcatgcaaatcaatcaacccctttccttcttcactgtaatttcaattatctgtgctacctcagcctccgttggcatggatgggcgaggaggtgctatctttgtcctcagaattggatggaaaacattcatctgtgttattgggaaatgatgtgaacttaatttctctttcccttctaaaactttgcttactgaatggaaatgttcctgagatctgtttatttggttctatatttatgtacctcccttttaaaatagagaatacatgttaatgtttctttgatgactcagtgtgtattatcggtaacagtccattcatgatgttgccataccacacagcataattttctatctgcttctgattgattcttcattctcccttgatctcagtttgtcatttaatacatctaagtttttcactcaacaaatcaaatactgatggagaatctgctatacaccaggcactgtgctgctaggagctgaggattgaacggggagaaacaggaagctccctgctctcatagtgcttcttagttggggagaaaagacattcatgatataatcacataaatacctatttttatatgtaaaaaatgttgtcaaagaaaagaacggggtgatgggaacagttggaagaggtgtaaaaactccagagaagctgtggctcctagaaagaaggtaggttttaggactagaatggtgatagtgggccggaagagagagagtgcattcgaaagacactgaggagattgcatcagtaggacttggtgacacattagatgcagaggaagagggacagaaatgcttcaaggaggacttttaggcatctgtcttgggtaactagatgatgccaatggctgagatggggaattcttgggtagatgaggtttggtgggatggtgattgttataactttgactttgaacgtgctgagttcaggtgacattgtgataccccaaaggaggtgcagagtaggtagctggagacacaggcccgaagatgatgagaggtctggcctagaaacatggatgcaggagtcatgggtccatcaaggcactgtgagtttggatgagatcatctagcagaacacttaagtggagaagcaaagtggtctagagactaagccatgaggaactccaacacttagaggcgtagaaagcaggtagaaagggaacacctgaagacttaggaaggaggggccagaaagggatgatggcacccgaagacagtggtgttcaggaagccaaggraggaaggtatttagacaggagggggagagcagaattggcaaagctgtggagaaagtgagatgagaactcctattaaaaacacacaactggtccaatgacatgggatggcatggaaatcactgatgaccaagcaggagacaggggtggaccgcaggggaaaaagagcaagctgaagccagctaaggaatgtcctcgggccatctcctagcggaggcggtagagccgtggttgaaggtacaggaagtggactgttagggcccaggttccccttaaccatgagacctgaagcaagttactttatttctctagggctcaattttctcacctgtaaaacaagagtaacagtgctcacctactaggttgctgtgaggttctttttctttttcttttttttttggagacagagtctcactctgtcacccaggctggagtgcagtggtgcaatcttggctcactgcaatctccacctcccgggttccagctattctcctgccttagcctcctgagtggctgggactacaggcgcctgccaccacaactggctaatttttgtatttttagtagagatggggtttcaccacgttggccagcctggactcaaactcctgacctcaggtgatctgcctgcttcagcctcccaaagtgctgggattacaggcgtgagccaccacacctggccttctgtgaggttcttaacatgtaagccacttagcccagtggctgactcatagtagttgctgaataaatgctaattttatattaacaccctcataacccattaaatcaatatttattgagcatccatctgccaggcactgtactagatgctgacaaagacacccccaacaacaaataattacctatcctcatggaaataaaagatttataatgaagtattttccattaaatggtgatagatgctaaaaagttaagcagaaaagggggctagggtggtggtctggtgaccattttttcaagcttgtcagtcaaaaaagacctcacagagacagtaacttttggggaaaagcctgaagaaagggaaatagaaagcaatgtggtgactgggggaagagccttcctgacagaaagaacagaaggtaccaaggtcctggggtgggctcctgtgtggtgtgttggaggaacaccatcgaggtggtgttcctggcactgagtaaagggggtggggagcaggaaatgaagtcagagggtgggggtgacaagytctttgagccacaataaagtctgaggtccttactctgagtgagctgagaggcactggagggttttgatcagaggaggtacagggtctggactacattttcaccagttcatgctggctgttgcatggaggagatattctgagaagaagcagagagactactcaggaggttactgatgaactccagccaagagatggtggcaccgtggaccagcagaattgtgtaggagaaaaagaggcatcaaggacaacgtcaacaactgtggcctgagtaactggaaggagatgggaaggcagtgggagaagcaggttggggtagaatatcaagagttcatcccactgraggcagttaagagacagtgggatatgcaagcctgaggttcaaagaaaaggcccaggctggagaaggtgtcagttttgagatggtttgaaggcatcaacaaaaaacagaccaggtttgaggactgagccctgaggctctctcacatttggaaaccagaggctgctactttccgctactttccactctgattgttccacttgtgattaggctgtatcggctgtgggtgggagtgcgtatcagcaccacccccgtggaaggctacttgatgcggataagttccatccactggcaaacccaaaagctacacatgtctacatgggaagggctgtgyggcacaggtgcacagcagatctcagcgctcttcccctgatgtttctgctcttcccatgcactaaggagctgagcaaacagcaagtcagaaggcagggccatggtaagcagaggccagaggtggctgggaattaaaaggacaacttataaccttactgttctgccaaattcctacagaactgataagactccctggatacttttgttgtattattttctaacagaaaacatagataatccaagctccttgtgtctcttcctgctttaattataatttgrttaacttacaaattattggtattcccttttgttccagcccatttgaggatataatttctcttcatctcttcctaaatgcataagttggctcagcataaagtataattacttgataaccatggaagctaggtagcagagagtgtaaggagagcttcctgtattttgaaatgcactgtccatggaccttgtctggggaagagggtgccacactaattctggccttggctactatgggtgttcaagaagcagcatcatgcaatagaaagatgtgacacttctggtcgggacttcttatggcagtggtccccaaactttttggcactggtccatgaggctaggggtagggggatcaggcattagattctcataaggaaggtacaacctagatccctcacatgtgcagttcacagtacggttcactttcctatgagaaagaatctaatgctgccactgatctgacaggaggtggagcttaggctggctgagctggctaatgccggctcgcctgcctctcacctactggtgtgccacccagttcctaacaggccacagacccataatggtccatggcccaggggttgggaacccctgtgttataggacctgacacccaatttctgccatctgaaaagcaaagaaagataacaatggactctgttgactttttagcagaaataaaaatttcttgtttattttttctccattttttaatccaaaatattacaacacataataggacacagatactgaaataatacatttagtgccagctttgagtcaggtttcattgctgtcaagagaaaggtaaaggtgatgttcaatccatctcccttgtagacagtaaattttaattagttttaattagaaatgagaagtcctacacctcatctctacaagtctcctgaaacataccaagatattgtctttctgtagactcagagcacgtataatcagataactggtccacttactgtttatattgtatattttatccaagaatgatttatacctataaatccagccaggaggatctcagaataatatttatgagatagactgaaatttaatagcaacacttcttaagtagatggactatcaagaaactcttaaaataacagaatgaaaaataagryagtggctctgtatataagccccgtcagccagtacacgggaggtactcratcaatgccaaatgaaggagtgacttcgtaagagggactaagaagcaattcaagttgctattctggaatctcttgtgtaagatgggaatcaagtctaacagagtcattaatagaatttaataaggaaagcttccaaaagaggaaactccaaagttaccctttcattactgaatttctcagattctcagtggatctaaatttaaactgcacaggaaacaaggccctttgtcaaaaggtgctaaatctaacctacactataagaagcacgtttgcccatcctgtgttccatgttatgaagggcctccaagaatttaaaaaggacaaaatagaaaaagcagagagttcctttatagtattactatctagctactaaaagccaaaaagaaaaatgtgatgtcaatggcaatttggcaactacatttgtaaagttataacaagccaattttcagagctagagacttcttttcgcggggggggggggggggggggggcggggccgggggcggggcgggaataagggttggggtggggtggggatgctgacatcagaatgtgtaccagagtgactcaggggttttttttcagcctcagagctaccatttactcagcgtccagcgtcctaaccaagcctaaacttgatctaaattgtgtcttttgatgaattagtagtggttggtttcatactgtgttaatttggaaaagatacgtgtattaattttattttctacatatgttaaacaaataaaaaattgagcttgttttgtttttcaaagcactttgtagttttcttgtccctaaaaagtatttactaaaaatctgtgaccgaaatcaaacttttcattttgaagtatttgaggtttaatccagaggcatagtatttagcagaaacatcttctcaagcactattaaaaaattaaagtggggccaggcacagtggctcacgcctgtaatcccagcacttttgggaggctgaagtgggcagatcatctgaggtcggaagttcgagaccagcctgggcaacatggtgaaaccccatctttaccaaaaatacaaaaattaggtgggtgtgatggtaggcacctgtaatcccagctactcgggaggctgaggcaggagaatcacttgaacccgggaggcggaggttgcagtgagctgagacggygccattgcactccagcctgggggacaagagcaagacttcgtctcaaaaaaaaaaaaaaattgaagtggggccaggtgcggtggctcatgcctgtaatcccagcactttgggaggtctaaatgggtggatcgcttgaacccaggagtctccagcctgggcaacatggcaaaaccccatctctaccaaaaatacaaaaaattagccaggcgtggtggcacattcttaccacagagacatgcccccaaaacagatgaaaactttgatatttcaaaagagctaaaagaaaatgaggaagtaagaagagataaaggaacactaatcccaataaaaacattcagaaatgaagtgattggagaaaacaaatagttggatagagagaggcaaaagaacgtgggaaagaatttgaagtaaaagaaaaaaaaaaaaccattttctagatgaagaccaaataagaaggaacacaagagggaatacatacatacacctttagtcccagctacttgggaggctaaggtgggatgattgcttgaacccaggagccagaggttgcagtgagccaaaatagcaccactgcactccaacctgggaaacagagtgagaccctgtcttaaaaaaaaaaaaaaaaaaaaaaaagaaagaaaagaaaagaaaaaattaaagcgggaattcagggaagatgatggcaccagtgtcaaaggtagcacagtttaaaaaaatttttcagaatccctgccctcctcctccctgccagtaacaatagcaatgataacaacaaaaacagagaaaytggaattacacagccaaaaacccatggaccacatcaagacaaaatgaggttactgtgtagtccataaacctgaagacaggaatgggtgtggccgaaccatttatagtgacagagccaggcagaagcaatatctgtgcaagagaaagttggaggagaggcagtgggcatctgaaggttttggcacaacgggctcccaagcttccaaaggtycttacggcacggtcagcagggtggtgagctattttgagcacagcagcatcattggcaaggggtcctgcagaatccaattcatggggtgagggcaaggaaccctgggaaggtctgaggtgcttaggtgttacggagccagggcactcttgagaccaacaaatctaagcttccttccacgaccaaatcaccttgagaagaaacttttgagagcagaatctaaatcgaacatggcagtaataatttagccaaagtgaagggagggggcagatccaagtgaagggaggcagagaagacgaagctaagaaaatataggccttattttattccatggaaacaacagaagacggagttctatggcctagacactagaaaatattttctggcccatcccttatccctaaaaatacaagaaaactcattccacttaaaartgagtaacaaaataggattgtggtcaaatrcagtgcacagttattataagaagaaaaatcagagtagcattcttaccacagagacatgcccccaaaacagatgaaaactttaatatttcaaaagagctaaaagaaaatgaggcagtaagaagagataaaggaacactaatcccaataaaaacattcagaaatgaagtgattggagaaaagaaatagttggatagagagaggcaaaagaacgtgggaaagaatttgaagaaaacgaaaaaagaaaatccattttctagatgaagaccaaataagaaggaacacaagagggaatacatacaacagataatctttgaggagtgctaaaaaatagaaaggagaaagtgttaaacatcaaaaagaaatgaggaaagaaatagaattcaagagaaagactcagaaaaggaacatgagcaaagaaaacccaacataacactgtaataagagcctttgaagaagaaaagcaataaaaacagcaaatgcttaaaatcgtgactgaagcacaaattctagaagtagaaaaagatttgaaactatatattgacagaatactccatgcacctggaaaaactgacctaggaaagaaaacaaaaaaaaattctttggacactcaggtaaaatgactgagttacctataagggacagaaaattagagtgtcacccgatttttcaagagccaggcttcatgctaaaagtcagtagcgtgacactcaggaaagacaactaagccaaggatcttatacccagccaaaatgatcttccagccaacaacaatctgttatgaatatgcaaggacccaaggaatattgttcrcagaaacccttagtaatctgcaagggagaagagtcaggcaaccagtctggctggaaaggcactgatacaaagactgggtgagcatttaacacataatcagctgtaggtctgttactgaaagatgattacaaggaaacaatattacatatagccagaacgatataatgactatgtgccctgacaatatagatagtataatgattaaaaaaaaacacgcgggaagaatatgaaaggaacgaaaataatctcactaacatagatgttaagtgggagtaaaaggatattaccttaaatcaaattatagccagagaagaaaataagaaagaaagggtactaagaatttcaaaatcactcagagttggaaaccaataaacaacagctaagaaaagtttgggggataagaagggtaccatattaaggaattattctaaacatttttactggaaggctgggcatggtggctcacacctgtaatcccaacactttgggaggccaaggcgggtggatcacttgaggccaggaacttgagactagcctggccaacatggcaaaaccccgtctcyaccaaaaatccaaaaattacctggtcgtggtggcgcacacctgtaatcccatctactcaggaggctgaggcacgagaattgcttaaacccaggagggtgaggctgcagtgagccaagatggtgccactgctctccagcccgggtgacagagcaaggcttggtctggaaaaacaaacaaacaaaaaaaatagcgggcatggtggggcacacctgtagtcccagctacttggggggctgaggcagaaggattgcttaagcctaagagttcaaggctgcagtgagccaagactgtaccactgtactccagcctgggtgacaaagtgagaccctgtctctaaataaataaataaatctattggagcaaaaaaaaaaaaaaaaaaaaaacctacctaaatagtatgattgcttataataaaaatgaaagatatgcctaaaaatggtaaaaaggagaaaataaagcagacaggcatgaaagacagacttcaacgacttcaccttgttttgtgggttttrtttcaggaaaatttaaatatttttatataattattgaacaagaatcacttttcaaaagcctcttaggaagtctcaaattaaagtaagtgaactcaaatgtatatccagttattggcataaacacacagactgtaactattccaaatgaccctaacatattgtaatgtaattgtccatctctagcccagtggactaaaaaccaatacaaaactaaacaatcaaaataaaaaaaaccttaaacattttcagtaagcatattgttgcaatgtcactggcatttttgttcggaaattattgcaagtgtagtgtgggagaaagtaaatgagtaaattgtgttggtgtgagtgagaactgctattttcagtttgagagaaagaaaatactgatgtaaaatgaatgaagttaagtaaaagccttgtggcacatcagtataaactcatgaggtattttaccttaaaaaatacgtacacacggccaggcacgatggctcatgcctgtaatcccagcactttgggaggccaaggagggccgatcacraggtcaggagatcgagaccatcctggctaacacagtgaaaccccgtctctactaaaaacagaaaagattagccaggcgtggtggcrggcgcctgtagtcccagctactcgggaggctgaggcaggagaatggcgtgaacctgggaggtggagcttgcagtgagccgagattgcgccactgcattccagcctgggcgacagagcgaggctccgtctcaaaaaaaaaaaaaaaagtacacacaatcgatctatatctatatctagagagacacagatttcctatcactggctgtgtccactggaaaggaaaaacaatattcaacccagtgagaacagttcccctggggcccagtctttggtctccaaatatcatttctcactgaaagaaaccaggtctccttggaaaaaagctgatcccagagctaaggcaagaaatgtacaagatgagcctggaacatagtgttatactagaaagcaagaaaactatcaaagacagccagtattggattaaaaggactcagtagccaaactgaataggatcccaatgctcagacaggggaccatctgaacatgaaaaagggtaatcactgtcatggactgaaacacaacagatatgctgcaatctatgaatttacagtcatgctttcaaaacacagtgacttggtttgacactgtgaactagctgtatcgtgcaaattggtaaatagacagaatctagtatattatcctgcttttcctacaaaacctgaagcaccgggtagataaattacagatgcaaggagtttctcttcatgaacaataattcctgctaacaaatgaacaaataataatagaattagactaccactatttgcaatccctgataaatttatgaattcagatgacagtctcactgcaaaaagagatgccaccaaccattacctcctgaaggaaatacacaacacaacaccaactatgaagcagtcaggcaaagcaaagcaaacaaaacaatgcctctagaacttcctagcaattcccaagaaattcaggagacagagggacatgcttagcaacaccacatggaggcaatcatccaaacccagacgggtgggaaattctaccagacaaatggtctggtttctcaacagaaaaaactgcaaaataaaaaaaagacataggtgataccgagtagtgtaaaagaggtttaggagaccgaaatgacctttatttggatcttggttcaaataaactattaaaaaatcctacaacataaaataaaacttattaataagtcaattaggaaaatatgaatactgacgggatatttgatgatattgagaaatgactgttaatgcattttttggtgtgatgatgatgttgtagttgtgtatgagaagaagaatcctaatcatttatagaaatagtaaaatattttatagatattttgagtcaacagcaatctgttatgaagatgcaaggtccagggaatactgttatttggaatttgcttcaaaataatccaggtgcagaggtggagtagagaaaacgatgttggctctgctgctgaatggggtggtggggcaaaagcgttcatttaccacctctctgctttcaaatgtgtttgatatttcttttttttttaagtttttatattattattatactttaagttttagggtacatgtgcacaatgtgcaggttagttacatatgtatacatgtgccatgctggtgtgctgcacccattacctcgtcatctagcattaggtgtatctcctaatgctatccctcccccctccccccaccccacaacagtccccagagtgtgatgttccccttcctgtgtccatgtgttctcattgttcaattcccatctatgagtgagaacatgcggtgtttggttttttgtccttgtgatagtttactgagaatgatgatttccaatttcatccatgtccctacaaaggacgtgaactcatcattttttatggctgcatagtattccatggtgtatatgtgccacattttcttaatccagtctatcattgttggacatttgggttggttccaagtctttgctattgtgaatagtgccgccataaacatacatgtgcatgtgtctttattgcagcatgatttatagtcctttgggtatatacccagtaatgggatggctgggtcaaatggtatttctagttctagatccctgaggaatcgccacactgacttccacaatggttgaactagtttacagtcccaccaacagtgtaaaagtgttcctatttctccacatcctctccagcacctgttgtttcctgactttttaatgattgccattctaactggtgtgagatggtatctcattgtggttttgatttgcatttctctgatggccagtgatgatgagcattttttcacgtgtcttttggctgcataaatgtcttcttttgagaagtgtctgttaaatgtgtttgatatttctataacacaaagttaaagttcctttggtaatttggcagtgtttctcaaatgtggtttcccacagccttcctttggggtgcctgttaaaattcacattcctgacatcagcttactcggggcacttctcaaaattgaaagctgcccaaccccagatttgtgaatcagaattcctgggagtgaagcccagaaaactgtattttacatacagtatgcaggtaggtcttctgcacactccattttgctttagtcatttgcatgaaataaattatttctttttcaaagggtttaacagttaaatctaaagttttttttctattaaaggaactttacagtgacctaaaatattcttcacatgttgttgtttcatttctgtaaaatatatcctgttggtgtcatctatcaacaagtacatagtcttaaaatttttattatgggagaaagggatcagaccatactctctacagtttgctgagcgtgtggttaataaactagaggaaatagcctagagtaacatggatgaagctacagaaatgtgccttttgtatggaagacatgcttggtgacagagaagataagtttgcatttttaaaaaagtgatttgaactcagctatagcattagcatatattcccagattatacaactattcctagactcacaagcactattttccaaaaagaatgtgtcccttatccttaacacacagaacataattctttctaatgatagtgcttatcactagaagccagaggcttgttgaatgactcagtttccctggaaagtaaatatagtgtaccgggatgacagacaatcagaaacagacatcaatagcaaaggtattttttaattgtattttttaaaaatttttaattaattaatttttttgagacagggtctcgttctgtcacccacgttagagtgcagtggcatgatctcagcatactgcaaccttggcctcttgggttcaaactattctcctgcctcagcctcctgagtagctggtattacaggtgcccaccacccacccagctaatttttgtatttttagtagggatggggtttcaccatgttggccaggtttgtctcaaactcctggcctcaagtgatccacctgcctcagcctcccaaagtgctaggattagaagtgttagccaccacaccctgcctatttttattttttatcaaggcagaatcgcactatgttgcccaggctggttttgaacttctggcgtcaagtgatcctcccacctcggcctcccaaagtgctgggattacaggtgtgagctactgcgcctggcctaatagcaaaggcgctgataaaaaaaataggagagcagaaagggacagaaccagcacttagtaagcattactaaaatgctagttacactcttagaagctttatataggatttctaatttaatctttattgaagcttgtagcttttaaacttatttaaaagccccaaagattctaccaacgggcttcagagcatctgcgttttatttttaaattgaatttctcattattaagtaactgtagtttcagaaaagctctccatgtgccatatagtagaataacacttaattcaggggctagggtctaaagttcccacccaatgcagagtgtgtgggttcaaaagtatccttgaaattgtaaggtgcaaatcagatcctaataccattccactcaaacctttcaatgcttcctattacatttatggtaaaaaccacagtcctggtccatgtcaagacttagaaggccctacatgatctgaccccaactatgtgaaaccctcctcctcttttttcctgcccatctcctccctatgttctgctccagcatagtggcctccacactcccttccacatccaggcacaatcctggtcctacctagaatgctcctctggcaaatgagttctcttcattcaggtctctgctgtgatgtgtccctccctggtcgccttgtctaaaagagcaggccccctcttccctcgcccctctgattcttctcttcattcatcacagctgatgttacaccacaaagtccttgttggtttgtttcctgcgctagaatgatgctccttatttattcattactgatatatcacaggtgtacatattttgggggtacaagtgatatgtactattgaatcctaaaacttactccttctatttaactgtatttttgtatcacccattaactgacttctcttcatccttgctcaaactgcagcacctatgagtcttagcacagagaaggcactctgtaagtattggctcaataaataaaagtgtcttacattgcccaacaaggacactatatacagtttttgtttataccaccctgtgcaacaatgctcacatacagtggaatttgaaaaccactgagctaggctaaggcccaagaggaaagcctacatcagatctgtgtctggacgtccacaccactgcacctttgatgtccctagcagagatcaagcttttttgcttgcatgaagggttttcttaactccattttgttagtaaggctctacatattcaagatttgccaactgatttatttgttgctgttgttgtgagggttaaaggggatagcaagagttcttctgaagttagattcttagttaccccgttaatcaaatgtaacttccatcctggcattgccacaactactaatgggccagaccatactgccaggcttgtgtagatctcaaaataaaggtatcccgtcatctcagtgacatcctgtttctcaggtagaaaggttgtagcgctaccattgctttttttaaacatataaacttaagttctccctaygtccacttgcatgaaatttcacaagtgagcaccctagtacagcatgagtgtatcatggacaattaacggccaagaccagacaaaacaccctgagttcttgtcctcagtgaattttggtatgtaataaataaacatgtagtataaaatggtgtaataaaattaaattattggcattaaactgtcagacataccatgcttatggtagccaatgtcagagattaaatctaaagttcaagattggacccaccatgcaaagcaaagacaatttcttccttctaaaattgaaagagatgagccctccctcaggcttatgagtttcttcttcttcttgttttttaagtacatcaatgagcatctcattaatgttataatttaaaaagtgttttctccctctaatggaagatttaggctagaggaagctatcattggtcctccaaatcgcaggcttaccaattaaaaaatgtaaatggtttcacattgttagcgatatcagctttgaaagaagccatttcttttcttccttttgttttaagtgaacacgttttaagtggataagtttaaaggaaaacatatcctgagcttgcaaggtaactgtttaaaaaaataaaacaactcattattatttgcaactccttattttagggaatcagggttttctcaatactgcacaacaacataaaaaatatacctaacaacaaaaggcaataaattggaaactgaagttaaagaagattgcagctgtcatctctaacactgctttcaaatttctgtgttcatcacaaagcttcattgttctttcttcttgattttataagtcagcattacacgctgaaatctaacatacattatgctaacaaaattttcctttattcgtttcatatgttgaggtttcaasattgtgtttgaaaaagaagtagagactaaaaatatttgtaaacctccaagtaaaggcaatgaatgatacagaatttgtacctgtgggtgatcactgccatagctatataatgcctaaatacaggaaagagaagcaaaagtttacaaaaaccggtccttgtgggaactatgctcccctatatgattgcaaacactcagatataagtaatatatgaatgacttacttaatcttcctcttctttttcacwgtttgggagcaagtaggcaaagcctggaacaatcactgatgcaacatgtgtttacacacaygcatggttcttagagaatggaaggacaggagctgaatagttccatctgccagtgataatgtagctcccatcacccttcccatctagtgctctctgattcaagggaaggaatgtgctttggaagagagggcaggggcttattactcagagagacgtaggttcaaagccagcacgtttattattagcagagtaactctgaactgactcactcccattccatcgagcctcttttatctgcaacatggagatgctatgagtttctgaagattccttaatatctcataaaaataacataaaaccacctccatatgaagtattcaatgaatagcttcctcccttctggggaccttgtagaaatgctgatgaggctgctccagcgaccaaaatcaatgtccaatcttgggaaaggaccttctaggtgaaggatgtcaaccccattcctaaacatcatggagaggtcctctcagaaatacaggtgtccatccccatcctaacctctttcagcctcactttagtggttatctgtgaacgcacctgatccatgaggattaaaaggacaacaggggcggcgggggttagaacaaagattaaagtagacccccccaagggccaacgctatgaagagccacatggccattccttgagaattactaatcatgaatcattcggttctccaggatgctcctttggcttaaaccgaagtcaatcttttctaagcattaaatggggacatcttctcttcccatttaaaagcaagcagttgccacttcagctgtacaaattatataggattgaaaatagtataactggttgggcacagttgctcacgcctgtaatcccagaactttgggatgcccaggtgggtggatcaccaaaggtcaggaattcgagacaagcctggccaacacagtgaaacactgtctctactaaaaatacaaaaattagtctctactgaaaatacaaaaattagttagctactcaggaggctgaggcagaagaatcacttgaacccgagggccagagtttgcagtgagccaagatcacaccactgcactccagcctgggcgacagagcgagactccgtctcaaaaaaaaaggccaggtgcagtgcctcatgcctgtaatcccagcactttgggaggccaaggccggcagatcacctgaggtcgggagttggagaccagcccgaccaacatggaggaacctcatctctgctaaaaatgtaaaattagccgggcgtggtggcacatgcctgtaatcccagctactcagaaggctgaggcaggagaaccacttgaacccaggaggcggaggttgcagtgagccaagatcgtgccattgcyctccagcgtgggcaacaagagcaaaactccgtctcaaaaaaaaaaaaagaaagaaaatagtatagttgaaagaaacgtggagtttgtaattagagttctcttttcccccattctcaaagcaaacagaaacaaatttcacaaaaacaagttgtttaaaaggttgctatcctcctgtttctatcttcagtcttgctgtctttgtctttctaagatgccagagaagtttcctctgcatatagaaaatattctgggatttgtctgtcttgtgccctcactagggaagtccccttaggcgtccgaatgtcaggccgttcttagattgcctttttgcctataacacacgaggttgtaatgtggctcatgaacaagacagatgcctactatagcaagtagaattctgcaaacgacattcaatgacatccacagagagaagacctgcaactcggtagaaaagaaacacgatgtttggtcaactgagcaccagactgtgagctttttgagggtaaagattatgttttctccgagttcagggtgtattgmtggcattcaataaatatttagggaatgaatacatgcagggatgaatatgtgatgaacaggttacaaatacrgttcagaattcataactagtaatgaatgatatgagaaagtaaacctttccagattttgttgatagcataagattaaattcagctggaaaaggaaaacatttaggattatccatctctgagtgattgtgtgtcagtcttcagaggaaaaactgaatttttcttttaaaaagccagtgggacagtcatttctgaaaactcatttgtgaatcaaaaccagagtagaccaagtgactgagcattccaatgaaagggtaaaaaaagcagaaatatggctgatttttttcccactctcactggtgtgagattttaaagacattccttcctgtcaaaaggatggcgtcaaatgtattttaagtatcgacataaacctgcctcttcatatccctcttgttcttatagtacatctattcttgtctcattccaccacaacaagttttataatagcaggtaggtttgtgcatttatcacttttatcttttgaaaatgttacagacaattaattcacattaaaactctattactgatttaaaagttcaagatttagaatttaaggattctgatgaaagtttagcgtaaacctactttagctgactagattttttaaaaggtttaggaattgtttacctcctttaagcattattaaacttactttatcaccatcatttgcatccagacaacatgctagtcgaaagtgatttagtctttaaagtaattctttataaaattttattagatttggtgtggaggaaaagttgacgtgagaaaataaaaaaactgggttcaaggtctgtttttggtgtgtttcacttgtgtaatcttacataatcatgttacttttctcagcatcagtctcatcgatagagggggtacactctcagcactttgggatgccgaggcgggtggatcacamggtcaggagatcgagaccatcctggctaacacggtgaaaccccgtctctactaaaaatacaaaaaaattagctgggcgtagtggcaggtgcctgtagtcccagctactcaggaggctgaggcaggagaatcgcttgaacccgggaggcagaggttgaagtgagccaagattgcgccactgcactccagcctgggcgacagagtgagactccgtctcaaaaataaaataaaataaagagggrgtaaaaaaccataattgtctaagaattgctctgaggattacatcagtgtaaggtaatgaactttactgaaatgtatgcaaaaaatatcactttcattatcattatcatcatcatcatcatcttcacctgatactttaaaaacttcaaatgaaagagggtaagaaagaacccactggatcccctactctgtacctggcattgtgctacaggttgtgcatatgtcacttttaggttacaacaacagcccaactgtctacacataaatttatatctgctgtataggaataaactatatttctaattctggaaaatgaggtgcagagaggattaagtaacatgctygaattcaagtatgcttcaataattaaatcgaagctgggcgagatggctcacacttgtaatcccagcactttgggaggctgagtcaggcggatcacttgaggtcaggagttcaagaccagcctggccaacatggcaaaaccccgtctctactaaaactacaaaaaaggttagccaggcatggtggcacgtgcctgtaattccagctactcagacaatcgcttgaacccaggaagtggaggttgcagtgagctgagatggctggactccagcctgggcaataagagcgagactctgtctcaaaaaaaaaaaaaaaaaaaaaaaaaaaacagaagaattagatcgataaatatttactgagtgcttacagtgtgccaagtactgatttaggtacagggatagagcagtgagctgagcagacaaaatccctgccatcagagagctgaccaggaactgaattcttctgaattcaaaatcattgttttccccactccatattgtgccagtgcttggggcttgcacttgctctctctaaaggaactacttgtatagaaaataacatctgggcagcagcataattgcataaatggttaaccccccctgctaggggctctgtagcctcaggggtcaaggctgcctgagggctgaggcaatccatacttggatatacctgtagcccatttgtaacaaactggcttgagaagctgcattatctacagtgtagccaatgattcaggaatatccctaatttgtactgatttcctcccatgttaattattattgctacacagtacatgtaattgtattatacagagactggaacagactttccactctcttactgccatagacttagtgcttttggcaggtcagcaagatgaggtcaaaacaacctttgtagtcagcagacaaaactaaacagccatcagaaacatttttaaaatatgctattaaattattatagtagacagcaaaaccaagaaattaatgcaaaagaaccaagagatttcttaatcttatcaccagttcagattcagaaaaagaactaaaagctgtgatctgggagcttggatattatagcaattaagcagcttggatataaaaagaggtagataagctcaccttcagggggactcagcagtgaccaccactgttatgtatggaaaggagtaaagggaatgcgagaggatatatgaacttgaggtcaggaaacatgtggcaggcattgggttgggaagactgtatttactgaggatctgaagtgtggcaaatgctctaggagacagaaggaaggaaggagagcatctctacaagtaacacccaatctaaccaggtagtaagactcatcttgatgtaaaaaagaagtaaccacacaacagagctgtagaaaacttcactattagaaaacaaacaacccagtttttaaaatggacaaaagacctgaccagacaccttaccaaattagacatagagatggcaagtaagcacataaaaagatgctccacattatgaatcactagggaactgtgaattaaaacaaacacaagataccacctatgaaaatggccaaaatccaacacactgccaacagcagatgctggcaaggatgcagagccataggaactctcaagtcattgcgggtgggaatgcaaatagtaagctacttgggaaaacagtttggcagtttcctacaaagctaaacatactcttaacatgcaatgtggcaagcatgctccttggtatctacacaaataaactaaaaacttaagtccacacaaaaacctgcactcaaatgtttatagcagcttcattcataatcgtgaatgggtacatgaactgtggtacatccatacaatagaatattattcagcactaaaaacaaataagctttcaggccataaaaatgagaggtgaagccagctggacttcctgggttgagtggggacttggggaaatttcccgtcctacaaaaggattgtaaaacacaccaatcaggaactttcctgtcttataagaggtttgtaaagcgcaccaatcagcacttggtaaaatgcaccaatcaacgctctgtaaaatgcaccaatcaacgctctgtaaaatgcaccaatcagcaggagtataaaagtagccaatcgcagggaggattgaaaaaaatggcactctgataggacagaaacagaatatgggaggggacaaataagggaataaaagcgggccaccccagccagcagtggcaacccatttgggtccccttccacgctggggaagctttgtcctgtcgctcttcacagttaaccttgctactgctcactctttgggtctgtgccatctttaagagctgtaacactcaccgtgaaggtccgtgcctccattcttgaagtcagcgagaccatgaatccaccggctggaaccaactctggacacatcttgggggatcctcccagatattgcaacgyggtgagtaccatcagaccccttttgcttgctattctgtcctatttttccttagaattcaggggctaaaactaggcacctgtcagccagttaaaagcaactagcatggccacaggactaaggacatggatgtcaggctctctgggaaagggctcactaacaacccccgactgtttggagtcaggagcattggtttgcctggaaccagcttctgcttttcctgcacttccgggctaagcctagggtcgacagagrggaaagccattcagctccggggtctcaacaaaaagttggttggccctgcagccatgagcagaactctcaaagttacatagcccaaacaagactcacccatctatcctatctatcctgacccttgcctcctgggtcctaacacctgtcagacaaactttctcccgcctctcttctccaaggttagtcttgcttctaaaaaccactccctgtccctggtgctcttccagtttctcctataaggatgatttctaatataaatttcaggactctgctcccttctttaggcacccaggctcaccaatcagaaagacataatttttgtccaaagccctgttgtgggggactatctggaattttaggatccctcctcagactagcagacctaacaaaggctattcccaaagctaggataggaggagactcagaaattatatccttcctattcatatgataagtgaggacaaaacgcatcactcttccaaccctggagatcccttccttccctcagggtatggccctccactccattttgaggcatattatctttatagtacaagggtaaggtcctaataacaacaggagaaaacacttaggactctaacaggttttcaagaatgcattggtaagggccactaaatctgacttttctcagtcctctttgtggtctaaagacgaaaggcaagggtgcaggtttttgagaatccattggtaagggccactaaatctgaccttcctcagtcctttttgtggtctaggaggaaaactagtgtttccgctgctgctttggtgagcacagctattccgaacagcaggatccagggactgttgtgggttcttgggcagggagaagagaaaaaaaaaaaaaactgcaggcggttttttctttcagatgggaaacacccaggcatcaacaagctcacccttgaaacgcatcctaagccattgggaccaatttgtcccgcaaaccctgaaaaagaagcggcttattttttctgcactacggtctggccttaatattatctctytaatagggaaaaatggtcacctgagggaagtataaattacaacactattctgcaggttgaccttttctgtaagagggaagggaaatrgagtgaaataccttatgtccaagctttctttttactgaaggataatccacaactatgcaaagctggcgatttacattccacaggaggacctctcagattacctccatatcctagcctccctacagctccccttcctattaatgatgagcctcctctaatctcctcyatccagaaggaaacaagcaaagaaatttccaaaggaccaccaaacccctcaggctatcagttatgtctcctttaagctgtagggggaggggaatttggcccaacatgggaccttctctctctctgaattaaagcagatcaaggtagacctgggaaagttttcagatgatcctggtaggtatatagatgtcctacagggtccagggcaaaccttcgacctcacttggagagatgtcatgctattgttagatcaaaccctggcctttaatgaaaagaatgcagctttagctgcagcccgagaatttggagatacctggtatcttagtcaagtaaatgacaaaatgacagccgaagaaagggacaaattccctaatgggcagcaagccatccccattatggatccccactgggacctagactcagatcatgggaactggagtcgcaaacatctgttgacctgtattccagaaggactaaggagaattaggaaaaagcccatgaattattcaatgatgtccaccataactcagggaaaggaagaaaatcctactgccttcctcaagcagctatgggaggccttaagaaaatatactcccctgtcacccaactccctcgagggtcaattgatcctaaaagatgtttattacccaatcagctgagatatcaggagaaagctccaaaagcgagcccttggccctgaacaaaatctggaggcattattaaacctggcaaccgcggtgttctctaataggaaccaagaggaacaggcagaaaaggaaaagcgagataagagaaaggccgcagcctyagtcatggccctcagacaaacaaaccttggtggttcagagaggacagaaaatggagcaggccaatcacccagtagggcttgttatcagtgtggtttgcaaggacaccttaaaaaagactgtccaacaagaaacaagctactccctcacccatgtccactatgccaaggcaatcactagamggggtactgccccagaggacaaaggttctccgggccagaagcccccaaccagatgatccaacaacaggactgagggtgcctggtgcaagcaccagctcatgtcatcaccctcactgagccctgggcaagtttagccattgagggccaggaaattgacttcctcctggacactggcatggccttctcagtgttaatctcctgccccagacagctgtcctcaagatccattaccatccaaggaatcctgggacagcctgtaaccaggtatttctcccacctcctcagttgtaattgggagactttgctcttttcacatgcttttcttatgcctgaaagccccacacccttattagggagggacatattagccaaagctggagccattaactatatgaatatggggaacaagttacccatttgttgtcccctacttgaggagggaatcaaccctgaagtctgggcattggaaggacaattcggaaaggcaaaaaatgcccacccagtccaaatcaggctataagaccccaccacttttccttatcaaaggcaatatctcttaaggcctgaagctcataaaggattacaggatattgttatacatttaaaagttygaggcttagtaagaaaatgcagtagcccctgcaacaccccaattctaggagtacaaaaactgaatcgtcagtggagactagtgcaagatcctagactcatcagtgaggaagtaattcctctatatccggttgtacccaacccctataccctgctctctcaaataccaraggaagcagaatggtttcactgttctggacctcaaggatgctgccttctgcgttcctctgcacttggactcccagtttctctttgcctttgaggatcccacagaccacaaaacccaacttacatggacggtcttgcctcaagggtttagggatagccctcatctgtttggtcaggcactgtcccaagatctaggccacttctcaagtccaggcatgctggtccttcagtatgtggatgatttacttttggctaccagttcrgaagcttcatgccagcaggctactctagatctcttgaactttctagctaatcaagggtacaaggcatctaaatcgaaggcccagctctgcctacaacaagtcaaatatctaagcctaatcctagccagaggaaccagggccctcagcaaagaacaaatacagcctatactggcttgtccttgccctaacacattaaaacagttgtgggggttccttgggatcactggcttttaccgactatggatccccggatacagcgagatggccaggccactctatactctaatcaaggagaccgagagggcaaatattcatctagtagaatgggaaccagaggcagaaacagccttcaaaaccttaaagcaggccctagtacaaactcaagacttaagccttccccaggacaaaacttctctttatacctcacagagagagcgggaatagctcttggagtccttactcagacttgtaggacaaccccacaaccagtaaggaaggaaccccacaacctaagtaaggaaattgatgtagtagcaaaaggctggcctcactgtttacgggtagttgtggcagtggctatcttagtgtcagaggctatcaaaataatacaaggaaaggatctcaccatctagactactcatgatgtaaatggcataccaggtgccaaaggaaatttatggctatcagaaaaccacctactcaggtaccaggcgctactcattcagggactggtgcttgaaatacacacgtgtgcagccctcaaccctgctacttttctcccagaggatggagaaccaatcgagtatgactgccaacaaattgtagcccagacttacgcttcccaacaggatctcttagaagtacccttagctaatcctgaccttaacctatataccgatggaagttcatttgtggagaatgggatatgaagggcaggttatgccatagttagtgatgtaacagtacttgaaagtaagtctcttccccccacggaccagcgcctagttagcagaacttacccaagccttagaaccgggaaaggaaaaaagaataaatgtgtatacagatagcaagtatgcttatctaatcctacatgcccatgctgcaatatggaaagaaagggagttcctaacctctgggggaacccccattaaataccacaaggaaattatggagttattgtacacagtgcaaaaacccaaggaggtggcagtgttacactgctgaagccatcaaaaaggtgaaggagaaaaggcagaaggaaaccactgggcagatgctgaggccaaaattgctgccaggcagaacctcccattagaaatacctatggaaggacccatggtatggaacaaccccctccaagagattaagccccagtactccctgatcgaaacagaatggggactttcacgggggcatagttttctccccttggggtggttaacggcagaagagggaaaggtactcatatccgaagccagccagtggaaaatacttaagaccccctgccaaacttttcacatgggtttgagaacactcatcaaatggccaaatccctatttatggggccatatctcctccagaccatccaacaagtagtcaaagcctgtgaggtgtgccaaaggaawaatctcttggtccatcgtaaggccccttttggggaacaaagaataggtcactatcctggagaggactggcagttagacttcacccatatgcctaagtcaaggggatttcaatacttgttggtctgtgttgaccaaccaaattggatagaagccttcccctgcaagacggagaaggctcaggaagtggttaaagtactaactcatgaaataattcccagatttgggcttccccaaagcttacaaaacgacaatggtccggctcttaaagccacggtaactcagggaatttccagggcactagggatacaatatcactttcactgtgcctggaggccacaatcctcagggaaggctgagaaggcaaacgaaacactcaagaggcacttaaggaaacgaacacaagaaactcatctcccatggcctactctcttgcccatggccttgttgagaatccaaaattctcctcacaaaatggggctcagtccatatgaagtgctgtatggatgaccttttctcacaaatgacctcctacttgatcaggaaacggccaagttggtcaaagatataacttctttggcaaaataccaacaaaacgttaaaaacctacccaaaggatgtcacagagacaagggaacagagttgttccaaccaggagatttactgttggtcaagtccctcccctcttcctcctcatctatggattccttgtgggaaggaccatactcagtaatcctctctacccccactgcagttaaggtggcaggagtggaatcttggattcactacatgcgagttaaactttggacaccccctgaagaacctgtaggaccatcagctcaggagtcccaagatcagccagaccagcctcgataaacctgtgaaccattggaagatttgtgtctcctatttcagaaggaaacatcccagactaaaaaggcccctatagctgatcctaaggaaaaactctttcctatttaaaaaggataagtgaaaacctacataatctttaacaccactccttgcccctttaatggaatccttttacagtttcatcacattattaagcagtatactaaccattctctttgcagcaggactatatactgtagctcctgccgggacaaaaatcctaatcacatcaaccttttttacatgcaatccagcttttacgctcttacatttccaacctcacctattacatgagcaatgaaaagccctgtaaccgtgaataccatcttaactttccaagccccgttatgcatccaacgcaacctgttatcaggcctgcccctggggcacctactatcccatcagtgtaattacactctccaacttcaagccccaaatgatcatagtaacttccaaggcacccaaaccgctctattcagatggcttgtccgcttctcagggcccccaaaaatcatcacctcctccctgcttaacaaacagtccaggttttgtaatggcaaacatactccctgtatgactattcacccctggaccccctgcagcagcacccccaccactaaggaawaccttctcatcctctctttcaatcactctcttgaatggttcctagtagatacaaaacagttttttctccaatgggaaaatagagcacagggagtcactcagtttgctcccaacacccctttccagccactcaccagactaccttggcaagtactctaggagtatgggaaaatgaaaacaacaaactcacacacctttttaacatacacaaccagttctgtctacccagccaaggcatattcttatgtggaacttcaacttacatctgcctccccactaactggacaggcacctgtaccttagtcttcctaagtcccaacattaacattaccgcaggaaatcagaccctatcagtgcccctcaaagctcaggtccgtcagtacagggccatacaactaatacccctacttatacggttaagaatagccactgctacaggaaccagaatagccagtttatctacttcattatcctactaccacacactctcaaaggatttctcaagacagtttgcaagaaataacaaaatctatccttactctgcaatcccaaatagactctttggcagtagtgaatatccaaaaccgccaaggcctagacctcctcactgctgagaaaggaagactctgcaccttcttaggagaagactgttgtttttacactaaccactcagggatagtacaagatgctgcccagcagttacaggaaaaggcttctgaaatcagacaatgcctttcaaactcttataccaacctctagagttgggcaacatggtttctcccctttctacgtcccatgacagccatcttgctattactcaccttcgggccctgtgtttttaacctctttgtcaaatttgtttcctccaggatcgataccatcaagctacagatggtcttacaaatggaaccccaaatgagctcaactcacaacttctaccaaggacccctggactgacccaccagccctttggcctagagtgttcccctctggagggcactacaactgcagggccccttcttcacccctatccagcaggaagtagctagagcagtcatcacccagttcccaacagcagctggggtgtcctgtttagaggggggattgagaggtgaggccagctggacttcctgggtcaagtagggacttgaggaactttcctgtcttacaagaggatgtaaaatgcaccaatcaggaactttcctgtcttacaagaggttcgtaaaatgcaccaatcagcactttgtaaaatgcaccaataagtgctctgtaaaacgcaccaattagtgctctgtaaaatgcatcaatcagcaggattctaaaggtagccaatcgcagggaggattgaaaaaaagggcactctgacagaacagaaatggaacatgggcagggacaaataagggaataaaagctggccaccacagccagcagcagcaacccacttgggtccccttccacgctgtggaagctttgtccttttgctcttcacaataaaccttgctactgctcactctttgggtccatgccatctttaagagctgtaacactcaccatgaaggtccgcagctccattcttgaagtcagcgagaccatgaacccaccggtaggaaccaactccagacacaaaaagacatagaggaaacttacacgcatattgccacatgaaagaagccaatgtgaaaagggtacatactgtatgattccaactttatgacattttggaaaaggcaaagctacagggatagtaaaaaaaaaaaaaaaatcaggggttttggggattgggaggaacaaataagcagagcacaaagagttgttaggacacatgtcatctatttgtcaaacacagaatgtacaacaggaagaatgaactctaacatgaactatagactttagttaataataatgtatccatattagttcaatttcaacaaatgtaagatgcaagatgttagcagtagggacactgtttgtcaggggtsggggaggctaggaatataggaactctttgtactttcaaatcaatttttctgtaaacctaaaactgttctataaaaaagcctattaattaaaaaacaaaaacaacaacaacactgcactgacagctgtttgaagtgttcctcccaggtgtccttccagatactagctagagccaagtggaattaatcaggcaaggtgcaacggctgggtgtggtagctgatgcctgtaatcccagcactttgggaggccaaggcaggttgatcaccaaagrgcaggagaccagcctggccaacatggtgaaaccccgtctctactaaaaatagaaaaattagctgggcatggtggcaggtgtctgtagtcccagctacttgggaggctgaggcaggagaattgcttgaacccaggagacggaggttgccgtgagccaagatcgtgccactgcactccagcctgggtgacaagagtgaaattccatttccaaaaacaaaacaaaacaaaacaaaaaatcagggaaggtgccataaagatgactcccaggcaaggtttgaagggctagaggagagccagttttttggccaagaactaggaggatgcaatgattcagatggggatgagggcaagggcagggtctggggtgggatgaatgcatggggaagagtagtcagcagagcatcatgtttgaccggaagacaagagccacaagcctccagttctttagcagaagaactggaggtaaagataggtgcatcaaagatagcctgtgattaggaggttaaaatgaaatctgaaagacagagtcactccagactctgggaaagctcatgatgcaatcaaaatgatgtaccaagaggtgtctctgctaagtccsggccacataaagacatgagagatggggaggcccactacaggtgaggtcatgagtccttgctttgagggaaagtaaacagaaaatacaaggattctaagggaatgcataatttccaagaaaagtcatagcgaactgtgtccaggaagctgagatggaagaggaataacttcttaaaagtactaaatgtggccaggcgcggtggctcatgcctgtaatcccagcactttgggaggccaaggcgggtggaycacaaggtcaggagatcgagaacatcctggctaacacagtgaaaccccatctctactaaaaatacaaaaattagctgggcgcagtggcaggtgcctgtaatcccakctactagggaggctgaggcaggagaatcgcttgtacccaggcgggggcagagattgcagtgagccgagattgcgccactgcactccagtctgggtgacagagtcagaccccatctcaaaaaaaaaaaaaaaaaaaaaaaaaaaaaaaaaggcctaaatgtcaggagggaacccaagaggataactctctatcaagtagggttcctagatttcttctctttcagaattctcatctgatcatatttaggatagcgcaagagggcagtacaattgatattggcagaaaagagaaaagggggcatatccaactggtgaaatcgaagaactttcactcttacattcatatactggaaaagtcagtagccagaaaaatattttgaaaatctgtaataattcagatggaaagacattcacaacttttgcaatgtgagagaagaaatttcggaaaagtagatcaagcaygattctatttctgtaaagctacatgtatttatttgtatatatatatatatccatagaaaatcttctggaagaaaacacactcaaatgctaacggtggtgaacatctatgggcaggtagataataatgacatggcagatttttaatattactagtttgtatttccttaatttctcttcaagctattacagagaatccatgtaaaagactaatgttttcaatgaaaggattaatgttctttccatctcataactcaagtttccaataacgtcttcctcgctgagggtrgaatagtcagtgccttacacaaaagccagtgtttgcattaaatgactgtggtgcagcctcgcataacataaatgacttcaacagccacatcctgatgcacaagggaaaacaaaggaatggaaatttcaaaaagctaaagtcacaaaaagtaatggaaggagtagtracaacagcagcaaagggaaatgccctgggyggggagacagacccccacccacacatccccagcacttgttttcttgactctggaggcgctttcttgattagtctatttaaaaaaatgttattgttttaaaaattgtagctaaaaataacatcaaaatgcacaacatatgcagaaacaccccatgatgcaaattatgtatgaagaggatgcagcgatgtggccgggagttagcatgaagcgtggttattctatcacggagatatgctcctcatccacaaaccagagggacgcacggtccaatcaccagtgtcaggttttactgtttggttttatttgtcaaaactactgctttacatgcagaggagggaggagtgtgtgtttcttcgggtgggggatggagggagcattatagaagaacacgcatcccagtgacagtatttttaaagactctatctaccatcttttctgaactaacaatttcaccttgaaatctgttacaataagtacctttaatcaaaagccatttgttttccattcttttctatgggcatacattcactatagctatttactgtagttcattatttcagcatattgcaattatcattgttgtagccttcaatcctattgcattaatgtaggagtatgaaaaagtcagaaaggaaaacttaaaacagttcattttaaactgtattgcctgttaacaaccctgtccaaaattttagtaggtaaaaaagctgaaccactgcctacaagaagaccaaaagattgtctgaagattccatttagtacttgtttcctgttctctgtaaaacacggatattctcttggtaaagacattccatttctatttctatctagtgaccatcgaatatgttgtaacttgtttacctattaaatagggaattatagcaataatcataggaattgcagtggcagtaacaataaaaaccagaataataatttgtctcctatttgccttcatagtaacattactaagaactaataaactctgaggctagagactaaagtaagaatttggtttaggactggtttttattattatttttatttttattttattttattttgagacggagtctcactctgtcgcccaggctggagtgcagtggcacgatcttggctcactgcaagctccacttcccaggttcacgccattctcccgcctcagcctcctgagtagctgggactacaggcgcatgccaccacgcgtggctaatttggtttttgtatttttagtagagacggggtttcactgtgttagtcaggatggtcttgatttcctgacatcgtgatctgcccgcctcggcctcctaaagtgctgggattacaggcgtgagccaccatgcctggcccggactggttattaccttataaagggaagtaccatcaaattgttatcagagtaacttgtttccagggaagccactgtgggatgaatgaacagtcactggaaccagtaagcgagtatatgctatccctgggctaggagttgctggtatatactgaagtacacagttacaaatcaatgcaaagcaaattagccaaaagaggcaaaagtcactcccctttstaagcagattgttaacaatgtcctaagagaatgcaagcatttaaaaactgtacatggctgatattggaaatattgagatttagagcaactagagaagttttcagatgcttgagaatatacattgaaacatcaccttacttttgaacagaacacaaacttacttagatcgatgcttcttctgaatagaagcagaaaaaaaaaaaaggtaggactgtgatagaaaactatttcagaggttgatccactcatctggaccaagtccctgcacctaaaaatacaggaagttagattttaaggtttctaaaatctgccaaaactgtgcaacagagctggcccttggctgtccaaaccttctagaaaggcagagttttaaaatgcacttacaccgtgggcacccaataaatgcttgatgaataaatgagtgaaatgaatgaatgaatgcatgaaagaatgagtgagtagcttattgaaagttgtctgtgacattctattagggcctgaaaaaccaacagcaattatacaagagtcttgcccttaagaagcttctattctatcaggagaagcaaaaatataaataagtttaatacagtgtgatacttgcagtaataatgcaagaccttatcagggagcaattagtgaagaactaggcaaggggttaaagaaagcttctaagataggatctaattaaacaaattcacaccaaggtgctaatatcttatctgtggcctctgccccaggatcatttgcattttaatagaaaactagctgatggctttgcttgatacttgaggactgaactactattagtagcatttcaggcctcaggaaagaggtcagcagaaaggatgcttcaaataacactactaggcagaaagtctacctacagttctatcatgaaaaaaggttcaaagtgggtagatgcaaggcttcttcaaacacttgtatytaataaagacgtgaaagagagttggtgaagactgggtgcggtggctcatgcctgtaatcccagtgctttgggaggccgaggcaggcagatcacctgaggtcaggaatttgagaccagcctgaccaacatggcaaaaccctgaccctactaaaaatacaaaattagcctggtgtggtggcgggcacctgtaatcccagctacttgggaggctgaggcaacagaattgcttgaacctgggaggcagaggttttgagccgagatcacaccactgcactccagcctgggcaacaagagcaaaactctgtctcaaaaaaaaaaaaagaaaaagagagagttgatgaatggtttcaaagagtttcaaagagatatttgcacactcatatccatagcagcattattaacaataaactaaaggtggaagcaacccaagtgcccactgatagatgaaggataagctaaatgtggtctacacatacaacagaatattattcagtctaaaaaggaaggaaattctgacatgctatagcacagacagacytgaaggacattatgctcagtgaaatgagccaggcacaaaaggacaaatactacatgattccacttatatgagccacttacagtagtcaaaataatagacagcaagtagaatggtggctgccgggggctagggtggagggtagagcattagtattttatgggtctagattcagttttgccagaaaaaaagaggtgtgaagacaagacaatggagatggcttcacatcaatatgaatgtacaactatacacttaaaaatggctaagacagtaaattttatgttatgtgtactttactataataaaaaaaactggaaaattatgttggtgaactataccatagctttgaaacttacatgcaaagttatctgattattattatgttagctattttatatggaaagttattggacagaagtcagaatgggtagtttagactgattaggtagacagctgcttgcttcctaatctgtttgaaaaatgacacccaaaagatctcccctgggatcagctgaaatcaccattaaaaaaattcaggccatgcttgtaatttcagcactttgggaggtcaagacaggaggatcacttgaggccagggagtgtgagtccagcctgggcaacatagtgagacttcatctctataaaaaataattaagagaaaaattaaatccttccaacccttagcctttgaaaaatgcaattatcctagccaaggtctctatcagcttaatgtgagtgtctcaacaagactgtttttctccacaggccaaccaaggtacctagactgatgtgaggcatttggaagaggggaaagattcgwctggaaagggaacagagagtgaccagccactgaaaggacaggcaggaaccactggaaacaaactgcgcctactttgaaatttcccccacagcacagatgaccttttgccacaagttttcatacaagctttgctttctcattccaataatctccctgctatctgaaagacttctggcaattaaaamacacacacacacacacacacacacacacaattcaaaacttgaaaagggcttcatcagaagatgaacaggtcttctgcgaaataattcccaaccatcacaatgtaagttaatcacaggaagtaattttgaattttcagtgtcatcctgaaactgaactatggttagtaatttgagattgagatgaacgaagtaaatggagatgccttagagctcggcattcctgagtttgctgcaatgagtagttaagtttgaagaatctagatatgtgaatgatgtaatagataaggcagacagattggatcagaggggttttaatattaagataagtgacaatgatagctcacagtcatgaccttatgcctatatcatagagtgacactagacagccagtgaaatgcaaagcagccatgtgccctggattagattcgcacctctctgtagctgggcagctttcagtagagcatgtcaggagtgtgcgtatgtgtgcatgcatgcgtgtgtgtgtgtgtgtgtgtgtgagacagaaagagagagagtctgtcattgtaatatacagggagtttacataagagaaggttggaagagcaacaacaatttgaattaaggtagcctatttttctttataagacactcggaatacctaacaggccttaacttcatcaatctccgcaccatctgtcagaccttaggttacagtgaccacccccatgcattaatcaagaagaggcaaccaagtgtgtagctttgagaaaagttctgctctttcagacttgactgtattattaaaatttctaaaaaggtaaacaacaggaggtggttttaatcacagtgttgactttgattgcatacccatgtccctggcagcttagaatggttacagcgcttaaggtaacatacaaagtgcagatgagtaagaaaagaacctgacaaaactcagtgaaataacacgcaggtggcagcatatgcacacctgcgtcttcaccccacttccaaaaataagaagattctatttttttttactgtctactccatacactctagaacagattacatacatatttataaagagaaatgtattgtttcaatattttatgcaaaacttcatgtaaggtcatgtgtttgtacagcacaaaacatggaattgggtatctctccagtcacctataaagctgagctcatcccttcttctggcacttgttctatactgtgttctggaagccagaccagattgaacacagcaaaccatatcttcctttcagtatagaatgcaatgagtcagtgtttatgcaatgatctgctattaaagcaaataagcagaatcaggaattccaaaacatgccatgttttcatttccatttcacatgagtataaagctcaccaaatttgggcactttaaattatgaagtctcctatcacacacttctttatcagtcctccacataattgtttaactaagactctgataaaaatgtcaaaaatgcttgccatggttctcagcagcaaacaaatgcctgcaggctccgagcatgccctggggtttttcaaaccctctcctgtctttgaaaatgcatcccattcagttagcagtgctggtgataagacatggcacgcagagggtctaaaccaccacccctaaaggtgccagagcagaaccctgcattgagtttaatgctgacagagcactccaatcagtcagtctgttcgaactctttgattggagaaaaggtcagaatctgagctacaaaagtggcctgcctgcccctggaagattaggtcctgggtttttagttttccttcttgtcttcctctgttcccacaattcccatttattttcaattatttggttagggaaggtgtccctcaaggaaaagagcataggaatgaaggctgcctgccctacttgtagactcttctgtatgttcttttttaatgaaaaaaattagaaaacttggcaaattattatctgcatcgcacacattttgatgctcccctccctcaattttacctataaaagatagcacttccaacatttgagttataaccccaaggactgaaaaatacccagccactccgacccgatatcaggcagtttcagtgacaacaaactggtccccaaacgtaccggtgaaaaccacacgttctcactcttggcgacttgaatttggtgaaatgaaacagtcatttctatttttgccttttgaaagagttatgcttaaaggtgtagtgaaaaggtcagatctggaaattaatgggtaagcatggtcctatccgaggtcagagaagcattttgagagtgccccagagcctttagaacacattgtttattttgaggtcaaagggaaaaacatgttggaaggaaaagagtctttggctgggtgatgacaatgacaagaagacacttccagagactggaatctctttgactcagccccttggtaggtgtttatttagaacccaaggacattggagtctggcaggatcccacaaaggagcgaggtgaggaacactggtggagttctcccaccagattcatacggatattgctgatgacctgmgcctctgtcttttctgctctaccttgaagggcctccaacctcttttctggtcacattgttctgaaagtacacgtcagctttgagccacctctcagtcaagtccttccatcttctcctatgctatccctgggtcatctctttggaaacttcctgaattgtctaggctaacgagtgtttttaggcttctaccacctaaccatgtctctacacatctcattgatcatgtcaacatcctgcttaaactctttcaatgaccactcccctgtcttcaagataaactctaaactcctcagcagaacttactgaaaagacactttatgatctggcttyttcttcatgagacttcacatatgcctgactccagccactccaaactacttgctgtcttccaacatgccatgttctctcttacctttgagctttgctcatgttgtcctcatgtgactagagctggagtttccccatcctttgaactgaacaaattaagtaatttgctttggttaaagggaaattagcaagcatcttgaagcagagcttgaaaagcactcatgcactggggcttgccctttcttgctgcttttgggaacccttagcctgcaaagtgaagaagctcagactagtctactggaggatgagaggccacctgaagcagagacaagctgtcccagctgaagatcacccatctctcaggcaaaccagccttctagtagctatgtgagtgagaccatgctggattaaccagtcccagccaagctggcccagactaaaatagtccaggtgacccacaatcataagattgtggtcttggcccttaactgttgggatggcttgttacacagtatatgctaactgatacatccactttgttttctggttaacatctactcctcattcaagtctgaggatgaaagcttccctgatcccagaagatgccatgctggtctgcatccatggcaacctgtgggtaccattaggagagagctggtcatggtgtaaaggaattgcctgttttctcatttctttccccagtgactgaaagctcctttaactactgtaggtgcctagcctgtagcatatgtgtgtgcatacacacacacacacacacacacacacacactctctctctctctttctgtaaatatttgctgaaagaagatacaagaatgtagatatccatcttcaggctttcttctatcctaaatttcaaagaattagactagactgtttttacctatcaccacctagacacggtaaccacatcaaaatgtattttaatgttttactttttcagagttctactcatatcaacagcctttgggaatctccctactccttttatagatgagactattatagtttccaaactcactgtgcctttcagtttgactaatactataaaattcacctaaaattccaagggccctcagcatatgcacatggataattctgacaaatgtgtcaccttcactgtcataattattctactatatacatgtcaaggaagcagaaggtcttaacaatacataaccgaattcactgtcagtgtaatgacaatgacagttaatgacaactcctattatagcagaaatgtctctacaacaaagagatgagcaagttgcaactgctcacctgttcacttcagcaacgcatcatgatagattttgttgtgtgaaatttatcataacagcatcatggctgccacagttattagggagcaatcactgggctaaaaacttaacagactttatcgcatttaactctcttaacaggtcatcagggtaggtgtggtcagaccttctttatagatgaagtaaataaggctcagagaagttgggcaatttcccaaaggacacacagctactgggtggcaggtctgaaatctgaacccaaatgtgattcaaagagtctcttatatgaactaatactttaaatctgatgctgttaagtggcagtgataatgatcttcctttggaagataaggaaatagaggcacccagatagagagtagcttgccactggtctaaaagggcagggatgggaagagaacccaggtgtcccttcttagcctgaggttcctgctactggacagagcccaaggtgtccctatcttctccttagtcattacttttttttttttttttgagatggagtctcactctgttacccagactggagtgcagtggcatgatcttggctcactgcaacctccacctcccgggtccaagtgattctccygcctcagcctcccgagtagctgggactacaggcatgcaccaccatgcccagctaattttatatatatttttagtagagataaggtttcaccatgttggccaggctggtcttgaactcctgacctcaggtgatccacccgccttggcttcccaaagtgctggaattactgtgcctggcctagtcattaatattttgattaacgcctacccctgtgatcaacgacaacttattcaggaagaagggttctttctactctagtatgcttccagttatttactgtgtatctagctaggttgtgaaaagaaaagaatatgaagcacgaagttcatgaaacctaactggtctatcatctactttaccaaatttcttctaaaaaagcaaccatcaaacccagagaagaatttgaagcttctaactttaatgccattcacattagttgtatttcttattcatatgagagaactatctttatkacctgtgcactataaagaatgatgagtatttaaacactaagtgttgaattaacagttatataataatccaaaaaaaaaaacaaaaaacaaaaactgtacttctccactgtatcaaaatgtacttaataggtatttattgtttcaggaatatacaatgtcttctatcatttaaatcattttgtcaatttaaaataatgacctggctgggcacactacaccctgtcaaacaaaactgatttactytatctcatacaaaacatcctgaaaatatgggatgctctgaaagtgccaacagctacccttggagtttttctttttccaaaaattatttctttcaattccagtcccagatcttcactaccagcccttatttcagctatggtagaaggagtgaatataccttctgttgagtatacaaaacrtgctagaaatggtcagttacaccctaaatgtctttcccatcataagcacacagtttcatgcaattatctcgacttgagtgtggtcattcagtggaacaaatgacaacggtcattgagactacaaaaactcttttagtcgtgaagggaaaggcaacaatgcatacgtcatacttcctgtcatctgtgggtcttcaatgctctggggacaccctttcatcagtctcccttgttccccatttccttgcaaagacccaccttgagtctctttcttcgtgaaaaatgtcttggcatctccagggccacacagacgaagcactctcaggagaaaatgtcacccaaacccattgcctaggggcttccacagagaagtggccatggagggaagcccccagctctgccaatgtcacttgactgtccattttagatttcatctaggcaaggccactttggacagggactttaagatacaatccacagtatttctatgttctttggatccaaatcggaaaatggcagaaaaagtcatttagkgccaattcaatgtggcataatgagaggagagcaattaagaagattacaaagtgagccatattcctcttcaaggctgggtgcatggataaattaccagagctcagtaagaaggctctcgttacactggatggctttcaggccagacctgtcaacaggaaaaggggccaagagggactgtcatggtgtttcccttccttctgcctcccttgacctctgattcctcccaaacatctactcatgtctccaactctgcatgccagtgctgataaacaagcaaaacattaacctaattcacaagaaaaactgataccatcagatgctttgagatcgcctaacatcttggcccggcagtccccacattctgcctggactacccattaattcatttgttattctccgtgggattctatctgtaccagaaagaccatgtggtycatgatccttagtaagtgacactcccatgatacacttagtaagtgacgttttcctcctggaggcctgcccagatgagggaaatggaaaatcctctttgagcaaggtgactgccaactcccttctgaccctctcgaggccaccctcttccaccaccactcccttacttgcctttaacgaagtgccagccagcacgttgctaggacaactggcgtcactgcggaggcacagaaatagatcaccagtggggctaggaacctggattataaacgccaatgacagtgatgagatactgattggcagctaatctgtcccctatagcaagtgaccgagtaacactacccagtgggcagctctcaccttgacacactaccctttcatctacatttgtgcttgatgtggtagtgactgagaaggggcaaggaactagctttagataggagctgcatgactctgttttgaattatgtgagccagtagatatgtagtaaccacctgacatttgcacctttaatttgttagtttcctgaaaattagggaggaaggctgttcacaagccgaagtatgacagccagaaacaggtagagccattgaggttgccaaacagaaggaaaaaacaatctgtttggacaagcaatagctttctcctttctgaacaatagcgttctactcttctaccttcttttagagatcaaagaaggaaaaggcaaaggaaaccggaaaactagggcttgccatggttgaagaagagaataatctttgtgcccagttctctttgttctgcagggtgagttttacaatgcttataacgggtagcaactcgtaggagccccatgcattaagactgcctatcaaagtcttggattttagccctggagaaattacattttttttttcaattctatgcaagccacaaaggcttgggaagaagaaaggaaaaatgaaatgaagagcaacctaatggaaactttagaaaaccattttatcaagagcatttttatttccagatgcacaaaggaaggctggtgaggatggctgatgtgcagattgaaacacgtaaccaacagcctgggacctgtgcaggggtccagcagcgaattctgacagcaatgtgggcaggtcacctcccagtgccaggcactcaagactgggaaatgatcacaagatgctgtttaaaaatgtattgagaaagaagtagaatttaaaagtagaagaagatggttaagagtccaaagagcatgatgataaaaacctgtctgagttttggaaataaaagattatgatagaggatagccatttgtataccatttatgtttccatttaaggagactctccttaagcaagttgtttcaggaatataagcacaaatacaaaaaaaaattgctctgaaaacttaatttctctaacataggtttgaaacagctaatttgctatcacacctcaaaatcattttatacttgtcaaaaatgactttttctgaatcatgtaacatacttgtttaggtgtctggaaaaggttaacataatcttcaggatttatagaagatggattaattctttcagtctacaattctacttagcaataatttattacatagctaccactggaaatttaacatgaatttaagttggagacatggttaatatttttatggtataatatgattcttttacaaaagtgaaaaatttagataattaaaaaatgaagttacctttctatttgtctgtttacattagtcctaaggagtaatttatgtgttgttaagaaccaatagattttgtttgggttctatgactaaacaatgtcaactagttcttatcactattcagtcatccctgcccttctttattgtggattcttgaacattgagcacttcgaatttataccacctaaaaaatacatctttagttttgtttgggtttttctgtacaaagttcagttggaaacactgcccttactaatgctgggaggcatcattctttaggcatcccaagttcttgcttcaacttttacatataaagatccaaaatgtgccaggcgtagtggctgakgcctataatcmcagcattttgggaagccgaggtgggcagatcacttgagctcaagagtttgagatcagcctggccaacatggtgaaaccttgtctctacaaaaaatacaaaaattagccgggcattgtgaggcacacctgtaatcccagctacttgggaggctgaggcaggagaatcgcttgaacccagaaggtggaggttgcagtgagttaagatcgtgccactgccctccagcctgggcaacacagcaagagacttcatctgcaaaaaaaaaaaaaatatctaaaatgatcctgaagaaaatggtggcctggtggccatgtgctacaaatcctcatgctatgtttttgtcagtgttcaaaccaaacaatttctgatggaaggaaagctctggctctgagctctcacatgcccagacacagaagtagtacataaaatactattcctagtctcttctcaaagcatcctttgtcttctctaaatacacatatatattgggttgaaattccacctctgcttgaaggctcaatttagatgtcttccctgaaattccagcgctgacaactcttacccatcgtccctttcggtacacctgactccgccaccaagtacatccttcccatagcaccttcctagagtctcaaagggcagtaagtacagattactcagccctggatccctgatagactcaagaacatcctggcacacaacactcttttaataaatatcatgtaattgagtgaactctaaacttaaagaggacacaaaagcattttaccttggcactattcagttacaaagcagcctgaccaggctgttgatgttgtttcaccccatagaacacaaatgttgtaaaagatccatgaacttttttccttccacaacgtctgggtgttctttgcattttcctcctcctctccaagatgctgagaggaggagctgagtacttgaggaagaaggtgctgaggggaaagggtgtgcctgggatgggctacgctttgtcagttgcctcaggaggtagctctgacaccacttcttagaagcagtgactcctgcaaagaccctgccaaaggtgcccatcccaaataacacaccaggggcaatggccaggaactagtgaagctgtcaatcagaagccattcaaggaagtctgaggaagagagagaaatgggtgaaagagaaaactctagaagacttgaagctatccccagtgcacttggatggaatgagctcagtcataacctctctgcctttacaatctgtaggtcaatctgcaggagcattacaagcaaggatttaagaaaaaggagattgttctccctcacttgtccaaaagtggtggaatctccccttctctcctgaccctcttatctacttcagattttttttttgtaacgctggagaatttggtatcacagatggcaaatctaaaaggtacaaactgacagacacagagggaaattcccagattgctcttattagagtgtgygtgtgtgtgcaattctcttagtctggagattcagagtaagagaaattcagctcccattttttaagacttacacagacagcataatgctgtttacacaggtacagagktatttattttagtctctccatttcttcctaggaataaagtaatgcctgcactcagagcagttattctgaaaagggagtccatagacacacaaaattccagaaacctttattattgctgtcctcaaaagctaactagcacaatgcctccctaagaaagcttttgtgaacttcccatcacacaccacagagacattaaatgggtttcatttgtaccagcacaccattttttcattctaaggtgtgcactagaatgaagtgttattcagtcagcccctttctagggagatacagcacttcaggcccatccctactttgaaaagaaatatgaacgtaagcagtgatgaaatgatgtgatgataagagacaaaaccaccgccgttcacagaaagccagggcaggatgctcacaaacaagtgacaaagcaaaccactcaaatggaaaaggagaggaaatacagacagtgcagacttttaaaaaaagtattagaaaatccccaaactctactgataggtctagaatttttttttttttacacaaattgttccctcctcacatttctttatacacatcaagtatccacttctaaggaaaatagtctagactctccatcccttccccacacccttaaactgctatcagattcaagcattctcatcagaacagcatgtatgttccttttcctaatggctcaggcccacacatgagaggcattcacttagtgaatgtcatttaggcattcactcaatgaatatttactgactgcccattatgggaacaagcagtattttaggtactattcattcaccagggaagaataagaatgagaataaggataagaataccatccctccttttgcagagcttgcagactagttgaggagactgatgattaacaaataaatatataatatgtaaggtgcttaaaagaaaaacacagaaggctagaggactgagagggatggggtggatgctattttatgtagatcagggaaggstgctttgataaggtaactcaagaattcctacttaaggaagcagagaagcttaggaatgaaatatggatcactttctccttgcttagactctaaccaatatttgagcacagaggtggttttagaaaactcaagttcaaaaatcgttcctgtttattttcaaaaggaccaatgagtgtggaccctaaatttaaacagctaaagctatagtctaaggacagtctcaaataaatacctttgaattgtcatatggtgcccaggagggtcttgtggaaagggtttcatggtagtgaaagatgtaataactctttttttcttttaaccctaagactgtgctcaatgttttaaaaacagttgtaaatgaggtagtgccaaatcattgatttttaggaacccaagaaggtaaaataaacgttcaattggcctcatctaaggctgatactttatgcaacttgagacacttagggtaaaaaccaccactggaggtgatttaactcaattttctcaagttgtccatcataaaatgagtccccatggtagagaggacccaaggttatatggctaacaacagcattgtgcataaaatccaggtctgctaactctgagttcagtgtcagcatcattctcttcttgtacaagatcccccctccccccagcccttacagccagtctgaaacatcttcaggggcaaaggccatctgctggcaagtggtggcagatttgagaggcagttaatgggacatgcacaggaatgaatgccaggagtaacatctgcaaggactgctgagcatgggaaccactacttccaatggctgctgtgattatcactcacacatttatacacccactcctagaccctgtttatgtgcaaacatgcattctttgaaaattgcctgccttctctactgcaacagttctccatggcacaggctttggggcatgcaggacactaaacccaggaagacagaaaaccagtgttgtaaacatgtgcccagataatgaaaggttaccaacatcacagtttactaagaaaactaggaaccccccactgcccctaccaagcaaatgcggttttgaaaagaaagtacttagcatgcacaaagagttcactagaatttggtatttccttgctctctcaacacactccatttacagaaggattttaaaattacttcaagtctgccatgtggcatcttaaagtgtacacttcagaagtcctttgaaaacctcactcaatctttgaggtctgacagggtgtcacatgaacagttcaaagcaacggttaaaacaacaacaaaaaacccccactagatttgaaacaaaagctatcttgattatggtaactgcatgagttatttaaatagagcctgaaacctaaagcagttttacataagacacttgtttcctaggataaaaatgctttaaaaaataccaccagaagtgcattctaacagttacctgattgggaaaatgatttctagtaaaacacactgtaactggagtacccaaatctaacatggcccacaattattccttgatagtgacagaaacttttacaataaggttttttttaaaaaaataagtaaaatagtgctttcacaatgctcttccccttatgaggaccctaaaccaagatgctgattgcttaataaaaaggtagtatgggctggggatggtggctcatgcctgtaatcaaaacattttgggamgcagaggcgggaggatcacttgagctcagtagttcaagaccagcctgagcaacatggtgaaactctgtctctaccaaaaatacaaaaaattagccaggcatggtggtgtgcacctgtggtcccagctactctgaaggctgaggtgggagggtcacttgagcttgggaggcagaggttgcagtgaatcgagatcttgccattgcactccagcctgggtgacagagtaaggcaccacctcaattaaaaagaaaaaaatgaaaataaggtagtatgaagcaatacacagacttgcaaaatattgttttatgggggctcgcgacttgcccaaggttgccagtgtacttgatctcaacagtaggaataggattcaggtcagctgattccaggctgactgatttccactagacccaacgtgtacagaatggaaacacaatgaagcttcagtgtctcccactgtctgctttcaatgaagcactgggaaaatttgaatttaataagctcatattaatattactgattatttaaccctgaggagatgatatggatacatatgcatattttaatacaaatgtttagaaatctatgaaaccaaaaaaattaggaacattttttttccttgtcaatacttttctccctgatatatgctacactttgctctttacaaatcttgtaggcaactgcaaaaaaaataggtaatacatgttcaaaaaagttttctggctgagttaagaagctggaaacctaaatatatatgtgtgtgtgtgtgtgtgtgtgtgtgtgtgtgtgtgtgtgtgtgtacacgcacacacatacataaacaagagtatacatatatattacagaaatatatgtatttatatatacacaaaaacaacaacaaaaacctagaagaaattggcttgtcatttcctaaaatttgaagataatatcttctcgtcctcagaggtattcataggccatcctgggtttcatgtagctattttctttcctggtcaaaatctcctaactgtgttttgtgacacagtccagcaacaaggtaaattctctagaaagtaggagggctgagcacctttgcattatttcctagtggaagggctccctgaagtcacactatgtcatctcttccattacctgacactaaaacttctcatgcaaggcggccatcaggtgacatgtgggaacaaactttactaatctcaaaatcccaagccagtaactgatcaaaaccagtaaatcagctcattttaagtaagggaagcaccaaacataactgcttgtaacttgcatacctcaagattttacaagccagagagaaaaatgtcattttcatcaactgcacatacagaagaataattgctggatggaaactctgattgctaatccttagcctggagaattttaccccctactcaccaacctaaaagaactgcaacagcccagtttaaaggggctgctctaaatctgatactatttgactgtaccagtagaaaaggtgttcctacaatgaaagaatcactgtattccatccttttattcctgaagtagatagtttgcagcatgccatagaagccgagagaaaggcaagttccagcaaatacaaacaggacctcttcccttaaaaaattaaattcccttccaattaaaaaaagaaattaattggacgatcacctagagctcatgctaataccccttcaacacctggctcggttacatcaagtgattcatgaatcctacaaggcaagccactacacatattgttcttggttgttaacttacaacattcactgcgtactgttcacaggtagcctcagcctatacttcaccatggagacttcccacaggctctggagggctcctgagggctcttgggctcaggcgtgttctttcttcctttcacagagaagtgagaaatacctagcatggaaatagaacagaagaaaaagaaaaaggtaaacacatcatcaaatcacttgttatctgaacaaatacagtctcacgaccaattagacgaattgatagttcaccaaagaccattttcttaaaaaagaagttcaatgttcttgctcttttcccaaaaagaacacaacatggtacagccagcctctcctcaccccaaagttgaagccatttctgggagacttcagacacaatcttagctgagatgcaaacttgcaaaagcctcaaaacaggccacttggctttactcttctgcaaaaggaggcaaggactagcaccttctgccactgtcatatcttactgggtcatggagaagatcaagaagatcattcttgcaaagcacacacagttcccgagaagaaatccactatgttaatgcaaagcgttgttggtggtcataagcctgttcctgagctctggagccagaatacaaaagccagcactggtaaggcaccaatcatcaactatcccgggagcatccaaacgtctgcatgccctactgtgctgagtttcaggaaagaataggaacagaaacgaagaatctggaatctccgggaaaaagaaagtgaaggcatcacgcaggaagctaggagaaagagtgtaaggtgggcagtagggcacatgcaggagcgtggttatttggtacacggctccctcagattgctggtttgcagcgtttcgtgcactgaatgtttgcgacactgtgaaattttccacttggctgtctgccatttccgcccaccgaagacaacacttacacccaccagagtggcacagcgaggccctgctggaaaaggattggataactttttgtttatttgctgttgcttttaatgaaaagacttattcatatcctgatcaytaatattttccacacctggatttcttgatttttttccccctttcaaggctgacccaggaacagcttctcctggaacgatactatcaacttatttcgccttgtatacttttgagaagcacacttgaggcaaaggaacttgtattagcagctttgaggatgacragaaacagaatttaagtgctacactagaatcttgttgcttcccaaatacatcatcgacaaaggccagtcatgtttttcctttcaaatcatgagcatgcacagaaaaaacagagttgtagtattagcattgtgggtgtcattaatagcatttctgaggaaaaamaacaaaaaagagtggtcctttatctctaaaaaaaggcaagaatgaataataacaaatcttagatttggaattggtaacacactgacaagtatatctcaaaataaagaactaataaaaaatggagagacaaaattgggacagaagagasaaaggaggtgtctgctactcacataattaaccatcactttcataatgaatacagtttaccaagtgctttctcattaattaaatcattcgcttgatacaattttacttggtacttgctaaatccaccaggctctgtgttcaactggggaatacatggtaaacaaaatagcccaggaccctgcacccaaggagctcactgcctcaagagggacagaattaaataattatatgagttttaggagatgcataaaatttgaaaactggataggcaatatgaaggaaaaatgaacattgtgatttgtagtcatgatgggggtacctcacttagaaggagggtctcaggaaggcttctcttacaaaactaacattcgaacaggaaagtcaaaaatgagcagaagttagccaggcatcaggtttccaggtagaggaaacagtctgtattatacgaactgatctagtgatgtacaactgtgttctgttatttctctcttttttattttgccatttcaactgagtctccttgaaaaagaaatgagtgacacaactgttctccataccttgaaataagagatgattcatctttctgactgctaggccatcagagcaacacacaccttctctgtgattaatttcggtgagagraacacccctgatgcaggtattattcttgatgtgacagcaaataatgaccctgctctctaatgcaccccaagtcactccgttatcacagtgaagtaaaaggaagctctcttgttgacacctgcatgccacagctgaagttaagaaaaccctcccccaaaaaggactgaaaacagatcacattacttgtagacttctgaaaaacatctttaggacctyggatcaggtaccagatttctggcttccccttgatgattacggtatttttactatttctctcttggacttaaacagcttttatgcccaccgttaacagtgttccgtcaaccttctctcttggttcttggttcagtggtctgtttacttacccacatgagccgcaagcaaggtgcaaagaaattaaaagcagtggaaatgtcatgttcatctgaagtgttttcttcttccctatcatcccacatctggctcaacttaattcttccactaaggaaaatcagtagtttgctttcttcatcctacaacattaaagcatcatccaacaggctcattcatgttctccccatgaatggagtaagtctgaaagcctgtctgaaacaaatatgccaaacttctatttgagtctctttccatttaaaatgtccaagataaaatgtaatttatcctacaagcttcttatacaaacaaaaatattaacaatattccacattcaaagtctcagagtataaaccttcactttgacctggcaactttgacacactcagaaaggagagagagaacaagaaaaagcacttcctgaagccaaggtgtccaatatcttgccatcggacctgggaaattacgccaggctgtcagtttcatcctctgcctagaggagaaaatgacacaatgccaatttctccttcccctgactgcccacagcacttacagtctctaccacacattctgacccaaggtccttttcagttcagcactttgttatactgtctttttatactccactggatttatttaagtcttgaaggctcaaaaagtttctaagctctctgatgaaagaaaccttgccatgcccttcttttgcaacctcctaacagcatctagtggaagagcctggatttaacttaaatgatccatatccaaaacctgttctaggacttaacccttactccaaaagaatcaccagtctacagctatgctttaagcccatttcacctttctctgtcttccagggacttgaaagtctgatgatgcctatcatcatcatgtgtcagccctccacaaactcaaaaaaaattaaattacaacttagcctttctattctgttcttccaatccattacatcttaagtcattagtggaatttgaacagttgtcatctcctttcaagatttacaaactcccccatttcctcatcaccagcagcttacatcactagctctcatagcttctcaaagccactattaaggaaaccttcatggcatgtggaggggagatgcagacctctgaggcagtgatattcaaacttgaagcagcatcagaaatggctggagaaggccaggtgcagtggctcacacctgtaatcccagcactttgggaggctgaggcaggaaggtggcttgagctcaggagttcaaggctgcaatgcactatgatcacgccactgtaccccagcctgggcgaaagaacaagactccgactcaaaaaaaggaaagaaacgaatagaaatggctagaggktcttgttaaatcagagaatgctaagacccatctgtagaatttctgattcagtaggcttggggtggggtcagataatttgtatttctgacaagttcccaggtgatgctgatactgctggtccagggaccagactttgagaaccacttctctaaggttaaatgtttctgtcaattacagggccagagagatgctgaggatcttttgagtacatttaatcaccatttgatagctacattgaaagcaatgatacctgtctatttcaaagaagcgacaaatgaccaaaaaaaaaaaaaaaaccaaaaaccaaacaacaaaaaacttcacacactatattacccaggttattacactgtgtgtggcctctctacttggagtctgaatccattctcctcctactggttccagatcctgctggggtcaactctgctcccaacttcccttcagtctttttcctctctactggaaatttctcacactccaagcatactcagtcactgctattcctaaaagaatttatccataccctaatacagtcccaaatggctgtcctctctcttctgtttaccaacaaacagttgtactatacattcaatgccagtatttcaccgcctacatcttaaaactctggagcttgatttccaccacttttctctgtgttagtaaccttccttctcctccaaaggtcaagaatggtttcctgccttctaaatgcagtgacctttgctgagtcctcctcttaacttctctaacaatgtctgatasagttcactagtaatagttccttccattttcttttccttttatttagtagactagcatttttgcctgaacagcatcttttctggaatgatctctccccttggctgttatctgggctgggatgacttcacacattggcctggaagatggacatatgacccaggtctgggcaatcgtaatacaacaaccctccagccacagtgactggcctaggggtaggcatgtacccaaggcaagccaatcaaaggcctctctcagactacctggaactaagaggagcaacacactctttcctagtgagaccacgggagcatgatgctactaacagctggtttctttagccacctcttacagaaagcccactggagaaggaagcttcccagtacagagaaaagctgaaagacagaaaatctgagtcctgatgacagtaaagtcccttggatttagccatgccagaagttagacggatccctggattttttttttttttttttttttttttgagacgaagtcttgctccatcacccagacagagcagtggcacggtctcactcactgcaacctctgactccgagttcaagcaatactcctgactcagcctcccgagtagctgggattataggcatrtgccaccacacctggctaattattattattattattattattattattattattattattattttttgatacaaggtttcgctcttgttgcccaggctggagtgcaatggcgcaatctcagctcactgcaacctctgcctcccaggttcaagcaattctcctgtctcagcctcctgagtagctgggactgcaggcaccagccactacgcccggctaatttttggtatttttagtagagacagggtttcaccatgttggccatgttcaagacaggctggtcttgaactcctggcctcaagtgatccacctgcctcagcctcccaaagtgccgggattacaggtgtgagccatggcgcccggcctgatccctggaatttttagttatattatgatagaccaaattctaaygtagcccacaagattgccatgtcccctgccagacacacacctcttcccagttagtcagtgggacagtaatcaaggttctgctgttgtgaagggattttgcaaatataagtgaggtccaaagtcaaccaaccttaaaatagagagattatcttggtgagcctgatctaattaagagaaccctaaaagggatggggctttaccaggaatgagattcaaagtgagagaggacatgttgatggaggaggcaagtcatatggcaaggaactgaaggtgaatgccaggacctgagagtggcccccagctcacagccagcaatggaacgggaccttggtcctacgaccacaagaaactaaatacaaaaaaccatgtgagcttgaaaaaggaccatgagctccagataataaggcagccctgttgacacctcaatttcagtcttatgaaaccctgaacagataattcagctaagccatgcctggacttcggacctccaacagataattcaactaagccatgcctggacttcgcacctccagaaactgtgagataataaataggtattgttataggtgggaattgaacaatgagaacacatggacacaggaaggggaacatcacactctggggactgtagtggggtggggggagcggggagggatagcattaggagatatacctaatgctagatgacgagttaatgggtgcagcacaccagcatkgcacatgtatacatatgtaactaacctgcacattgtgcacatgtaccctaaaacytaaagtataataataataacataaaaaataaaaaaagaaaagatgcacacacaaaaaaaaataaataggtgttgtttaagtcactatatttgtagtttgtcatacagcaatagaaaaccaatccacatataatacaatacatttctttttttttttgcttgaatcactttgagtttaatttgtctattgtaaccaaaataaacaaatattcttaatttctctgagatggtactttcttgggttccttatattactccttatggcccctctgcagttttttgctctctctgttctttctaactctaggggacagatttcctaaggctatctgctcagttctattcactttctataatgatttccttctactgtttatcgttcttaaatctgtatcctggtccctggtatctccccctacaaactcctggatatatgcagtggaaayaaattatgtttatttcaaactttcccagtcccttgctccaaacccagctcctcctctttaatttctgatggaagctgacagcatcatcatcttctactctttctcccacattccatcggtttccaagtcctaccaattctgcaccctttctatcttcaccgccccatgctagctcagactgaattcctctcacagcagcctgctcattggtcttcttgtcaatgctttctctctctaaaccatttgagtcatccctgttggatcgaacttcctaaagtagatataacacaacttccccgtgccatccataccttcattggttcctacagcttactgaacatcttcgaaattctttatttgatgctgaagatcttcacaatctggccccagcatgcttttccaacttcatttctacttctcccctcatgcacactgaagcagccacagtgagcttctcacttcctctctgagagcccgcatttctactccacgtgtcaaaatgtaagccagacctcccaagaccagctcaaatcccactttttctacaactcttttatcctcttattctacaactttctcaatcagaagtttttttttttttttttttggttgttttgtttttgcatgtgaatgcctatggttttaaaattcattttccttatgttactaaccattttattccttatcctacaataggtgtcatctccccaagtggaatgtggtaacttccgtaaaggtagggtttatgtctgtcttctttttgtaagcttcacagggctttcgcaaatgataactctttgatcaatatttgttgattaactgattgataacatggtattatattacattatacttgaagacgttatatgtctttgagtctctgtcctccatggaagaggacaggtgttcaaatggaagaacacccttttgggtgacttggagaaaaatcatcacataagtctctaaggaaactgtgcagtccctcaatgaaatgttccacaacagcctctttttccaactcagaactaaaggtaactctttgtatttcctttctgaggaataaagagaagctgccagggctgctggcaattgcagagttcagaaatgcttcctctgaatgagcacactcagcccagcagggtgcagagccctgtctccaccctgcccaccaaggagcttaagtggcaggcaaactgggccaaaaacacccctttcccatggagaggcatctccagtgcagggctggactgagaggcatctccagtgcagggctggactgagagtccagttagacctcaagaagagttggagggaggtcagcgtgggaggtaggccaaaactcaaggtattctgaagaatatgatttattcacaatatcatgcgttccctgttcagtcaacatttgatcatttatgggagttatccattgtaaaatttcttacaaactggcagtccttggatacctagcatgcactcagaatattctctgtgtatattaactggtttgtgttcaaggaataaaatccaaaattagtaccggcctaaagaacacattatcagagataaatatgctggaaaaatgtctatcctcaaaggttttttaaaaaaattatatttcatgttgatccatgtcactgcttcttatcattagcatggcttatcacataaaggtaaggatttattcatacagagactgctgctgtgtgtatttgtatgcaggttacatctccttatggacgtagtgcaaagtttgctatgaaatataattatacattggagaaaagtatgtctgcatatcaagaataaaatgaaaataaaatgtaagttgaacatatagatgataaatacccaatctgtgctgagcagctgtagaacgacgtctcaggaaaytagtattttaaagacaagatgtcatgtgctcctattgacaacttattcctggccttatttgttcaacacgcaggtccttcaggtattgctgtagcacaacagaaagaacagtgggccagaagacagggaggtctgggtctagaagcccagagactccacatcccgagttacacatcccctttctggttgccatgagtcatcacgcaccttctgcccagaggagagttttattcatgcctgcttgaaaaggtcagtgtttaggtgttgcagaagtgcttggtgaaaatggggaaggctgaaacacagcctgtgcctcatgctttgataatttctgaagcatttataaatcatgagcagctaaggtctgcaagatgctaatgtgtgcagtccagtcctctgactttaagtctgtttcagttcctgctctatttgctcctttttaataacacaattagtaaaaatcctaaaaaagaaatagctaaatattttcctctcattctctttttgccataatattgagagttatatgatagtatcttcaactattttatttggcctgacttcacaaagtaccaaacggggagtgaagataaaatgaagagacagaatccacatatgcatctcccaacctctgtccttttgaacagacacaagtaacagaatttaccaaaagtattaaaaacacgaccttggaagcatcctatcaaagccacaacttccttttctttttatgaactactaccatgcaaaattgcatggctacagctgggacatcaaatcatgctttaaaaaattagtattggggctaggcgtggtggcttacgcctataatccctgtactttgggaggccaaggcaggtggatcatttgaggtcaggagttcaagaccagcctggccaacatggtgaaaccctgtctctactaaaaatacaaaaatgagccaggtatggtggcaggcgcctgtagtcccagctactcacgaggctgaggcaggagaatcacttgaacccaggaagcggaggttgcagtgagccgagatcatgccactgcactctagcctgggtgacagagtgagactctctctctctctctcaaaaaaaaaaaaaaagttattattggtatattagtaaaagccattcaaagctcaaaaacaacagaattattttctgaaattcaaaatcagtgccagatttaactacttttgcataatgtttgcccccacagaactttccataataatattacgtcaacagcactcattttctttttggtctacttgttttactaaattaaaagccaacagatacaacaactccatactttaaactccttttttaatactattccgagtaactgcctccttgtttaaatattacaattttctgactcaatcagaacaaagtattgcaagacaaaggtgctattgaaaacttctctttttttggaggaggcttcataaaagcattctagcttaaaactgggatttcaatggtcttaactgtgaataccatgtagcagaaatgccacttggcattatatctagggattacctgttgaaacaccaaagacaggtatactttgatgtgggttacgcagggccgggtaagtaacaagaaatacaattattctttctttctatgaatgtggcgctgaagatttgataccatatttggagcacagatccatcgtgtggagggatggggaaacacaggagaggggtgctgagtgtgaccacatgtccacaggcctgtctgagctcgctacaggtcacactgcatcatgaaggaccctgtactccacttgctgcaatttcaatgcaaataaagaaaaatatcaactactattttatgagtaaaggacgctggcaagatgcagccgtggtttgtcttaagagtcctgaaactcagttaaaatacctgatgatcgcgtttcattaaaaaccccaaggaatttctttacaccatgagcattctacaagtttcctacctctctttaagactaaatatttaaaactctttagaattagcatcatctatgtgtcacttggctctaggacacatattctcggggaagagcatatccccatttctattaggagaaagaataacaggatttctcccctcctccttcatcttgcagatttaggggtttatcctagtatcatggctcaggggattctcacacttacaactcctaatatatcaaaaaaggagaaaatctctcttcactgcttaattgttttgtcgaataagctctcaaaagttcatttttgttacctttttcaggcaaaataagaggccttttacaaaaattctattgctaaaacaatggaattctcccgggaatgacttcgttatggaaatgaagtgacagcttcttttatctagccaggcagaaagtctgcatttataaaaggcattcagagcactcaagtgttgtgtgtgggaggacagaaaatgctatttttaattcagattgcagcattcctcccatccaggtctttcagtataatcataatcataataagactgatgtaaaaagaaaaaaaaaaaagattcccattcctgctgaccccagcagaaaaagagagaaagaaagaaaattaarwaaatgattaatacagcttccttccacttttagaccgttctgtgggcttggagatccaccttcgaggcaatcagagcagactatccattatccaaagttaaaagcactttaactctgctagtaacagcatcacgtcttctcacacaaatttacattcttgttcgtgtgactttcactctcctaagtttgcaggaatygcctgtgcctgctgggaaacgccgtgcaagttcctccatctgtttccaagacttaacattccttggtgacrgtgcaatggacgagtccagcctggtggcagggccatgctgggaacttgatttctaatgtcaatcactggaatgcccttctagtaaggaagaggtgcccaagcttctgtttgagttaacacagacctttccaggtcaggtgtagaatctggagtgatgaatggaagkgctggaaaggaaatgaagaccagtgtagatgtctctttgcagaagttgaacattagaggaaaaaacagaataagatgaaaatggaatcacaaagggtaaaatgactggtttaaggctatatgtgcaggattagagaagagatggggtcaaaggggtattttttaatgaagataaaattcacataaaacaaaattcagcattttaactgtttttaaagtgtgtaagtcagtggcttttactccatccacatgttgaacaaccatcatcactatctaattccagaagattgtcatcatcccccttatccatgaaacagtcactccctgtcccccactcctctcagcccctggcaaagactaatctactttctgwctctaaggagttgtctattctggatgttgtgtataaactgaatcatacaatatgtggccttttgtgtctggctgctttctcttggcataatgttttcaaggctcattcatattgtaacatgtaccagtacttcattcttgttttggttcaataatactctattgtaggctataccacattttgttatttattcgtcagttgatggacatttgggatgattccatatttgggctactatgaatcatgctgctatgaacattcatgtacatgtttttgtttgaatacctgtttgcaaatctcttcagtgtatacctaagagcagaactactgagtcatatgttaattctgtatttagctatttgaggacttgccaaattgttttctatagtgattgcaccatactacattcccaccagccaggtaggaagattaccattttttccacaagcttgccaacacttgttattttccttttttaaaaaaattatggccatcataatgggtgaccataataaagtggtatctcattgtggttttgatttgcattcccctaaacactaatgatgttggacatcttttcataagcttattggctatttatatatcttctttggagaaatctctatccaatgcctttgtccatctttaaactgggttgttagtctttttctctttgaattgtaagagttctttatatattccagaaactagacccttatgagatactgacttgcaaatattttctcccattctgtgggctgtcttttgactttcttgacagtgccctttggttcacaaaggctttgatactgatgaagtccaatgcatctatttttttcttttgttgtttgtgcttttggtgtcacatctaagaatctattgycaaatccatggtcatgaagatttactcctgttttcatttaaaagttttatagtttcagttcctacatttagggtattgatccatttttagttcatttttgtatatggtgtgaggtaagggttcaacttctttctctggcatgtgtcccrggtgactttttccattgtctcagcaccaattgttgaaaagaggtaagagagattttgagtatgaagtgattttagtcttttctcttgaaaaaacaaaactttaaaaatatacattattttaaaaattaattttctggcttttggttacactatgactgtattcagccactatttaaatgtttttcctcatcccacattttaaagatgcagcaagttttcatgaatgatgacccaccagagccatgatgctgagctttcagggaagccaaccacctcttgaggtggtgcttttgcaagaactaattttcaaaagcaacagtagcttgaaattgctgactttgggttgcatttgcctctgtgtttgtgcccctctagtgaacagcccctgtcttcagatatccacagacctctgttctctttccaagcccgacacccacccattaagattggctctttggagaaaacttaataaactaattcatgccaaatcgtgtataaccaagagaaataatagacttttggcatgatacctaagactctgtttatcttaagcaaaaagaatacagtgtaggttgtagaattctggctatcatcaattcagccaatgcaaggagtgaagacttttaaatccccctaaagcatcagttctccaacttggctacacattgtgaccacccagagagatttagaaagtactaatgtctgggttccacccacagagatccttacttaactggtctggggtatggctcaggcaatagaattttggaaagctccccaagtgattctactatgcagccaaggtggagagtcactgtcctgaagtcatcagaggttgccacctactcctcccacaaaggtggctcctcttgtcaccttgcaccacttgcaagcaattagggatgtacatttacatgattttaaaagtcttatgatgtccgattaaaactaacaaaacttgaatttcttgtatcagttatcattcactcttctcaacaaccgtgtgaaartaagtttattgttcccatatgacacacgaggaaacaaactctgagagattaattaagcgacagccctagatcacagaacttggaagtggcagaaaattgattttaatacaattgtttcaaccccacagtctgtatcattataatctcccagtaatttcaaaagggccaaccactgtgagtgtgggcatgtaatttggttgcatcttcaatgtggcacccatcttgtggaatgggacgaggggataacaactcgctgaagagaatagcaggcactacctctgtcggttactatttacctttctttctctatattgtatgcatgtgggtgtgtgagtgtacataagtgtatgtccacctaaggaaagtggacctcaagggtatatctgaattgagaaamatatggcccaactacaagaaggtacctgggtagggttttcagagatgtagtaattctttccaagatgtgataagactggtaaaaggtcatgaaatatcttcattatgataaaaaaaaaaaaaaaaaaaaaacattgaggaaactaccaattcattcatttatggattcatctaatgcccatatatagattacaaagcttaatcagtagtgagtgacaagactgaagaatatcaggcaaaaatctcccatacttaaatattcaggttcttataatagacaagacacaatttccacataatatcatcttgtctgccaatgcatggggcacattaactagccttgacacaatagtagaacaaatcagaattggtaaaatgtattattaatgatggtagaaattgggaagtgagtttcatgtcacttttttctcttattttaaactggtgcactcaaatgtgtaggtttgtgcatgtgcgtgagtgtgcacatatgcacgcatgcacacatgcatacacacaatcacacacaaggcttgagtgaagactccatttcagttctgccattgttcacaggcctaacaacttacttttccttaaaacaaggaaaggagggttgtcatgttattattctgtttccattattatgccataaggaaactggaagaattctttatttttaaaatatttttaaattttactttaagttctgggatacatgtgcagaacatgcaggtttgttacataggtatacatgtgccatggtggtttgctgcacctatcaacccatcatctaggttttaagcccctcatgcattaggtatttgtcctaattctctccctccccttgccccccactcaccgataggccctggtgtgtgatgttcccctccctgtgtccatgtgttctcattattcaactcctactatgagtgagaacatgcggtgtttggttttctgttcctgtgttagtttgctgagaatgaggcttccagcttcatccatgtccctgtaaaggacatgagctcattcttttttatggctgcatagtattccatggtgtatatttaccacattttctttatccagtctatcattgatgggcatttgggttggtttccagtctttactattgtaaatactgctgcagtaaacatatgtgtgcatgtgtctttataacagaatgatttataatcctttgggtatataaccagtaacgggattgctgggtcaaatggtatttctggttctagatccttgaggaatcgccacactgtcttccacaatggttgaactaatttacagtcccccaacagcataaaagcattcctatttctccacagcctcgccagcatctattaggaaactggaagaattctatacaatagawttaggagctgcaaaggagtaaggatttgctgaagattttcttaggcaagtattagaagttggttagatgagaaaagttttcacaagtgggagttgtacctccttgtctcctaattgtagtgaatctgtcaactttcttttcagtgtatcaagactttactcttcaaaatcattctcagtatgctctgaattgctatacttttaagttaactacttctcaaagtgctgtttaaaaactgacatcttcaaccacatttcaggcttagaatctatctaaatttgcaaagtttcattggttcttatgaaagtgctacttaaaaaaatacacttgacagccaatctcttgaaaatgatttgtgcagaaattgtgttcaaattactttatatcaagacatttaagagaaaatgtggttttctttgtaataggctaaaaataatgatatcctttatcttcaactgaacatgtacatatgctgtataagctgttgcatttaaacaaattgaaaaacagtaggattctggctatagaccgtaaagaaacaaaacttgcccagaatatcattttaagcattaaaaaatacaattaactgctatttcccacaaagttcaatcctacatacagaatcggaattgtcaaccaggtccaaagcatcaaattataaaacctgatgtctcagaaatagacaagaaaactcagaaaaaataattattacagtccaatygcacacaaagaaaagtgagaataaaaggcaagttatatagtttatatttctacaaattccttttgagttactgggcaacattctatttaagtggacccttatgacagtagtataatgaaaatatccctaagtcatagccctaaaacaattcccactgaacatttcattgaatgcttagtatgtgcaaagtactgtgaggtgaggttcagaaatggagaaagaaggtttattgctttgaatgcagaatattgatttttaaaacactaagctaatcgtcaccaactataataattttttatgattcctcattgccaacagcaatgattttcaaatgtgttttttaaaagccagaactctgccttcaaacaaaatcttatatagaaatctaatacacaagataaataaaattgaggctacttacactatctagttttatcggttcctccyrctcctcatccatcaccaccaagtacttctgaaggcagccccacagaggttcacagggcagaggttgggagactgagraatcctcaggctactggagaatgtggtctgacctccaccgagctgaggagtctgtactccttaacatggcctatgagaccctctatggtttgctcctggcctcatgacaagttaccaccaatggagtactgactgttccctgcacacactgcaccatgctgtttgttccctgtgctttgtccatgctgtcccttggcaggtgatctctttatgtccatcttctctttgacagatgccaagacaccccacaactctgcacagctggacacagtcttaactccacatacacattcatttttggctcaccacgctggctggtaattattgttcatatggctttcacttaaactaacctcagagtaacacaagcacagaaaatgtattcatagttataytccagcttggaacacagatgttgacctaacagtggcttcataaatatttrttgaatgaatgaataaagatggatgggtgagtggatgacatgacaatatactttcatcaaactagggaaaaatmtttatgtaaatatacatatatattacatatatacttctaaaaattgtggtaaactacacaaatataaaatgtaccatcttaaacatttttaactatacagtcagtggcattaagtacgttcacaatgatgcacaaccattaccaccatccaccccccaaactcttcattttgcaaaactgaaactttttaacatacgtacatttaaaaaattcttaaaaatgtaattgaatgatctagggtgtggggtacccaggttcttcacttcccccttgcccccacctgctrtatatcttgtgcctttcagccccacttagggcatctttagcaagaaatgtggtaaatgtggttgagacatgtggtcaatgaaactcctgcytactagcttagctactagctagcagtttgggctgctcaaaatgaatttcctggataattttcctaagccctcactgactcctactcgcatgtattgctaggagccagctttcactcctgggactggtttgggcttccagaaagcatgccttgtaaagaacagggcctgygtgtcaaacagcctgtatacaacacacatagcttatatatgacaaccatgtgatttttgtcattttaacatttctgaactcaggacttattttatatatgattggtacataaaagagtggtagcacccccacccccagaaactaatcatttaatctacagtgcatattatcatcagtgacactacagaaatcaaagaaaactggtatctatttcatatttgcacagaatcgtttttaattttaaatgtttttcatataatgatcacattgccaatctcacacttggagaagcaaaaagcaaagaaggaaaaggacttgaaaagggtgacaagtcactcaggtgaatgggatgaggccaggaggtgaccaggcctggatctgacgtgaactgctccccacaaagacctctccacggcgctcagcctcagactcccctcatgtgtaaaataacacaggggaaatgaaaattaaaccagtgttaagctgttcctgacgtgcttcctgcaccaacattcaaccagctctctgaccttcttacgaggctcaggagtcctcctgggggaaagagctgcaacacctgctattctactttgcatggttggttcaggctctagaaaatagcaagagcccacctcctcctcctcctgcaatcagctctcctgtttccttttttttttttttttttagctttagctctacttctattttccaactgggatcatggctactgccttctactactcagcagctaattacacacaccctccgaggaacgtaggccactgagtgaggggcccaaactcagctggacacaatccctgcttatccctctcagctgtggtcagctggacacctaggcacacatggggaagccactcagtccttgcctgaaagaagaaaacataccggcagcccaaatctcaaccttcttcactaacaggcaagcttaccatgtgttgaatttaaccagccagcaccaaaccatcagactttctgttactcagaaataagtaaacagtatgaaaaaggtcccttattaggtgggctcagggtgctggtatcaggactatttttgcatattctatcattaggtcaggctgacatcccaaaccttaaaaagttaataagggaaagaacgcataaacgcatataagctttatatggaaggttaagtgcactggcagcctactaaaatagaaagttaaatacagcaatgagattttgaaatttccccttgcaataaaaaagaaggggccttaataggaacacaagccaggcttgctggaaaagcagtctttgttccttaaaacaacctgcaattgactacttatggaggacttaaatttccggaaatattgtaccatcactgacccgtgtacacggttatgaggctccgataacaatagcactctcagggagaaccgacagtttaacgaaagcaaattagggtctcagtaataagatgactgagaacataaactactatgcgtctatcttttaaacacttaagtaattttagtgttgcttcacttgccagagtaaatgagttataaaaacctctgctttctcataaaagcctccatatacccaacgaatggcgaatgatgttacaataagcagcacgtgtcccatttcctcccataaggaataatcctctttttgtgattctccttttcacttcatctggagggcagtgtcttcccwcctagaagagaggcccaggctgagagcatcatggttttggcagggaactcagaaaatcttggcatcagggcttactataagctgagttaaacaggaatggaagatcattggaagccctggaaaaatagaaaatatttctagggtagcacagaagtttggccttttcgctggtgatttatttccatttgttcacatgatgtgactcatcatttgggtgacatggagcaggcagcatcgtttcaagttcatcattttattaagcaatgagtcaaatgaagaaagtggtttaagggaaatggtcattttctaatgatttttctctagtatgattttatttaatagttttacataagcaaagctgatgtctcctctgacctcccccttttaaaatttccagaaaataagacattctgatggagatcaggccacaagacagtagttcagaaaagggtaatttttgttttaatttttctcctcactccctatgtaattggtggccaggatattgaaattctctggaaaacacagaatccatttacatgatgaattcaatgatatattataatgtcttgttcagaagtgttaggagaattgatgagttaatgttggtaaatcactctgcaattcccaggtcaaagatgtgaaatgaacattatcattatttgtttcagtggaggctcactggcaaaatgtggtctagtgggcctgattaggaaacaaaagcttataactttgcagcaagaggggaaaacattttttcagtactaccttttacctaattctcttctaccctaagggagtaaagggcatgccaatgattattgataacatcattcaacgccatgtaatgagttgacaccactgaaataaaccaaaggatgtagggatgtatgtacagctggatggatgaatggacagatggatggatggacagacaaatggccggtgaccaaaatacatatactcctccgtgttatatattaaggctgcttttttagaacactgtccttcttacccaaattatcactgtagaagcagatcatcatgctttaagccttagaatatgatggatttcaattactgcatcatatctgtgagatttttggttaggaacttttaatatgaatttgtccaattttttcagtaatgcaaaactttttggtttaatatctgttgttattcctacccttgtcagccaaactcataaaataaagattttctaatatatggtatttagaaattctctgcactatagaaggtgtttgaagttaatgaataaataaatggataaatagatgggtaagtggcatcatccagccacagcactgcaatgtccgaaggaactctgaaacgttcctcatgcctctaggaaagactgacctttgaatacgccagacaagtatttttcttagcaaacatttatgagcaatgggctcaatcactatattagtgtttaagggcttttcctgtatagaagctctttctttgactgaagtctccaaagccaaatttacaattattatgtatgcctgaataaaaggtaatataatataaggtaatttttctccraagaaagccctcagaaaagcctaagtacccttaatttttgagttcttacaaagtttattgtatctattggtctcttaaataaagtagtctttatggaagacatattaccttaaaactaccttgataaatgctagtttggcatgtttatataacagccacctaacagaactgtttttccttttgttttttaatggaagaaaacaaatttgactagtaattattcttggaagtatgactttcctagttgcaagcactggatgtcactataaataaaaaagcattttaaagattacttttaaaagcaacacagtaagtggttaagttgcagagttcatcaaaatacactcacaggaagaatgaagaaaaacatctcttaataatatggtttaggatattgtgacaataatggtccccaatgtaggatgcctccctatagccatgctcacattaactgtgggcttggctatatgtctttttttggccaatggggtctcaacaaatgtaaccaacgaatataggaatgggcacttgcggcttaggatgaaatttctggtaatagcatcaaacacagagtagatgaacgtcaagatgatgtgctttggaaaacgatactacatgacctgccatgtagttcaaaacgtgaggaagatactgatatagtagataaaagttgtaagtaaaattatttcatataatatgaaagtggaagaaagcagtatgtctaaattaatgtatatattatttaaaatgtctttgagattaaataatttaagcacaaatctgatggtttaatagaaatctctaaatccttaaatgcttatagacaaactggccaaaaaattcattgaaaggataaaggatggcataaatatgaacttctatggtataatgcaggcccagacttcttgagctgcaggcctgaagactcaactgtctatctgaaatatcccctaaaaaaaggtctcaaacctccaacctattaggatggctactatcaaatacatttttttaaccagaaaataacaactgttggtgaggacatagagaaactggaacccttgtgcactgttggtagaaatgcaaagtggtgcagccactgtggaaaacgatacagcagttcataaaaaatttaaaaatagaattgccacgtgatccagcaattccatttccaggtatatacccaaaagaactgaaaggagaacctcaaatttgtacacccacattcatagcagcattattcacagtaaccaaaaggtggaaacaacccaagtgtttatggacagatgaatgaataaacaaaatgtgatatatacaagagtggaatattcatcagccttaaaaaaagaaattctgacacatgttacaacatggatgaccttgaggacattatgctaaacaaaaagtcacaaaaggacaaaccctgtgtgattctactcataggaggtccctagagcagtcaaattcatagaggcagaaagtagaatggtgattaccaggagggagggggaagggggaagagggaatttattgtctaatgggtacagagttttgcaagacacaaacagctgagactggatgcacaacgagaatatactggatactatcaggctgtatcttgaacccagctacctctctctgatgccactgccaccattcaagcccaagccactgtcattttctatcctgtcaactacaggtttcttacctggcctccctgtttttcttgccatccttttaatgtcacagtaaaaagtgtcatgaaaatagcaaagcagggtaagaagaccggcatactatgttagataggatggacaaggaaggcctcttggaggtgacatttgtgcactcattcaggtcatttttccattcaaaagcattcgatagctcattctgactgtcctatttatggtaattctgtagccattcaggactgaaactctgacagcccctggacaccttctgatccttctctctctgtatcgcatctagtctctattttccccattgctaagagtaatcatgctatctgtcctatctactactccttctcttggaatgggctgtcactccccactcccgtctatcctacatatacatgccagatgaatctttctaaactgcagtttcaatcttctttctcgtttcaaaatctcttgttgctggttcctcttcgcttcctgaattaagtccagagtttccatcccagactgtctgacagtctacaatatggcttccacttaccttcccaactgttatctcccacttttcyccatcacaggcatacgggtggccccttgttccagaacgtactcttcactttccagaatctgcgtctctggtctcaatggccctcgcacgcctccccgcaatccctgttgcaaactaaaatcccattcccaaatcaccttctctgtggaaattggcctgatcttcccaatcagaagtgatcacttctatctttaaccctctgaagcgtgtttttacttttatatacagtttatcaccttctgtcttatgccatacttatttgtatacttctcctagttccttttcagatcataggatttttgaaaatcaaatatggcttctgtcttctgcatcacctagcaacttgttcctcaaagtgtcttcctgggaccagcagcatctcaggccctatctcagaccgacaggatcagaacctgcattttaacaatattcccaggggattccgacccacttgatcaagctcacagcagccactcatctcatacttgactggttgaactgactaggaaaacaaagtaggagaaaccaaacataacttacataactcattcaaagatcattgtgagtgactaatgctttacctatataaaactagggccaggcacagtggcttatacctagcactgtgggaggcagaggtgggagaatcacttgagtccaggagttcaagaccaaccagaggagcacagtgaaaccccatctctaccaaaaatacaaaaattagctgggcatggtggcacacacctgtagtcccaagctacttgggaggctaaggtgggaggactgcttgaaccccaggaggttgaggctgcaatgagctgtgagtgcaccactgcactccagcctgggtgacagagtgaggccctgtctcataaataaataaataaatagaaataaaaatacagtaaaggtatacagaaagcagaaggttaattttaccaaccttctgagggaggaagacaaatgtcaccttggccaaccaaatagatctgggaagattttgtctttttataaagcttgtctatttaagggtgggaagtcagcagaaaaactgcttgccaatagtacacttctcccactttaatgaaatcggttggctgtgaaaatatgtgcatcaaagttttaaagagttttctgtcacatccagtagacttataatacagattgctacagatggaagatttatcctcacttgatgtagcaacagcactacgttctttgaactgtaacaaagcttttgattttttttttcccacgtggtagatgaatcttagtaagaaaatacagacttgatatgacacatactcaactactgtaaagtgggtgcttaatttagttagggagaggaaggggtggaagctggggaaagtcctgcttagagggcacctcactagccactagagggcattaacatgtgaataaaatcatcctgatttccaggattcaaacagcagacaccatgcatgggaattaatggggctctgcttcactcttcctttccctttataaatgtccagagagctaacaactgcaaagatgtggaagtatatctaarctctttttatgttttaacacaatagacatttaagggaataaacttgagccatgctagctccaggactaggattgacatatgtttccttcagggtgcccgatttccattcttcagaagtccacaaccttctgaataacagaggtcttttctccctcagaatcaacctagcaacaagtccgaaacctccaaaaacttctcatacctgtaatcctagcactttgggaagccaaagtgagaggattgcttgagcccaggaattcaagaccagccatgtctccaaaacttccaaaaacttctccagcctgcttgctaaaaattcaagttgatagtccacccattgcaaaaggatatttccttcaggaagcaggaggaagataagcgaggctggggaagactgaagacaacagtcctcagttctgaggagaatgagcgggaagtgattgatggtcagtcccaggccaccgccctgccttagtgggtgtctttgccacgaggtggccttccaggtagcttggcttccttctgcacctaagcttataatggcaagactaaccttgcctctccagcccccatctttctcctcaaacggtccctctaatctttgtacatactcatgggttcaattaccaggcaggatgccctgaggcagccaggtgttagttggcaacagaacacacaaaggcctccccsmctccattcagcgtcagggtgataaagatatcattaccctcaaagccagctcctcagaagttctgccaccacggcagatatgaaaggctttaccacatagttttcatacacagttcttcttcctcagaaagcaccatttgtttgagtatccgtaaataactcctacagaagacacaatttgctctaatgttttggagctatggaatttattatgatcacagaaccaggaaatagctgaatgtgaaaacaggaacatctcaaatcacccctcagctctaagaagagtaacgcatttcaaattaaaagcaaagtcattgctgtgtttactgttctctctcaatgaggggcctgcactcccaggacagtgtcagcatacttagcttttcaaatactaaataaaaacaacagcatctccaagttctaagcatttataaaaggtattctcttttaaagataaagacaagtttagaaggcaggcccctttttttgtcgcaatcggttaaaaagtgaagagaaatagaatgggctgaacaaaatatatagcaggctctgtggtctgctttttctaaaagttctgcccacagattttcagacaccaacagcaacaaacagtcattccctccctcctgcaagtgagggtgacagccaatgccaggagctacagcaacagaagaatgtactttaaaagagagacaggagaatggcttagaccctctacctgccatcaccatcacctcctaaccagaaatgacaacaagcagcactttctaggaatttgttagtggctgtgatcatgtgtccttcttgcactcacgtttctcttttgaccaaatattatttagtaagatgtggttgagtggcccctgggaatcaccattgaaacagaaggctttctaagtaaaatatctgttcagtatctgttcttgcagtgcaaagcacatttcaaaagttcagccaacggctaggaaaatgtttggggcacgcagaatcccttctacgccaacagaactaatctcatgtrtgcatttttcagctcctgagttgagaagacatattaaaaacccagcaacatgtttatcttcattaaacagcaaatgtcctttcaaacaatatacaacagggcagagatcactgtttgtgctaatggaaagtgatcaaaagccccaagattctttggttagctgactctgaagcctgctcgtgcttgagtttctacacaaagtacatcaaaagaatatagatatcactggagattctaaatgtttaaagtctctaggactagcaagaaaatatgcttgaaactataggaaatggggaacagaacattactgttgacttccaccttttccctgtaamacaatacattacaatctataaatagcttaggctgtctgtttaaatatgcacctcccccggaaaagatagaggcttccratcatcttgctatttgcaaggaatcttactcacaaatcaatctaacaggccacggtgatattatggggaygtaaaagggactgaaatgatcaagagcgtcacgtgtcttccaagccaagtggggtcctatgccttgctggtttgaagaagtgggagaaacttcatcaagagcagcaactcaggtgtctgtccaccagagtaagcaggaggttctgaccagcaagggtagcctagggcatgggagggagggagacagtgactttaaagctttcctgttctgtcacacttcctgcacctctgcccagargtggctgctccacagacccaagcagaaagcagacaagaaaggcaagatgtcaggaattctcttctctcccagtagcatctttcctgttctagcctaaatgcaggggaaaaagatttggggctgaggcacctctgaatcccagggagctcaggagctcactctgattccttggagctgaagagttgctgtgtgcaagctgcacacagccgtagcgtctctcattagactctcttctaccactagagccaggcagctatgaagagtgacatgaccagccagccccagaaagcaaaacgggaatgcaatcaatacatgcctcctctcgcccatcaaacagctttcttcctcctttctcccaaatcaaaactgactccctcttgttggatcacaaagagcaagaacgcaatgtgcagtagccttgtggagcttaaaaaaaagaaaaacaaaaaaagactgtcagcttgcaagaattttaccaaccggcaagacattacccctcatgtcccagagccatagggaggctgcgtctgagagcgaggcacaccagcaggagagagacagttctcatgggtggatggtgaaccctctcttatcaacagctagactcagcaaccacacattccgttttactttctcgcccacattcaaaccattttatctccactagagggccaggatggagatgaaatttcagcctggcagttttgctgctgatttaagatttgatcctaaaccttggggagggagggctcgaaggaagggaggtggggttaaggcaactcagatactcacgtgggcatatctgggtcccaggcaatccctgggttctgccacaggctctctatctcatgggatgacactgttattaaaataatatccacggcactttgggaggccaaggtgggcagatcacgaggtcaagagatcgagaccagcctggccaacatggtgaaaccccatctctactaaaaatacaaaaaattagccaggcgtggtggtgggaggctgtaatcccagctacttgggaggctgaggcargtgaatcacttgaacccgggaggcagaggttgyagtgagccgagatcacgccactgcactccagcctggcgacagagcgaggctctgtctcaaaataataataataataataattaataataataatatccataaagtacaacacaggacaccttcggtagccacctaggctcaaaaattgggttatctctgactccattcctttcattgtttctaatacccagttgctcagtttgttcaactctttctttgtagtgtcctccacatcggtccctttgtaacacgcccacagtagttctcaaaaccttatctccttacgcctgcaactgccttccctctgggaccccagtctcttttttctccaccatctcacgggatatggacacagctgtaaagctcatctcactaaaacatggttcttcacatccccaacttgttgaaaaatctccagtgactgccaacccccagttcaggacccctccccacagcactgcccatttacacagtgaccactcctccctccctaccactaccacccccaaaccacaaaccaacaagaagcaccgtgtcctgggaatctgtcagtggctgggactcagtcctcctcgcaggcaggtttctcttcaccacataatacacacgtagcgaatgtggttgaggggtccccattctttggtctgacacatgtggtgtgacccctatctccctgtccaaggcagtctccccctttctctctatgagctgtccattctccgtgttgagtcctacacggagcttcccacttactttacatgttagattgctgtgttttcctcagcatatgcgtggcccctgtctggaagcccctcttcgttgatctggagctgaattgtggtctgttcaccaggaccccagatgaaagatgaaagcatgagagaagcggatgcasgagggggatggtatagggtggtccatacacctgggatggaatcatggaagcatcccagacaggttaactttgccttaataaagcttcttaatttttaacaagcctaatgatctccatctcattcaggaggaacaaggtcagaragacaagatgggaccagatgacttgtgaactgtgagttgagctctggactgttagacagtgatgtgtctaagacaaggccaatgtctggcaggcyggggctttagcgtaagtttagccacctgctaaattgagtttaatttgcccgtgtccttatgattgtcccatcaccatagctaattaatgttaactatgttgttatttttattaatgctcttttaattttagtaaatatttttgagccagatctgactgttccaagcctgggctttgggggctgccaggtatattactgctacaacaccatcaggagcaagtcacaatgcattcttaagttcattcattcttttaccctacacgttatcgagcacctactgtgtgctgtgtgagaggactgggacgttgggagttatacaaaaagctaaaagccatgcttaggacatagcaggtgacaagtgtcccttctaggccaaagctttgaagcattgaattgctggtgcaattttccaatttttctctcttccagtgatcatgaaagaggcccctagatggctggataaaaagatcaaagcagactgcatcatggagttatgcatggaggacagttgtcctggagagatactgcatccacagcggtcactgtatgaatgagaaataaacttttattttgctaagctactgaaagtttagggttgacctttctgcaacaaaagcttatcctatcctgactaatacaatagcttttattttctctattattaccatttggtaatgaatcatgtctaacaatgccttgtgctaggctttatatttactgccctcagtatcttttaattgccttaatgtcacttttactcactccttgccacttaatgagacaagagcctcttgaagacagtgaccttggcttgtactttcagggcttaccttttcaccctccaactcacattttccttcctctcatcattttccccaaaatttagttgtgagcctcgcaagcagtagctgcttaactcataactgatgacttgatattttcccactaggaaataattcccaatacgtaataacaattattcatttgcattaaccaataccaccatgcaggcatggatcatcaggaattaagtgcaatggctacaagaaggcattagctattcatctgtgaatttatcttagccatggccttgattctgtgtcaaccatggctcatcatttttacttatttgtgttgaccctaatgtctttaggtctatttaatgattttggtctgggcttctaaaattctcattcagtcatttgttcattcacacaaatacagtagtcagtttytgagaggtagcagagaaaaaaagctatggagtcaggctagctgtgagactgtgggccagccacttgacctcttcatgtccccagtttcctttcccacaaaacgagtttaaaatgtatcttgtaaggttgttgtgagaattacacaagttaatatatgcaagatacataaaagttattttaaattttaaaataaagcagtactgggcatgttgtaagtgcttagaatgctaatattatcatatactgagcacctactwcatggcagatattagaggaacaagaatgattaacaggttccccagttcttcaagcatttgcaatctagtaagggtaaaagatatgtaaacaaataagtgaagtattacagagccagagagagagagaacacaagtacatacaaatacatatgcacaaaaggatacaggtatgtaggtgcacacacatgcatacaaagatacacacatgcacactcacctacatgagagcacacacatgcacacatgccaactactgccaactgatgagctacatacagagcaagaagagaccacgattgctgaactagctcctacagacttgccagacaagacagggcaccagggatgtccaggtaattaaagagtgtgagcagaggcatcaaacaacatctatgtgtttattcattcaacaaatattgatcaaatgcctcctatgtgcttggcacagttttaaatactgggatacatgcagtccatgagaccgacaaggcttttgcttccactgagctaattctaatagaggagactaacaataaaccagcagtcggatgcagaagcccaagcgccacgaagaaaacacaacaggtaagaaggcttgagtgagctgggggcgggtaggcctgatggggtgcagggagcagaaatatggccagagcaggaaggaaacgccacgccccaccccagctttctatgggggaggatttcccttatgccctctgacctcttgctccaaccttttcttccccaagggtgtggaatgagtaacccggctggggctaaagccaacgtggcctatgccccctccttggatagggtgaatctatataattttgagcagggttagcagggatttgggcctctttctccttccctcttcacacagacaggtgcctgtagactcaaaactttcctgcaggtggcctgcgaccaggctagactggggaacaggcaggtgtcaagttagctcattgccctcagtcacatagttgcattctggcccccgtctgcctcaatactcttgtcttatttctcagtgggctcagaacttgggacgggaagagaactcttgtaagataaaagtttccataagataaaaaccttccctcccctaaacagacctcaaaaccaaattaggaatcactatcctaatctatcaaacctaatctatctgtcatcttaatggaaaaatccctcaaatctcttacttaatagtccaaaacgctagactgagaagtctgatcccaaagacaaattcaatacagtgaatattgggagtgaggtgggaaaaaggatgattttggtgccagtataaaacccaggggtatatgctatggtcagtagccagaaagaggaagatgaggaaatatgaagcctttagatattcttaccttgtgactttatatctgcattaaaaaaaccacattaggaaaataatttcttgagtttatcttttctttgaagaactgaacaacattttcaatatatttacacacttgcctcacaatttccttgggagatggagtgagaatataacgttgtcgtgaacaaatattaatgtcatggttactatctgcagaactcagttgtgagcattagagaaatttttttaagaggaagaagaagatacatgtttcgtatccttgaagggcttagcctcgacctagaaaacactcaggcccccaaagcaatatatatgaaaaaaggaaatacaagagcaatgtcaaatggatggtaaagatttttaaaaatgcttcaggagttcagaggggaaaaaaagtatccgttggaactaagagttcttacaattctttcatcaaggattatatagatgaggaaacattagagaaatgtgaaagccccaaccacacatcagtagagaaactgcaattagaaactgcctctctggtaagagctcccagaagatgagaamtgggtattgcatttctytgtgcagtcctactgggcctggcattgcaggctccactggtaggtgtctcctcaatctgcagcatattaaatgagcactctgtttccctggatttcacattgctccatgtcactacccacacatttcagccaggagcagctgaccacgatgcccaggaagtaccctccccaccaggtcattctgacagagccgctgtgccacacacagggaggatgaaaagcacagactctccacctcctttcaattgctaagacaggcaggtgctgccaaccctgctgacccattcagaggcctgcagaacactcctacaggcattgccttgtctctcatcaagttccaagatggaccgagacaggaggcaagtgttaatagcaagagtagatagtaaccattacgaaaaccacattctccgcatatcacaggccccaggaggggaaaggcaagagaggataaggtgggaaataaaagagggtatcagggctgccctcatcctgcccaggatacactggctgtcacagtcattatatgttttctggcagcacagtcacgttgctatggaaccaatgcatgtcattgccacctggcctctagcaaataaaatcacagcgctggcaagagcatttccctggatttcccttaaagagataccattgatggtgagtgctgtttgagcttagaaacaacagcagcattgttcccaagacccagccccattgcataccatgaaactgagcccagggactcacgttttacaaggtatatatgcatgtgggggccagcttctgagcttctttttagggagaaaaatactcatggcttctatctgtgtttagttttttctcatttggtaaaataaaaaaattacggcttgtaatattttggataataatttgatgccctcttgaatgtcaacatcaaagtgctcatgaccccagaaggaaaccaaagtagccacaagtggtctacatgggttcaggcagtccttctttcattccttcaccatttcttgcctcagacccttctctaccagtttattctttacccaaagaatcctatgatgtaagcatggaaatggacatttcttcactttctcaaggcccttaattgcccccttcttttagtctaattaatctcttgactctaaagagacctttacagtccccagagagcaacaggtrtcagtgacccacattgtactgtggtgtgctctgagaataaactttttgggcttttctcagataagacaggaaaatggaaaccttcacagttctaatgaatgctaactcgtgtagacccagctctgtggacaggagcgatcaatgttagggtaactcagcagatgatccctcacaaatcagcaatctatgttctacattccattcagtatgttggtagacaccaattacgtctgtatgtacataaggagatgatcaagttccgcaataatgactctagttagggaagaagacaaagtgattaagctgacaagttggataaaataataaacacaagctcttaatactaccctttgaccactccctaggtgagatgaaatgttttggaaataagtgcacttagttcaccaacctaaatgaacacaattygaagccagatttaacctaggatgtctaaaaaaacaaacaaacaaacaaacaaaccacacacacagtcaagtttaccttctgggattctaactgagaatcatattcttaacttctctccatcttattgcacaactgcactcttatgtaaaaaccaacataactttaaaaaaaacgaataaatggggccgggcgcggtggctcacgcctgtaatcccagcactttgggaggccgaggcggatcacgaggtcaggagatggagaccatccttggtaacacagtgaaacccatctctactaaaaatacaaaaaattagccaggcatggtggcaggcacctgtagtcccagctactcaggaggctgaggcaggagaatggcgtgaacccgggaggcggagcttgcagtgagccgagatcgtgccactgcactccagcctgggcgacagagggagatccgtctcaaagtaaataaataaacaaataaaataaaagaataaatgtttctcaaaagtctctatgaaggtcagatttgtacttcaatataggaaccctgttagccattcttctgcaggtgcagacaaccgcgagtcgggtgtgtgggtctgcagctggactgcacacacctgcaggtgtaccatgacttctagctgcaaagcagatgtaccaccaagtctcagcacatgacaacgtggcattgcagatgcagtggtttggaaagggcgcagaagaaaataagctttctcagatgacatccataacagaagtgttctgggtgcactcactctgccaacccctttacttagtagccaactaggattatgagaaagtcaaatagtctatcagtatcagtcttgacccttgccttaggggtgatcattattagattaccaagaccacattaagttaaactacctataactctacagcctcaaaaagaatctgcagattccaaaaccagacttgtgcagggcaaacatcatgcagctaggagccaaacacaccagtatcaaaatcctagctctgctactctccatgaagccccataaaggtgatgtgagcctctgggcctcagatgccycatctgtacatagggcctttgccagacaagctctcaggtctcatctggtgctcatatcctgttattcttggtcatggaattcaagagacatcacagtcacttgaaactggatggttcccccttgcctacagctgtatctctgtgcaccagttgctgagggaaagaaacttcctttctgtgagctggacaaggtaatagcaacratgatgacctcgcacgaggcaaagcatgtgaacggcaaaaaagaaatcgcagaaraatctacaagggaaaccatcctctccaaaggacccagtgatgaggagagtcaaagaataggaaaaataccttggttccaagcaggagaaaactagagagtgcatgctgtcacacactttttcttggtgcatcatagtaattggataatattttgatgtgggtaraaatacatgaaagattcaaaggatcactcaccctatgaaaacagcacgtcgatttctttctcacgaagaaaatggtctaatttctttggaaaactggaatagaaaaaaagattttttaaaaaaattaataactccattctctaaatcagtccaaatgagcaggcctagaggtgataagaaattccagcccctagcactttggcctttattaggtgcacaataaatgtctgaagaacaatagatgcgtgattatttggctgactatatkaattttaaaagcagagctttgaacaatcaatatgtagagaacaatcacaggcatgattcatttatcatgagatgtatggtccttgtgacaaggagtccatattgtggtgcccaagaaatcaattttttaggtgcctttcttaaaatgtcatgtcctccatgcccaccatgatgcttattgaagaagtctttttttgtatttttttgaagtaatgtttctgtagagatggggtctcactatgttgcccaggctggtcttgaactcctggcctcaagcgctccttccacctcagcctcccaaagtgttgggattacaggtttgagccatcgtacccagccgtgttttatttttttgagatagggtcttgctttgttacccgggtttgtcatagatccgtgcccattttatagctggaaaccctgaggcccaggggactgagccacttgctcacgtgcacatggctgtgagtggcagagctgagctcagaccctgggatcctccctccaaagtccctctcatgggggaattcagtgaccgtggatggggatgccatcatagctcactgcagcctccaactcctagactcaaactcctgccttagccgccaagtagctgggactacaggcatgtgccaccacacctggattaaaatgttgtgttttttctttatttgcggagatggagttttgctacattgccaggctgtgaagaagtcttaataaataaccaaagtaccccattcctgcactttgctctttcccaaaatggtatacccacagcttcactccctgcagtgatctgtatgtaattaggctcatatgggaatgtggacttggcagaggggcgctggaggccacatatcaggctgactgagtaatcccgtgaggaagccacagtgtctgagatactgacgggccaaacaaagtgtgggaaagaacagagatgatgtgaatgttggacagaggaagcctgaaagaaagggagataagggagcgacggcaacagactatttaatctacaccacacaaggaactaagttcaagatccaactcaacaataatctccagagactattttaaagacgcctttgcaggtttaagagaggctgtgaggcaaagctattccagctcctgatgttctgtgggcaagtttcccaggattccagcatctttgggattcattctatgagctgtggaaggccacagctttcccgcccttttcatcagaggacgtggacggcatgtggccggccaccagggcaggayagagctttttcaggatggcccaccagcctgmaggaagattcccagactcagttcctcagaatctgaagggcactcctccaagtcccacagagcagcccacaagtgtttaacrtgacacttactatgcagtcagactatcctaggctaggtggggctgcaaagacaaaggttatgctccaattgaaaaaaactgccagaaagccatgcaaacattgaaaaatggtagatactggcaaaatctctgagtatcttcttcgttttaaagcaacactttataatccactcacacgcattgaccttttcatcctaacaacagacgagaygtctacagtacgaattcttgagaccacgaaaactgatttcaaagtcagacctcagtctgagcctcagctgagtcacagaggagctgtgtggttccagttacttaaactctctgaaccctttcctcatttgtataatggcaataacaatatcgacttcatagaatgtttctagtttttagtgtggcgcttggtacacagaagagactgaataaaacaaaaaggcattatcaccatttggcacacaacatgttcatatatctgtaacaatggaggaaagacacaggagagactttggtgacttaataatttgccagaatgtgactgggcgtggtggctcactcctataatcccagcactttgggaggccaagccrggtggatcacctgaagtcaggagttcaagaccagcctggccaccatggtaaaaccccatctctactaaaaatacaaaattagccgggcatggtggcatgcacctgtaatcccagctatttgggaagctgaggcaggmaaattgcttgaactcgggaggcagaagttgcagtgagccaagatcatgccactgtactccagcctgggcaacaagagcaaaacaaaaacaacaacaacaacaacaaaaattaccagaatgtgagtacctgtactgtattccctttttcctcacccctcacaagtaaatgagacaagttgccatatgatccagaaatcccacgactgggtatatactcaaaagaaaggaaatcagtatattgaggaaaaatctgcacttcctctgtttgttacagcactgtttacaatagctaagatttggaagcaatctaaatgtctaccaacagatgaatggataaagaaagtatagtatatacacacaatggaatattattcagccataaaaaagaatgagatccagtcatttgcaacaacatggatggaacgagagatcattatgttaagtgaaaaaagccaggcacagaaagacaaacttagcatgttctcacttatctgtgggattcaaaaatcaaacctactgaactcatggacacagagagtaggaggatggctaccaaaggctgggaagggtagtagggggctggaggggaggtggggatggttaatgggtacaaaaaaagtagttagaataaataagatctactatttgatagcacaacagagtgactatagtcaataataactgtacattttaaaataaagagtataactggagtgtttgttgtaatggataaatgcttgagtggatggataccccattcttcatgatgtgtttattttacatgtctgtatcaaaacatctcatgtaccccatacatatacacacctatgtacccacaaaaaaattaaaaattaaaaaaaaattacaggactatgcagtcaaaaaaagtggatgagacaaatgagaacaaaataaaactgttcactgtataataattagataaatagaaaaacycaagtaatacaaatccacagaagtcccactaataatcactattaacagtctggttatatgaccccagactctctcctatgcccaagtatacagagtatattgtacacatacatatagaaataaatctatatatatatatatatatayayacatacatacaatctatttataatgtactatgatagtattcatagtattttgctgtctcattttttttacttattaattatattgaaaacctcctttaacatcaatagatgtatcaacatcataacatttgaggactgaaagagtattacattgaaggaatgaaccaatacatatttatttgttgaatttacagagtctaccaaagtgtcccaagtttataagaagtgactacatattgtggtagcatgtggttctttttcttctacatttttcaagattgagaaaggcaggctgaataaatataaaaagccttaacagcaaaaagttgttttggtttgagtgggtgtagcatagaagaacacaaactaacacatataccacagggaatagaatcacacattagaatattcagtaggtggccggacgcggtggctcacgcctgtaatcccagcactttgggaggccraggcgggtggattacctgaggtcaggaggtcaagaccagcctggccaaaatggtgaaaccctgtctctactaaaaatacaaaaattagctgggcttggtggcaggtgcctgtaatcccagctactcgggaggctgaggcaggaggatcacttgaacccgggaggtggaagctgcagtgagtcgagaatgcaccactgcactccagcctgggcaacaagagcaaaacttcatctcaaaaaaaaaaaaaaaaagaatattcagtgggtgttcaacatatcgaaaaaggactcaattttaaagactcgggataatgggtgaatagggatggctagatcaagtattaaatcgctaagtctgaagtcaagcaaatgtccttgtttcagcccaatcatggtagagttacttaatgatacagaggaaagttaactgaaaaaactgtatgatcttgagtgatcctagaaattaaatcactatttgaaggtgaaaacctaaaaaaaaaaaaaaaaaatcaggacttaccatatttctttagaaggtatcaaaaattaaaatattcattcagtgttaatatttctaatctaagttccttctcaaagagaatggttggtttggtaaaaatatatgtgataggatttgctgaagtcacatgacacatccttgccctcaattaagggtgccatacctccccccgcgactagtgacattccaggaaaatctcacttttgaggggaggctggggaagtgagcatatccccgcaatgggcagagtgtgtggaaatcgtgtctccagccatggagacacgaatgcagttaaccttttctaagtatccaacactgctccatgaatcaggcaggagatggggctggcagagagcagcagagggagaaagaacacatagcagcagcaaagaaatgccaaaggagatagatactggctgcaaaatcccagcgagatcaaaggcggagatgcaaagtagagcaacacagagtctgatctgtgaaaccaaggtccataaccaatggcaggtgacagtcccttacaacaaatgctccctaaatgcttcatccctggtccagccgatgcaatttttaaggggagtggtaatttgtggtgggggtcatgctcttagaaaaaacatgtctattacattttgaccatgtgaaatagaatcaatgttgggaactaagaacacagaccttaaatgtcagcagtggatggagtcagagagagcatttctttgacaattcactctaggcatttgcaatatcatggaatatgaactgagctacttttaacaaatctcttttcatagtacaattcaggacctggtgagatgtttccagatctaacaatgcacttcttatagggacagagtttttgctttgcccaactctctcgtggtcaccgcttttacatgagtgagcattagatggtcaggctgtgttgtgtgctatacaatggcttttttacaccatcaagactaaatctgctgggtgctgtggctcatgcctgtaatcccagcactttcggaggccaaggcaggaagatcacttgaggtcaggagttcaagacaagcctgggcaacatggcaaaaccccgtctctactaaaaatacaaaaattagccaggtgtcctggtgcacgcctgtaatcccagctactcgggaggctgaggcagcagaatctctttaacccgggaggtggaggttgcagatagctgagatcgcaccactgcactccaacctgggcaacagagtgagactccctctcaaaaaaaaaaaaaaaaagaaaaacactaaatcatacattgcttccaaaggtagctccatatcctctgaaggtatacatgggagggcccataacatatcatgtattccagatctagccataaaaccatgcggtttagattytaacatccaaatccaattgtgtgtctctggtaaacatgacttgcccagtaaaaccgtgctgatactacatgttccacagttacrttatcattatattttcggactaacttttggaaatgttgtcttgtcgttgtattgtatcatcctgagtaagtrttaaattccttaatatttgccacaaccatttgctgagtggctaatttgtatggacacatttttatctattatctttaatcctgacaaaatctctgtaaaataggttttattggcctcattgtacagatgaggaaaataaggctcaagaaaagtaacctaaccaaggtcaccagtaagtgacaaagctaggtttgtctgggtttcacggtcaaagagaaaagatgagctccctggcaacatgcacgagagattaaagtctcaatacataagcattctgacaaacaaaaaataagcacttgcagccgggcacagtggctcacacctgtaatctcagcactttgggaagccgagggaggtggatcacctgaggtcaggagttcgagaccagcctgggcaacatggtgaaaccccatctctactaaaaatacagaaattagctgggcatggcggtgtgtgcctgtaatcccagctacttgggaggctgaggcaggagaattgcttaaacctgggaggtggaggttgcagtaagctgagactgtgccactgcactccagcctggacaacacatcaagactctgtcaaaaaaaaaaaaaatctttgtcagggttttttgttttttttttttttttgtgaagatagcaagcgaggatatgagaacaaaagttacccatgacattcagtggaaagttgtgtattagtgcccaacaggtgccaggcaagcgttcttcaggcagcacagcgggaccaaagtgctgacagtggcaacgacacaaaatgtagccttggcaagtcagtctaacaattactttgcatcattctgattatgagccacaagcatgcaatcaacagcatagagacagtcttaaatgatctccatcagcattttactttagttatcaaagtgtggcagattgaacacccgctcatctgacctaagcgcaatgttaataacccaaacacaaagaatgtgcaggaataataatggctcaagagcactggccttgctgggggccattggttataacagatgtattttattttatccaacttttttcatttattacctcagagtagatacatattattatgtgtttctcgtcggataaatttatccacagtctaacacaatttaaattgagttaggacttaagtgagtttccaaattccctaaacttactatggcatgatgtacatgtctctatgaggagcacttttcacactccatggtaaatttttgtcgtactcatcttctccactaaattgtgacccagctctgatagcctggattttacatcatttatctctgtgtagcagacattcaaaatatgcagaaatgaatgaatcctcagagaatcataaataaaaggcatgcttattgagtccgtgaatgtccccaagttggagaagtcaccagcatttcaaagagcaacatctgaattccaaaatttgtctaaaattgaaaagatgattataaatctataccatgaaatttggtagatatctgttcttaaggaattaaaacatataaatataaaaataaggaaatactcctctgatattggctgaagaaaatcattttcaargagactcttaccaaagctctattttcaacattaaagcttaaaatgtaaggggcagagagtattttgagaatggttttcaaggaaagtaattaaaatcaacgtaggttgtagaaccagatccagaagagaaatactgattgctatatttcaggggtgaaaaaaggtcaaattgtcaaaaagtaaagaaaagggcctgaaagttttcaatactgtatcaatgcccatcacttcactcaaaaagttagtgaagcagtacgattccatggaagggttaagggttcattttccttttagataaatattgtatctggagcaaaaggtaacctcttagcagattcatccattgtcggaatcttatttggactgtacaaaacgactaccccatcgttttacttaagagaacatctacactggaatctactggagggtggaggtgggaggacaaagaagatcgggaaaaataactaatggttactaggcttagtacctggtgacaaaataatctgtaaaacaaacccccatgacacaagtttacctatataacgaacctgcacacgtacatctgaacttaaaatataagttaaatgaataaaaaaagaaaacatccacacatagaagtcaatcaggttttatgatttcctgggtgtctgtgttcacgggtgggtatgcgtgtgtgtgtatgtgtagcatttctttcccattatctcaatgcttattatacataattttttaagtcaatgcttaatactcttcaactgccaaaacataccatataaactcttcaaagacagtgtccatacaccttaataagtcctctaacagctagcataagtttactgtatacatggtcaaggtattgaagagaatttgtacaaaacaatcagcacatccacagtatctcaaaattcccaaattggcaatcactgccttagcaaagctgcatctctgacctggagatagaggggaagagaagcaggaaaccatctttagggtgccaggcagcaagttgcctgtggtctacgtttcggggcaggtccctcttccataactcctctcaccacagctaaagatcagagctacttcaccaaagtttagtacgaataggaaatatcacagaggaaaggcagaattcagattctgtgactttaaaragtgcaayccaggcaggacgcagtggctcacacctgtaatcctaacactttgggaggccgaggccagtggatcacctgaggtcagaagttcaagaccagcctggccaacatggcgaaaccctgtctctactaaatatacaaaaatgagctgggcgtggtggcagacacctgtaatctcagctactcaggaggctgaggcaggagaattgcttgaacctgggatgtggaggttgcagtgagccgagatcatgccattgcactccagcctgggaaacaagagcgaaactgtgtctcaaaaaaaaaaaaaaaaaagtgctacmcatgttagaaaccttttggtcacatctggtaacagccccagtggtgctaaggacatgaaagccattgccccaatcaaaaaacaraggcaaagaacacagctctggacacaaaattggaattcagtaaatacttaaaagcagtaatgtaacaggggtctatcttattcagtaaatacttaaaacagtaatatctactacataagctttattgttttcaaagtgaatagcttgcagtcaacatcactacattatatatacggttytaaaaatagtatttcttaaacacctagaacagccaaaggttggcaaactttttctataaaggaccagggagcaaatgctttaggctgtgtgggccagacatctccattgcaactactcaatctgtcattgtcgtgcaaaagcagcaattgaagatactcatacaaacaggcatgtcggtgttccaataaaacttaatttacagaaacaggctggggtgatatttggcccatggtccagtttgtcaatacctggtctagaatattattacactgaaaaattataagatggactctcaacttccttcctttcctctaaagagattatttttcttagtgaaaagttagatgacaatgtcacacagtagccaaaagcagtcggtggtatattctgcagcatccaccactgaacctcgtccatgataagcagatatgggcaaatctgagaattccaggtgcagttttccagtggtaagtctctacatattcatctctgcattacatatgtgcaaagggaacaggctgccccatggaaccccagataaatgctaaatagcctcttgaagtagtgtactatctaggcatgcaagaagactcttgagcaacaacaaaaaacaaataccttgattaaaaaatgggcaaaggacttgaattgacatttcttcaaagaaaatatgcaaatgaccattaagcacacgaaaagacactcaacatcactaatcattaggaaaatgcaaatcaaaaccacaatgacataccatttcactcacattaagatggctctgattaacaacaaaaaaaacaacccccaaaacaagaaaataacaaatgttggcaaggatgtggacaaattggaactctgtgtacattactgatagaaatgcaaaatggtacagctrctgtgaaaaataccatgatggttcctcaaaaaatttaaaaaatactacatgattcaccaattccacttctaggtatatacccaaaaaaactgaaaggaggcacttgaacagatatttgtataccagtgttcatagccacataattcacaataacctaaagtggaagcaacctaagtgtccatcaatggatgaatagatacaaaatgtgatacatatgtgcaatattattcagccctaaagaggaaggagattctgacacatgctacaacatggatatgcagttttgctttgggaagatgaaaacgttctgaagatggatcgtggtgatgactgcaatataatgtgaatgtacttaatgccactgaactgtacacttaaaaatgggaaaaatgatgaattttatcacaataaaaagaagaagaagaagaagacccctgtgatcacttgaccttataagggagcttttcaggtgatctgtttggatcaagatatcccaagaagtttcaaatgagagttgaaacttgagagggttggtttatgggaggcagctgatgaactgtgacctcgtttgagtgttccaggaaatcggcttccacatctaggaatcacttggactaaaaaagaatgtgagagctcctttgattcagagtgagctctcacatgagatttgtaatatggccagaatgcttgcaatatccttttctgagttttacaacctcagagacccaatttggcagtggatcaggagtaaagtcactaataggaacaaaagctaggaaaatttaccatacctgatggagggacataggaaagggcaaagaggtaaaagaaatccctgtaattaaggcaaagccaacctatctttcaggatcacagtgaaaactcacaatctccagttatgagtaagagaagtcttcttctttccctaaccattctccttcgtcacgcatataactgcttttaggtgactcgtttgaaatgtaagctgctctgagtctaattcggcataacacttaacaccatataccatgcacaagaggtgacttcatggaaactgtccctatttgcatagcactattccctggattactcaggtatcatccttgcaaaagtcaaactgatacagggttgcattgcctactacaagcagaataacgttgagtcatggtttctcagctgaaagaaaatgatatcgttttttcctatattcttggtaagaatcagaagatacctccaagccagcccaaccayaaatcctatgaccacatatatatgacactgatgactaccttcaggtgacaacaggtttccccatgctgccaaaataaagtagaaggctgggtaatggtttagtacatttgaatcatgcacttttccaactcagttattgagaatggccattagagggtcccaaataacccagttaaccaaaaaattttctgaccgttaagagttttaaccaatatgcagtaaaatgcagttttcaatcaggggcacacatctctactgtaaccattttttgacagttttgttagagaattcaaagcaccaaataaaaatgtgtacctgaaaaagactactagaggaaaaaaaaataaattcagggtaagggtacatactagatatttagacagctgaagccagtggtgtgtgcagaaatgtttaataaaagtgggaggggagagaggacccctgatgtgtagcatttgcagacttctgtagtgtaaacactcccaccatggccaatttcaaggtaataacatgatgtcaacatgctccccaaatttctgaacatttaacacttggctcataaaagtgcaagctggctccactacaccactggtccatttcctcatcccaccaagatcagtaaaccctacttyctacctaaaataaacccaagaagcaaagtccttcattattttcggctttcttcttatccatagatatttaagagactatctgttcccacttccatgtctttgcttctagcctcctcatctggaataaaccttcctaagtctgctcttgtataaacagctttctttgaatgctcttaggctaggtcgcaccagcccttctgtattctgattttctacagcacttctctgttactgtcctgtcatttgattctagagggcaggggtctgtgagggcagggcatctgcccacaggaataagcacagcaccaagtctgacttggattgagctgaataaatgaaatctgttgagttgactggctgggctgccttctgtctagtctgccacagtgagctaggctcctcctgaagtgaactaggatcagtgagggactaaagtcaatctgtagcatgaagatttcacagggcactcactactgcacacaccaaactcccacaaaaggaagagggggagctaatatgtgttgggcataaaatttctgcaagccccagcacccagaacttagttcctaacaccattctccaataaaacaaaccaggggtctttggagaaatggctgattctagtactgtgacagggaatatccaagatgagcatggagcatcttgtagtatcagaaagtgggaaaatgctaaatagataaatcaataccccacagtgatgggggcatataaaagggggacaagagacaatattcctaatatttctcaaagagctgccaatggccagaactaaaacaaccagagcaacaaaataaacaacatagtactggattagaacctaaagaataaaataaacacccatgagttcatattgatataaataaattttaaaagaggaagaaaacacgcatctcttgagcaaaggagttctaaataattcatgcagatgttctgcccttgtaaaggtagagcgtaactgcccaccccttaagtgtgggctgtgcacagtgacttccttccaacgagtagtacagtatggaaaagggtgtgtgtgagtgtgtctgtgtacaaagagtaactttaaagttgacaaaccctgacacaacctcggctgaggtcatcaagatcaacagcccatgataggtcacatatgatgtgataaaagtgacaatctgccaattttaaggagtacagactaatcattttgtggactgtccctcaatttgggtttttctggccaggcatggttggctcacgcctgtaatcccagcactttgtggggccaaagagggtggatcacttgagcccagaagtttgacaccagcctggcaaaaccctgactctaccaaaaaaaaaccaaaaaccaaaaaccaaattagctggatgtggtagcctatgcctgtagtcccagctactcagggggctaagatgggaggattgcttaagccccgaaggtccagtctgcagtgagctgagatcgtaccactgcactccaacctgggcgacagagtgagaccctgtctcaacaataataataataatagtaataataaaataaaataaaatttacctaaaagcaagaactaaagccaatattttattttgattgagtaatgatacacaataactagtcttgaagggcatcaactaaaacatgatggactgcaggatggacagatggcttgatacctgacaaagcaaatatagcaaaatattatttgcaaaatctaggtggcaagtttatgggtgttcactgtacaattcttacaatttacttgtatgtttgcaatttttcctaataaaatgttggggggaaagtctctcgtgaacaactctgcccagtcatagaagagtttcccaggaaagatttatttagcccaaatatgcatgtatctgacttttgggggacatctcatttaacaaaaattaggcttctgatttctccttttaacctcttttacagaaaactgccccccttagcagtgaaaggcagcacttttgccaatgtgctattgcaatgtgctactgcaatgtgcaatgcaattaggctattaaataatagacaaaaggccaatgtttattaattagcaaaaagccatataggatatgagctctagactctgcagagctttatattccacatggaccctccaatcatttttgtggcttggatggatttcagcactggtacttatcatggtcaaagatacatcattattgctctagtcaatacacattttcattaaatagcacatttataacacatgtatttattttacaatttccataaacttggttatttactcattctaccttcaactcttacttggccttaggaaatgtaaaatcttttttttttttttgataagaggtttttcttgaaataggagttaattaaaagatttaaggaaaacgtacctcttgtgattcaaacatgagattattattatcttttataaaaggtaaaatctatttcagagcattttaagtgtgcatcaaccgtccctgaattccgatgcttgacaaattcattagcaataacaaatgttaaacctgtctagagtatttccttgctattctacrcagcaaatcaatggcctcgccaaccgccacaggataaaagtgtgtgtattctgccaacgtgatgccaccgacagggagagccaactctgctcaccctccgagaaggactctagtgcataagtggctgcctatgtattgggatgttctggccgggcgcggtggctcacgcatgtaatcccagcactttgggaggctggggcagatggatcacctgaggtcaagagttcaagatgggcttggtcagcacagtgaaacactgtcactactaaaaagacgcaaaattagctggacgtggtggcaggtgcctgtaatccctgctagtcggcaggctggggcrggagaatcgcttgaacccaggaggtagaggttgcagtgagccgagactgcaccactgcactccagtctgggcaacaagagtgaaactctgtctcaaaaaaaagaaaaaaagaaaaaaagaaaaaaaaaaagaaatgatgttctaactgaaatacaaccatgatacaggcaaaaacagacttcgatttggaagctaaaaaaggtgtcttggccaggtgcggtggctcacacctgtaataccagcactttgggaggccaaggtgggcggatcacctgaggtcaggagtttgagaccagcctggccatcatggtgataccccatctctactaaaaatacaaaaattagccaggcatggtggcagatgcctgtaatctcagctacttgggaggtcaaagcaggagaatcacttaaacccaggtcagcttgctggcaacttcccagattagtgcacttgatgaaaccccttgtaataattaaattccttccaccggcacaagaaatatgtccactgaaaataggaatttcctttctctctttgccctcaagaccttcaccacccaggacagtgagaggctataagtgttaagggcaccggggcagagccaatatctgggtttaaatgaccttgggcaaatcacttaacctcactgttttcagatataaaatttacataacaaaagttgtgaggattaaagggttaatatagcacaaagcacttagagcagtaktataggtgtttgcttttattgaccaacatacaaagagctgactgttattcaatgattccaaaataattgttctttttatttttttaatcttttttttgtttttaattatactttaagttttagggtacatgtgcacaacatgcaggtttgttacatatgtatagatgtgccaggttggcgtgctgcacccattaacttgtcatttaacattaggtatatctcctaatgctatccttcccccctccccccaccccacaacaggccccggtgtgtgatgttccccttcctgtgtccatgtgttctcattgttcaattcccacctatgagtgagaacatggggtgtttggttttttgtccttgcgattgagatagtctcgctctgtcacccaggatggagtgcaatggcactatctcggctcactgcaacctaygcctcccaggttcaagcaatcctctcgcctcagcctcccaagtagctgggactacaggcatgagccaccacacctggctaattcttgttttttcagtagagacagggtttcaccatgttgtccaggatggtctcgaactcctgacctcaggtgatccacctgcctcggcctcccaaagtgctgggattacaggcatgagtcactgcgcccagcccaaaataactattctaacctatcctctcctcactacttacccccactatccttcacctgccaacccactctaagtctgttcatttagacttctacccattcccatgcagaaaggaccagttcagcaacagcagggatgctggcaggtasgttttagaaactcttaatcacagggctaatgtgttgatccagcttaaatgtatagctaatgattcattccacttttcattttataacaagggtttttttgcatgcagattttatcatgacgcttgctttctctcttctcttgtatcaagcatcttttcatcttcagctctgtcccaccccactgctgaattttttaaaaaagaaaaaagaaacccagccaactagctcagaggcctatgtattttgctctgaacttcacactgacgatattatacacagtcatggcagtgactgtattatacacggtcatggaagttatggagaattggaatctaatgaaaagagataagagaggagcagagagataaaggaacccttgaaaatcagccccaatatctcacccagatatgggtggcctcagagcttattgatatagactgtgtctctcaccaaagggcatgccatttgcttgccatcatttctttaaaactattagtcactctcacaccgatttacctttaaacaaggacattctataaccagggatccacctctgtggcttagtcatcggatcagcctcaaggtcaccgactagagtaacctgatgacaattacctcattcacccactatagaacagttctatcacygatcaatacaggacacctctgcacaacatcaacaaagccttctcaagggggcaccctgcatgcatcagaaacaaattacacccttagaggcagatgacacaccgaaggcagaaagatcctctctgcaaagcaaagcctttgtttaagtctgagaggagtgccaatccaacctcaaaaaaaggagaaaaggagaggaaagaggatccatgccacagaaacagagtactgttcggaactcttttcttgacatgatgtttcccttgcctttccgctcgaacacgggatgcatcttctggggaagagaaaactggaagtgcaatgacaggggactgcaatgctgagaatcaagaaacagaatttcacagtgcattggtgaaatcaccaataataaacattatagagtgcttactctgtgtcagtctcttaattattattataattatttttggagacggaatcttgttctgtcaccaggctggagtgcagtagcatgatctcggctcaatgcaacctccgcctcctgggttcaagtgattcccctgcctcagcctcccaagtagctgggactacaggcgcgtgccaccacgcctggctaattttttatatttttagtagagacgggtttcaccatgttggccaggatggtctcgaactcctgacctcaggtgatccacccacctcagcctcccagagtgctgggattacaggcatgagccactgcgcccggaactgattcagctctcccaacagcccagtgagatgagttctattattattcccattgtacagattggagtactgaggcacaagagggtaggtaaagtgcctgaagtcacactgataaatggctgcagttgggattcaaagccaaggagttaggctctagagtcactatattaaactgcctggttaagaacagcaatattacataatgttaggtttgtgttgtgttttacagtttacaaaatatttgcacatgctttttccctctgcttggaatggctgtctcatgtatttacttatgagttcctctcccaacagagccttctactgaaaggtgttcaataccgtgttcatagagtgaaggtatgaataactgactctaattaatccttaaattgctgtgggagacaggctgagaatatatgactaaacttgttttsaaataaggaaaatgaggtttgggaaaatcaaatgacttgtctaaggtcatattgctttgaatatgagctcatcgtaactaaaccagtggtttaaaaaaawttttttttaaccacaggacctttctaagaaaactattttacatagcctcagaatatcacagagctgaaggagaagctgccccgctgccccggtcaatagaggctgagggcagcccacagcctcaaagtttatggggagcctctggggctttgcagaatgcaggctggggactcactactgcaccacgcaacactactaggacacctgacccagccctgaaactttgagagagggtgaccaaccacaccttcaagtctcacccatttacgactctgacccatgggggaaggcagaggattaagattctttctccttccaccccagcagagggacctgttcttagcttcccagcttgagcgtctctttctgtttctttctttggagctcttctgtatttgttcctttttcagtcccgagggctgatcactggaaacagggcaacctctggtgacctggtttttcatcaccagccagggcagaagaagtcaaagtgtgctcaagggctttgcacgctgctccctagaactggacgcctttgagaaatctgggattcttccaggcggcagacttcattccacagtggtggaaaagctggccagggagagagagcaattttgcaaggcacagtgccgcacttggacctgtatcctgacaccgccaaatcagaggaggcagaaagccctgagtgttacagaacgtctgagctagaggaggcctctaagagctttcagtccagtctcctcatttaatgaacacggaaattgtatcctgctaacgtaaagtgacttggtcaaagctacgcagtggcacaactaaaactcaggatttcygacatcttgcccctgagcacccaaaactcaaaggacagaaagtacaatgtgaactacagaagtaaccaaaggactttctggtgatgtcaaatgatgcaagacagcaaaatgctcaagttgggaataaattgataggtktatctattaaaaccatctcttaaggccttctgggggaaaacgccaccaccaagaattacttsaaggcttgtcaagtgctttaaggcgctataaggcaagatgcaacactgagagacattaaaaaaagataaccttttccccactgcctgagttgctcttgagtgcctagtgggtgaacagaggagggagaagcgcccaggcttccaatgggttctctgcacagccacacggtcattagcatccacaatctgcattcactccagatgagatttcatcaccgcatcctatttattcattccttaatataaatctaaattgcgctcttcaaatagcagagagcactatgcttcagtaaggggaaagagaaacgatcacattaagagacgtgctgctgcattttcatcttctccctcctatgttactttggtcttgacagccttaattcacacagtgctcccggagcccttccctggctcgtcccaaggatcagcaaacacacggctatcttagtttttcacactggggctctctctagagggaaagtatgtagctttccacattcccaactacttgggagcccaaggtgtttgcagcagccaaatacaactaacgagtaggaaaaagacactaagaaatgccacaattgtgtctgacacattcaaaagacagttgtcctcccatccatggaggatctgttccaagaccccagtggacgcctaaaaccatgaatagtacctttatgtatatctactatgttttttcctatacatatacacccatgatagagtttaatttataaataagtcacagtaagagattaacaacaaaaactaataataaaatagaacaatcataacattatactgtactaaaagttatgtgaatgtggtgtctctctctctctctcaaaatatcttattgcatggcactcacctgtttttgtaccacgcttgactgtgggtaattgaaacagcagaaaatgacaccgaagatggggggtggggggaactactgtatcaacctggataagttcacagggaacggaacacattctttccagaaggtgatgcataaaatcacagcatgtccacaaatggcctttgggaatgatgggacatttgagtttacaaaatgcgagacaagcaaagcccagggagctgagctctggcctgggtcccgctcattccttcccaccgtcccgcagccaccaccacctctcattctgtgcgggaggggacatgtggccctagcaccaccactttccttataaaaagtaatttatggttccctttcccatgacaggaaaactgatagaagtttacaggcaaaagtattatttctaattcttttcatttggggataagacaagtcttttccccctctgtgtgtatttttaaaatagtaaaaattttaaatgaacatcctttatcggcttgcacatatgctaaaggcagggcacataagactcttacaggaaagtatgccaagagaaaaaagaatgatcaattacatgtgaattgaactcctaaatatgccttaaaccaggggatacgtgaccaattttattcagtaattctgtttgcatgtgttctaaccactaccatttcagctattttcctaaaaaaaaaaaaaaaaaaaaagagagagagagagtttaagcatgcctagggctcagaggaatttagatgttttcaagcattactacttgatgcttttagagcttcatgcttgagttaaaggcgagcacttaaaaattaactctaacctctgggtttagggctagaagccaatgacttcccatagggtcactaaagatgctatttgttggctagatttgtcctgggagtactcaagggtctcgcaacaaaagtaacagggtgtcacttcgaacctaaagactcgattgcagcatgggaaaacataacaaaatataataatgttatcaagaatccttttttactatcaagtctgaagtactggagatgatgagaggaacatcagggtattggaccatgaagagaaaattccagtcctgggtgtgccatcctgagcaagtcatagctctcctctgcacctcagtttcctaatcagtaaaacaagggagttggtgaatttctcaagtccctcgcatgctccaggtctccgattccacgctcctcgtctttctctttgccagcagggactgagtgtgtgacgaaggttgtgcctttgacctcagaggaatgtgacaacggccttccttgcattgttcccacagtaaccagagccagctgtccaggccggctggccaagttgtggcgcaggatcacacacaagttggggctctgcttgggggactctgcctcaaggcctcccccttcctctaggtctttatccgcaggtcgggaccctcctaagaacacaagaatgagcctgcaatccttcctaaataacttttgggggcttaaaatcctgggtgtagctacaatcatgtgaaactccccctaatgacagctagaggatttgggtgtgtattcaattctctgagtctatgaccctacatctgggatgctgtggggtgcttgcaacctatagacagcaggtgttttccaggcgcgttggcgtgttatggcactgggattcaagtgaggatgaacatctaagatgagagctggagtgagccacgatttgtaaccatgcagatgtgagcagcagcgaccatgcaggctttcctccttgcctgcagcttgcatctgagatcctaataagggaggatcactggaaagtattaccattatttttagcttttctaagggagggaggagttttygaaaggacaaaatggaaaggaatttagggcaagggtgtgtgtaggtggggaggtggtgtggaaggaggcgagaagatgagtagaaataagactttcaggacagataagcagcttccttctccttccttaatagatgatcacagccaggcttccagggttataaaacaacaccaaggtcttcaggtccaggtatgtagagacaaaggagtcttcgcaaggaaaccatttttctaagagcatggcaaatacgcattccatgttgtgggattttttttcaacttcctttcttgaaacatagctgatgaggccactaatagaagcttcttggaaaagagtttcataattcacgtttgatttgaaggcagctttaactttcttattaccccccaaaatgtcctctttggtcttacagcgatcatgaatgttccagattaataggagatgaatgaattctccttaaatgaccttaatatgttcaagtagcaaagtggaggtttgagtccagtgacttctggggagacagttgtatgggctaagaacacataacattttgaggaaggatttcttgtctttttttttttttggcaatagaaagtaaaaagtctcctgagctgaaaaggccacagcatgtattcttcaattcagggtcctggtaatcactggaaccacaagttcaaatgccatctagaccataaggactcttataaaacacaaaccacttcatcatcaacaaacctatttgcctactagaacttttaaagcaaggctgcaaactattcaagtaaacaaccttgtggggtggttgacatggaccgagagctaacaagagaacactggaattagcttctcagtttcaaaataggacctaaaggagtttgcgctataggagaagagttgytgcattttgtttaatggaactaaatttgtgcccatttaaatcatgagcaggtggcacttggtagcaaagaaagcctgaaaatattcacatttagtgaatgcagttgtatgtataattagctgagatttattttaaagtactctaatcttttgtactcttttctacaattcaaactggtgagaaatagagagcagcttttgaatttattatgaaagcacagctatcgtattagctgttaagaaataaaaaatggggagggtgtcggaaaagtctctaataatatgtacattaggaacagaccaaagcaaagggctttctttccttcagagtagtgagtctgctgctgttcctgagaaatgagtgagctgcacaggaccagccagtaggagggcgatgggaagaatcaaggtgtgcattttagaagcagaaggttttttcatggaaaattccaaacatgtaccaaagactcacaatagaacaccaaatatccattactcagcatcaacagtgacaaaccatggctgattgtgtcttcaagcaaatcccagaactgtaatttcatccctaagtatttcattaggaaccatagaattttttaagctccctcattttcctgaggtcctcaaaagtcaaatgacccagggccatcatgtccaactgtgatgaggcagggctggagcccagtcttgtcacctggggccaggtgtgctctccttcaagccccacccccaactcccatctctcttgtacttaccactcccttcagacgtttttaactggaccctgagccataaaattaacacagaaaatgagcatgacattggctagaaatcagaaaatcctgaattttaatctcagctttgccatttttctgagccttaattgtcccaactataagtagagatatgaaattgctactacaagatataattacttctgacatwcttataaaaagggttgactttcaacttgtaacagttatgtttaaggtattttcatggagtttcgtaaaagctgttagaagccataaagcttagactatgagatgacttccgtgaggtgagatctcctatgttaatgagtggtggggaggcatacatagttattatgtaactgtaccctgagagtattgccacgacaagtttatttatttttcacataaaaattagaaccaactatttcaacatgctgaaatggaagtttctatgaaaaacaaatgtttcatataatataaatcaacatttcccaaggaggaaaaaggcaggccctccccttggggaagttctagcatctttcagagaaagaacaggcaagcccaaggaaagtgggaaaagggaaaagaaacattccctctctttgttgtggacttgccaaatccctgaccgaagtggacttacaacagaactgcaaatattctcacgaaagtgtccaagcctggaaaaataagaagcaaataaaaggttttgcctaacagacggaaatatactgttcaattgcactccttttccttccaaatgcacataaagatacagtatttggggaggtgatggcaatgagacaattagaatgtttcagaaatcccattctaaaccaaccccaaaccctgagatttggctttcaatgcacctgctttcaaaagtcaaaccagaggaaatcttgtcatttttaacatccaccgccagcaaatgcctaccatgtggagtctcaccacaagacccaagctgtgcaccaggcrtcagagagaagcggtggtgtgtgtggatggtctacctgcctgtgttagtttcctggggttgcaataacacagtaccacagactggggggcttcaacaatagaaatgcattgtcttacagtcctggaggctagaaatccgagatcaaggtgtctgcagggctggttccttccaggaggtgcaaaggagaatctgttccatgcccctctcccagcttctggtggctttccggatatctttggtgtttcttggctttgggcagcataactccagtctttacacggtaatagcctcagagggaggctatctctgagcccaagtttcccctttttacaaggagatgagtcatatcagattagagcccactctaataacctcatctgaacttggtcatatgcaaaatctccttccaaataaagccattgttcatggacactgggaggtttagcctgtcaacattttggtgggggacacagtttaacacagatacctcctcatcctcacctacaggcatgtgttgggtagcggtgggctatgctctgagaaatgcatcttcacgtgattctgttgtgtgaacatcgtagagtctactcacacaaacctagatgggacagcctactacacatctaggctacatggtacaatgtattgcttcccggctacaaacctacactgcatgatactgtactgaatactgcaggcaaatgtattacaatggtaagtatttgtgcattcaaacatacctaaatatagaaaagatacagtcaaaatgaagcagaaaagataaaatatggtacacctgtatagggcacttcccatgaatggagcttgcaggattggaagttgctctgggtgagtcagtgagtgggtggtgagcgaatgtgaaggcctaggacattactgtacactactgcagactttataaacactgtatacacttaggctgcaccaaatttatttttgaaatttctttcttcaataataaattaaacttagcttactgtaacttttttactttataaacacattatttaaaacttttcgactcttgtaataatacttagcttaaaacatcatccactttaaagttgtacgaaaatattttcttcttttatatctttattcaataaacatttttctattttcatttttaaaaaattttaaacttttttttttaaaacaatactaaggcaggagcagtggtgcacacctgtaatcccagcactttgggaggccgaggcgggtggattgcttgaggccaggagtttgagaccagcctgaccaacagagtaaaactccgtctctgctaaaaatacaaaaattagccggcgtggtggtgcatgcctgtaatcccagctactcaggaggctgaggcaggagaatggcttgaacccaggaggcagaggttgcagtgagcagagattgcaccactgcactccagcctgggcgacaaagtaaggctgtctcaataaataaataaatacataaatagcaaacaaaataaaatactaagaaacaaacacgcattagtctaggcctatacagggtcaggatcattcatatcacctctacctccacatcttgtcccactgagaggtcttcagggcaataacacacatggacctgtcatctcctatgacaacagtgccttcttcttacacatctatggaaggacctgcctgaagttggtttgcagttaacttttttttttttaaataagtagaagaaatacagtctaaaacaatgatcaaaagtatagtatagtaagtgcataaaccaataacagttgtttattaccattatcaagcattatgtgctgtaccgaattgcatgtgctctactcttacatgactggcagcacagtagggttgcagcatcacagcaaacatatgagtaatgagttgcactaggacattacaatggctacaacattactaggcgataaaaattcttcagcttcattataatcttatgggactatcatgatatatgtgacccactgttgacccaaatgtcgttatgcggcacatggctgtaaaaagccataagtgagggaagcggaaccagctcccatataggtgtctgttgtcccacagaggataccaccgatgccccaggttgtccactactgcttaaagggcacattcaagaataggcatgctggccaggtgcagcggcttacgcctgtaatcccagcactttgggaggcagagatgggcggatcacctgaggctgggagttcgagaccagcctgaccaacatggtgaaaccccgtctctactaaaaatgcaaaattagcagggcatggaggtgcatgcccgtaatcccagctactcaggaggctcaggcagtagaataacttgaactcaggagcaaagattgtggtgagccgagatcgcaccattgcactccagcctgggcaacaagagcgaaactctgtctcaaaaaaaaaaaaaaaaaaaaaggaataggcatgccattctcactcataagtgggagttgaaaaatgagaacacatggacacaggaaggggaacaacacacaccggggtctgttggggactggggtggggaggggagggaacctaratgacaggttaataggtgcagcaaaccaccagaacacatgtatacctatgcaacagacctgcatgttctacatatgtaccccagaacttaaagtaaaataaataaataaaatacaaaaaaaaaaaaaaaaaaagaataggcatgcaatgcttatggacacaccctagcaagtggtcactggttttacatggataccaaggcttccctcttgccttccctcctgcaccctctcagctctggcaatgtggctatcacacaatctgcatgtcaacatggcctcttccaaccacatgctcctgtcaactttccatcctcttctgcatattcagcccacacttgttccttcttctttcatcccttgtatatttgggacaatctgagagggtatcctagaaaagggaatccaaatacattttgatctatttctacagtaggcataattattaggccataagtgagaccatgatggttactgttgactatgctcttctgtagttttaaaagtgcctttcatgcataatagttgcagaatataattacttaacaaccctaataaatagtaacataattattcccaatttatagaaaagaaactgaagctcaaaaaggttaggtaagtcagccatggacacacagctaakaaaccacagagccaaaatactcatctcttcgaatgtcaagttctatacattttttgcaacatayagtatgacacagtctgtattagattatcaaaaaggattaagtttttttcttgactataagcaatatggtagcaataatatcacctcatgtttgtattccatatttgaaaacattttccaaaatgttttaacttcaggtcttatttttccttataaaaatcatgagttactcctagccccattttacagatgataaattaaggcagaggttatgcaacttgcctaaataaactaatgagttgacagtggacctgaagttagaatcactgcatcctaattcaaaaactagtatggcttttcagaggggataattcaacctaacatccttggagacataacactggagataaaataacataaatgaagaataaaaagaaaaatcttggataagttcctacatattttactgcaggaagaagccacatgtatttctgtgatgggtttgcagaacggatcccagcgctgtgaaggaggccagtctagacgggctcccatatcccttagaacacataaaggaagctattctaggcaagtcatacaagacttgtgattggtgaaaacagagaatatattttctaattcatgacaggccccaacattccctttggtctttcacgatctgaattcatgaaagaaagattccagaaggaagtggaatctgagctaatgctaaagaaataaacagcttgagaaaaagtgggaagaaacgtgtgctaatatgttcaagagaccattgcggttggaggtgtatgtgtgtggggagacagaagtgggagaggaggaaagaagaggttacatggtggagggtgtcaaaggtcttgctgagtaatttgagttgattctgtaaaatctgagggacttctgaagatttccgagcaggggaatgctttcattagatgtgtactatgtctactgcttctaagtgagtgactctgaaatccacaagtcgagccctgacctctctttccaagatgcagatctgtttttctgaatgcctgctgcacgtctctacacagctatcctgctgtggcgcttccagctgggcatgttagatctctacagtccctaatggtctgtgattctagcagaagttacgggtctgaaaatttgacatttcccttgaaaacactgaaaataaggaaaagaaaagtcatattcaagaggaagagcaaaaagaggagcgtctttaaatcgaaaaatcaagtctatgttagtcatttctctctggctgtgctcgggctgtgaaactgcaagatgcacctgtgtgcgtataggatggtggacgtgtgcataggtggatatgtgtsgtgggaggacacaggaggtactgctaaggcactctccaaggacacatgctctcaatgacaacccagaatggttttcttgccactcaaagatgctactcacacgtggagaggctggctctagaaacaattaaagtccagaataaggatcctaaattgctcaatattttaaacattctatgccactgtaccccaactcacacttgtctttctaaccagctcactctatgtctaatgagcaagtcatccctaaatccttatgaagccatgtagtggggagtgtcccccataaagacaggtgaagaactccaagatactcctttaacaggagtaaaggtatttttctattaaaatgtccttctgctgcttcaaaagaaaaaatattgtgcacaacgttacgttagcagagagaagacgaagcagcaccttcattcacacagtgtgttttgaataaggtgtaatttatcaggtagagaaatttctcttctcttttctggacatagcttccaacagcaaaaattagaagtgtaggtgggttgccactccactcactaaatttataaaagatactcaaagatactcacacttttcacaagtctacccccatctgcccacatccagcatctatcttcgctgtgacagaaataattactatccgctgtacagccttgactggcggagctggccagaacattgccttacgggggtgtatcaccttgaagtctgtttacctgctggtccatgtcaatgatgttcagctgcactctgcgcttccacatctgtttaacttccactcacactcatactaaattctactccagagcaacgtggctgggcctcttctgtctaaggatgtggctgctccacgtatttccgatgacagaatagcaaatcattaaaacgccagagaaccaaagggcttcgacttcaggagacctccttgtgggcaatcgcacagataccatgactttccaatcttttcggaggtgttgttcaaattccgctttcgttcaggctatgcgcctctaggaggtggcctctctacgtggctaccctgccatggcccttccagctggccattggcagcgccaggacacagcataaagaaaactgtggtttgggtcttataagatcactgacagccaagcatacattccaaatactgtatgactcaaaggctatctcgaacacttattacaaatgtgtaatactccatttttccttctagattaaagactatccctttcatggcgttatttcaccccaaacctctctaaggtagatcttgctcctgtccgggttcaggaaactcttgaccctcatggaagtcctgcatggccttccaagtgagggtcagttgtcactccaggatgcttccaccatactttgtatttccgtctcacagtacctttctcagtgcacggtaattgactagatatgttctatccactctcctataataactataatgtagtgccatgtgggtaggggccatttttatcttgtctaccttagtatcttcagaacttagcactctgcttggtacatggcagactctcaaaaatatcagttgacagactgattgaaaatagaatccgtggttctgaataatggctatttactcaccccagtccagcatgcataycactgtctgttaccgcatgggccctcaccatggccctcaacagcccatggccacagctattgcctgggactgaccatccctactaggaatgtgtcacgcccctaaatgagactgtgagttttctctgcttaaaracaatcagaaaccaaaagctattatagctttctccttccagagatccaaggggcctcaaaaaatcttaaaatagggaaagctttgaaaggcagtataggcaaagcctaaagcatttaggggtgggaacagttatccctttgtacataaacatctttgaaggacagggcagcactgtgagtctccattttcatggagtgctaggctagcatattttaaagaagaagatatcttttatgacacagatacttgcaccataaattgtaagtagattaggatatgtctatgccacaacacacaatcgtttaagatgatgtaatcgagggacaaaaataatttgggggctaaaatgatcaactccacacaagaataatctactaatggtataacaagtgattcatggaaaagatgatcctggcaaaacaataacttttgttcaaggccatcaagaggttttccctaaaaatctactatgcgtttagccctgtgctaagatttgtggaaaatatggaagaaatcattaccctgggccagagctcatttcctccccamtctctaaacccacccgagagacattactgtcacatttccaaaatgcaaatgaaatgctgtccctcatgtctacagcttttttattttttgagatggagtttggttcttgtcgcccaggctggagtgcaatggtgcggtcttggctcactgcaacctccagctcccagattcaagcaattctcctgcctcagcctcctgagtagctgagattacaggcgcccgccaccacgcccggctaatttttttgtatttttagtagagatggggtttcaccatgttggccaggctagtctcgaactcctgacctcaggtgatgcacccacctcagcgtcccaaagtgctgggattacaggcacatgccaccacgcccrgctaatttttttgtatttttagtagagatagggtttcaccatgttggctaggctggtctcgaactcctgacctcaggtgatgcacccgcctcagcctcccaaagtgctgagattacaagcatgagccactatgcctggccatgtctacagcctttaacgactctccatcatcgtgactatagtctgaacaggatacacgagtccccactcaatcccacgctggctcatctgtcctgtctcaatgagtgaaactccccatctcataccctgggactgagccatgctctactacagttccctgggtttcaaagattcctccacacccatgcctttgaaaatgctgcccttctatgcttagaagcacttcccaagaacatgcttcctgtttattgtacataatccatctcaaccatcatctcggaggtctttcctacaaacactccttcatccttggtcctgatgtgatactctttccatcccttgcttcctgtgctccacttacaaacactgcctgagcaactgctctctacaagccccatgtgaggtgctagatgtacaacatctcataagtacatacaaaagccgtgaactgtaggcattacttgcagatgacaaactaggctcagaaaagttcagtagcttggtcaagttcacacagccagtgagctccatgcttttggctctgaggccctggttggcttctcctaaacacaccacctaacaatgctaccatatgtcaaactcaacactaaggcagactcgcctaagacacccacccagagcccagtggttcctacaatcggaaaatcacataaaagaaagttttgacatgagaccggctgtcaaatagacacctctgcaggccaggggtgtgtgtgtctaaaaccaactgggtggccacattgttctgcagtctgtttgccttccagtgctttctttcctgcctgtcatgcagataattgtgtagtgtgtcccaagcaacaggacgcatcagtttccctaatttatggagtcagcctaaactccttttgtttatgaccacaacacactaactctgtatgttagatgtttccaacaagcatcaaagcctcaattgttactgtcttttgttttgttttccagttctgctaatgcaagggacagcctgtcctggtatttattactagagtaatgtcaggtttggggttagctcataaaatacctctctagtttggctttctttgcaagagatcaaaacattcttttttctttaatggcaccatcaaaaagaatcaacatataaacatgtttcaataggcattctttttcctcttgtggtttctcagtatttggaactctgtattattatcttttgcttacaaatgataaaatatttcactattttcttgcaagccttttcggagactctttatcattttggttgacaattagtgttttgtgtcattttttggtaataatattttggggaaaaaaactaccctagtaatatttggtttatcaggtgacttgatctggggggacgctgaggaaaatgaggtatacttttatctcgtttcttccatcccattcttccacctttcttccttttctctcttagcaaaagcctttactacatattcctatagcttcttagtctttttacttcgttggcaaaagaaaaatagcatgagattaaaatacaattgctgccttcttcctttatagcacagacttcccactcataaactcctgtcaatgctggtaagaaaaatcagactactattttatcactgcgggagaactaacacagcatactttacctttctgcaaataattccgtcagattcagcatttccaaaacgttttctactcattataaaagccctacaaacgccaaatggacaataaacaggctccaccccaaaggcaggctcactgttaatgggggaacatgagaagcatcccattaaaaataggaacaacatgaggatgtctaccatcatctctgttatttaacactgatctgttaaacttagccaatttaactgcataagagaaataaataagggatataaaaattataacaggcagaaaaattattatttataaatgctatgatctgagcaagtcaattgaacaacttattaattagagaattctgtagggtaactgaaacaaaagaatatacaaaaatcaataacctttctaaaggacaaccagtaaaaaggtatcccatatttaaataacaayaaaaatataaaatgcctagggataaactgaaggaggactatatgcaagatctacataaagagggctgggtgcagtggctcaggcctattattccagcactttgggagggcgaggtgggcagatcacttgaggtcaggagttcgagaccagcctaaccaaacatggtaaaacgccgtctctactaaaaatacaaaaaaattagccaggtgtggtggcagacacctgtagtcccagttactggggaggctaaggcacaagaatcgcttgaacctgggagccagaggttkcagtgagccaagattgtgccmctgcactttagcctgggaaacagagtgaaaccccatttcaaaaaaaaaaaaaaaaaaaacaaatctacataaagaagaatgttaaatactactgagggacagaggaggagataggaacaactgcaaaggtctatcttcttcttgaatagaaagtcaatatcaagagaataattctttctatatttatctataaacttatatgatgtcaaaaatacaaattagaaagctaattctgaagttcctatggaaaaataaacaggaaagaatggccataacaatgatataaaaagaaataagaaaagaataccataccgatattaaaaatattataaagccttagaaagtaaaacagtgtgcatgggcacaggaatacttagcaaggtcaacagaaaagaggtcgatccaaatgaatactggacttcagtgaatgatatgggtgtcactgcactttagtgggaggaaggacttccaataattggacggccacctaaaaaaatatagatccctaattcacatcctgcactaaaataaatcccaaggtgaccaaagatttgaacgtaaaaaatgaaagcataaaaatatgagaaagaaccttgaaaacattaygctaagtggaaaagtcagttgtgtaaggccacacattatatggttccatttatatgagatgtctaggacaggcaaatccatasagataaaacatagattaagtggataccaggggccagaaggtagaggaaatgggggagtgggtgcttaatgggtaaaggttttctttttggagtaatgaaaatgtaaaattaggttttgatgatgattgtataattctatgaatagattaaaaacccatttattaaaagactgcattgtggctgggcacagtggctcacacctgtaatcctagcactttagaaggctaaggcaggaggctgcttgagcccaggagttccaggttgcagtaagctgtgactgcaccactgcactccagcctgggtgacagagcgagatcctgtgtcaaaaaaaaaaaaaaaaaagaaaaaaaaaaggtaagttttacgatatatgaatcatatctcaataaaacctttttaatttttattttcttttagagacagggtctcactctgtcacccaggctggagtgtagtagcacgaccataactcactgcagtctcaaactcctgggctcaaacaatccttccacctcagcctcccgagtacaaacaggcgtgcgccaccatgtttggctatttattattattattatgtaaaaacagggtctccctgtgttgtccagactggtctctaactcctggcctcaagtgatgctctcgccttggcctcccaaagtgctgggattacaggcatgaaccattgtgcctggccaaaactattatttttaaaatactaataaaaaatacgagacaatttaaaaattataattactgcgtagaagagacctaagtatgtaaaaaaattaaaagccaaaaaataaaaatctgataaataagatgactttaattttttaaaaccctgcatgaagaaaacataaagtcaaaagacaaacggaaaaatttaaactaaaatagcataagacaaaaggactaatctttttagctgttacatgctcctaaaaaaaaaagtcaattcacaggataaaccaaaaacgtagtagaaaaatgggcaacgaggatgaatatacatttcccagaaaagaaaataggaacggcttttaaacatatgaaagtatattcaaccaccactataataacagaaacccatattaaagctactagaatatagtagttttcacctctcagattggcaaagatcgkgaagtttaaaaacatcgtctgtggagaaaagcacactcaaacagtgctagcaggaacatacaataggacgaatgccaaattggagggcaatttggcaaggtttaccaaaattaaaactgcatattccttttgatccaacaattcccctttagtaatttctcctccagagatccttgctgacatacaacatgctatttatagagagttgttcactgaagcattgttcatagtagcaagtgactggaaacaaccaaaaaaaaaaaaaaagtccatcaatgtgggactgaatactttatggcaaaatcatacaatcgaatactatttagatactaaaaaagaataaggctgttctatgttccgataagaaaggttttccaggacacactgttaggtgaaaagaggtaaagggcagaatagtgtatggggtgtaaacattgttttaaaaaacctatatttttgcttatataatcataaaatatccttaaaaggactcacaagaaaatgataatggtacttgcttctaggtgagaattcaagtgacttagacacagaaataagagagatgcttatttttccttgtacatctatcgtaccttctgtatatctagcaattcaaaacaatattaatgcttcaaaaagaaagaaaagaaaccaagcataccaaggacactgaaatataaaaggagcaaagtacgtggtctaattttggatagctttgttatttttagtatgtttmataaaaaaaaaataaagttttttaaaccctcaaaattgactgcccaggaaactgrtttcaacttttcccaaacagaggcatttggctaagcttcctgtacacatgtctgcaccgcctccccaccccaccatcacaggagacgggaccacctccaagaccaagtggataattcaatcttcataatccattcaaatttgccctctgttgtagctggagatatgccaacgagaggggtttgtttagatttatcctcaggatgcaaagaaaaagaccaattttacttattctgcgtagctgaatttttaggtcttccaatggtcatcagttagggttagaacgaaaacagctgtaaaaatgtcctgacaggagctggagaccagcctggccaacatggtgaaaccccgtctctactaaaaatacaaaaatttgctgggcatggtggcaggtgcttgtaatcccagctactcgggaggctgaggcaggagaatcrtttaaacggggaggcggaggttgcagtgcaccgagatcacaccattgcactccagtttggatagcaagagcgaaactccacctcaaaaataaaaataaaaaaataaaaaataaaatgtcctgacaaagactatagtgagctcatcagacattcctttaatatgcttgttctaaagggggcaggggtggagagagaagactagaattggtctgcagggcccagctcctctcagacacccgtcttggaggaggttagaagagtgttcagggtaatgggccagcaacactaaaatgtcccagactccaatgaagcttctcattctaccactcctgcagagattcttgtagcaaatccctgggtttttcaccttgcctgtcaagcacaacttttttgattcccttgaagacacattcagcatcacaaaagaggtggtaaagcttactttcccccaattatgaccatttttagcatcacagtcaattttccactgtccacctgatggaccggagggcaaagctggctgaaattcacaggtaatcccaactttattttagtcaaacatatcaaccttgcctcttcaaaatgaaaaaacaacctcttgttcctttcttctttgttcataggagaacaaaatgggagtgatgtaattagtggagacaatgggagtgagtaattagtgtgctttgtatacaatgtagagaaactattgaaaaataaaataaaaagaattttatgaaatattctataaaagtcaggcttcctacccagatgaccttcggaaaaatttctctgaatccctgatgccttgggtatccagtatgcagtatatctgatacaagagattggaggatccatgagttcattctgggctgtatagtgatgccataacactcattgctattttccaagcttgagaatcatttaatatttccctaaaactatctgattaactgcaaaatggtgcactgagcaatgataatatttttgcaattacaggagttaattattttggttcagactatacaacaaccctctcccacccacctctccacagatacattttgctaagttttgcttttcttcattggtaaataaaaatgggacattcaccaacaagttcccatagagccatacttttcactcctttcatttagcaaacattgacacaatatttactgtgtttaaggacaggggttaaattctcaatatactgtctcatgagtacatagtttaaaagaaatgtgtttcaacaaataatttgaaaaccaagtaaaagtaagaaaggtcccattaaaaatgtggaccaaaaaaaagataacttcctggggtcatttgagattatgtcataaggagaacacagaatttgatgtggtcctggaaaagaatatatagaaatgcagagaggggaggcaggaggatgatcctaggtgaaagaaaccagagatgcaacagaagcagaaaaccaagggagcttgaggtgtgagaggaacatgtatataattatggggaagcctgggctgcaatgagtaaggttaggaaggtaggctgtaaccaagtcacaacactccctcaggacctggaagatgtaaacaaggaagaaaagtggttatacacacttaggcagaatctacttttaagaataagtacgaaaagggacaaaagaaggaagacataaagaagaaatgatcagagcagtagagggtaagagaaaataaaggcagataaagagtgttttcagaaacaaataggctgatgcagtggctcacacctgtaatcccagcactttgggaggccgaggcaggcggattgcttgagctcagagttggagaccagcctgggcaacacagcaaaaccctgcctctacaaaaaatacaaaaattagccrggtgtggtggcctgcacctgtagtcccagctatttgggaggctgagatgggaagatcacttgagcccgggaggcagaggttgcagtgagccaagatcaccccactgtactccagcctgggcaacagagctagatcttgtctcaaaaaaaaaaaaaagaagaagaagaaagaagaaagaaggggaatggggaaggggaaggagaagaaaagaaaagaaagaaaaggaaaggaaacgaaaggagaggagaggagaggagaggagaggagaggagaggaaaggaaaggaaaggaaaggaaaaagaaaagaaaagaaacaaaagaaaaagaaaagaaaagaaatgaaatggctggcagcagccaccgtaggaaatacagcccagaggtctaggagtaaccactgaataaaagcttactagtttgagtccatcttaggccagtgaagacattgggccgagaagtttccagtgcttggatgacagagaagawctggtgactaagacttcagtgggtggtaataatctggatgaatagaacacagactatgttttcaaaacatgttgaggttaaagaaagaatagagaaatggaaattgcctgaggagaacaaggtcaaaataagggctcctttagtttttaaaagacaggccacaccactaggcacattcatagactgaagagaaggttttggttaagatgaagataatgaaagatcaagcaggagagggagataacctaggtgacaaagcctcagagaagtcagggtagagagggatccagaaaacgaggggtcttggagccttgcggagtgggaggtcttcttgctcctctgggaygcgtgagcacagcatgcaacacttgtctgcaactgtgagacaggagcaacggacagaattaaagggaaaaagagagtagaaggattcatgcctggattcttcaagattttaaaaaagcaagatgaataaatggtcctctaccaaagtgagggtgagggtaagttttgaagagactggaaaagtttggaatagatcccataagaaatgtgactatgagcccactagaraagcaatgatgactctcctcagattaacagtaagaatttacatcaggacccatcagttgggtttgggggcctctaagcagctgtgcaggtgatggggatcatgcaggattggtgcctggaaaggaatgcatggcactaagctattgggcatgcacagttaaactttcaagccatgaggtcyaggctggttagggggcaggaatacggagcctgaagaaagtggctatagtgaccaagagtgggggatgagtcagggctcacaataaggagacaactgagttctgaggaagagagggaaagcaagggggtcaggaggctatgcccagagagaactacagagtctgagattttaagatttagaaaggtccaagttggggggtgtgagggttcaagttgatacacaggtccggggtgtggcagtatctctgggaagctgaaatgaaggaaaggtgaagtcttaaggtgaggagatgaagcaactgcagggcagagagaagggtcaggttaaacttaacaccggtccatgacgccgctgcactcagacacagaggaagtatttcatcatctttttgtcaacggggaacacaaatgcccgctccaggtccaagggcttaggacggagcatctgatttatattccttactttttaggatacaattgggagaagctcacgaatagaaagagaattctctaagatttcaacaggtgtatgatctgggatcatatyatgagggagtcaacagacagcatggaccttgctgagtaaacaggatgtgggtccaaatcccagctcttctaccttttcagctgaatgacctccaggcttagcagcctctctaaacctcagcccccgtctataaagtgagaaacattgtaacacatacatgatgcttagcagagcgcctgggcattcatacttagcaaaagttggttgatattcttacccttctacaactatgttctcaagaaaaatcatttttgggagagtgagataggtaagaagagagaggaggccatcgtgaagcgaacaaatgtgtaaaatgaaaaaaaaatcacttacaatcttaatttgtaactacctaaaagtaggctgcacagagaaatgaaactatgtctacacaaaaacttggaaaggaatgttcatagcagcactgttcataatagtgaaagagtggagacaacccaaatgtccatcaactgataaatgaataaacaaaataaggtatagccatacaatgttacattattccatcataacaagaaatgaatgactgatrtatgctgaaatgtggatgatccttgaaagcattatgctaagtgaaagaagtcagtcacagaagtccgcatattgcatgattctatttatatggaatgtctagaacaagcaaatctatatatagagaaacagcttcgtggttgccaggagctgagggtagaggattgggggaaaatgggaagtgattgctgatgggtatgggatttcctttaggggtgatgaaaatgttctaaaatttattgtggtgatagctgcacagctctgtaaatacactaaaaagcaattcattgcacttttttttttaatttaaataagctatgcagtcctcaatgcctcctgctccccatctcctgaataaacaagactttcttccctgggtgagggtcttgataggtagaatactgtacacggaatacagaattcaagcagttccttgacttatgaatatcagaagatgtccatcctctttctcaggagacatttccaggtggatgccagaggaggttatttctcttcttcccatctgcttctttaaatcttagctcctgcattctgtttccccatatgagcatagtggttaaaaatcaatctctgctttatcttcacaggcgaaagctttaaagtggacaggtctttcatacctagtttgaagtttatgaaaaagaataagggggctactctggagtactgtgagttttttctgcttctccacaccataaggacagggtccctgtaagcaattgtcctccaaaccaatccacctaataggccacatcattttgtttagggaagaaactgcaaaaagagattactgaaaaatcattccccataatctatttatttgatgtttgatttatctgataaacatgccaaaatattgcctaaaaagtaatctctaacatcatattattacttccaggaaatcaaccttctccataaaaatcaacagtgtttttaaaggaacgttgaggttaaaaaaatcagaatgacaatttattcatttgcaaaaataacaataatcatagtaataataataatttccacatgaaccagaaggtctctgggtaatgctggcttttaaccacaaacacacacatgcacaccaacagaaactgcctttgctatttgaacattccaggaatcaaatgaaaacattgctcaaaaaatttccaggtaaaccatgttaatatctagggttaataaagtctctttaaatgttaataaagtctctccataaaatgttcagccctgaagacacagaacaaatgataaaacatcatgttttataacaggttactatggtcaatggagtatcagctataaaatataaacttctactgaggaaagcacatccggcaagtgtaaaatagcccactgggtccaatttccatgaagaggtgccagctccatttggtatgtacaatctacaaatgaatccaagcactatcagaactgttaactgcatgactctggatggtagggggagggaagggtctcaaaaaagagagaaaaaggatttttcaggatactggaaattgagagcagattataaaagatttacgttgaataacaagaataaagctttcatgtatctctatgtgaaaaaaatagcctagaaatctgtaaactccaacttgtcataaaacataaatccgtgacacttaatgacttataatctacaattaacatttcatgtttttgcatccagatataagaaatacaatgccctattctgtttttgcttgggtgaggctaaaaaactcagtaccaccatgttttttgtagggtcaaagagacggctaagagatccccttaattaataatttttgttggcattttacaactctggattcccccaaactcctgcagcattggtgtaacttctagctactctcataacattgctgtaatctcaaactcctgggctcaagcgatcctcccgcctcagcctccagagtagctggactataagcacatctcaccatgcctggccaattaaaaaacaaacaaacaaacaaacaaacaggctgggcgcggtggctcacgactgtaatcccagcactttgggaggccacggcgggcggatcacgaggtcaggagatcragaccatcctggckaacactgtgaaaccccrtctctactaaaaatacaaaaaaaaattagccgggcatggkggtgggttcctgtaatctcagctactcgggaggctgaggcaggagaatcgcttgaatctgggaggcaaaggttgcagtgagccgagatcacaccactgcactccagcctgggcaacagagtgagactccgtctcaaaaacaacaacaacaacaacaacaacaaaaacattttgtagaggtgggtcctcactgtgttgcctaggctagtctcaaactcctggcatcgtaagttgtctttcatatgctttggcattcaatgctcagtaacaacctgagcatatttaattataatgcctcacctttaaatagtactctacagttcataaagtgctttctttcacactgatgtagccttccttgtattaaatcacagctttgcagttcaatttttgcaaaaccctttcaaaggtacttgtcaattaatgaagattaaacataaaggtgatctggaatctatgaggacaatctggggggatatgactgccaactgaagatggcagaaaaaacatgccattgaaattattctcacagttttgacagtagagaaaaaccatcaaaagataccacaaaatgcataaaattaaagggaaatgtttcttgcatgggytgcagtactgttttaaacagaagggaaagaccattaaacatgactggtattcactaaattttaactacactggcatcaaagtctgagcctgtgagtgcaagtcagaataacttgcgcttattctgaaataaatgtttctttccactgcaagggtgcatgtgtgaggggggaacaaagtattctttttaatayggaagcacatcaccctgacaatctaactctgacaagcttgcatagtcctaggcattctatttctacctcctaacagaacagcatcagcaacatttgtgatcatattctgtcagctgctctgctaacaatgagaaatttttacttgtatatggatagtaagttccctgagaaggcatatctccaggaccagtgttccgcctttttactttacaatctaatgtcagcaagagtatttttgtgcacacattacccatgcacacagcttagaaataaacaaggtgtgtaaactgcaaattggttccacagagcaaataactgattcaccagatatctgtaaaagcaaatataaaatccatgaattatgtctctgtattgaaaaaccataaaatgctcaggacctttatgttaactaaagtattttscttccatgtgttagattttccccttatatgtgtagaacacacacacaaaagagaattataaacgtcagagctcttttaacctttaaaaaccaacacagtaattatattgcaaagatatctgacaacccagagtaatactagaaaaggattatttctgcgcccccttcttttaaatagttctcaatttttctacaatttataggcggactgtgcaaaagattttcatagccatgaatcctattaaagatacattgggagataaaataaaatcactattccaattcgcaagaatatttgaaacgctgccaaagggaatgtttctccaaacataaagagagtattaaattttaagagagaggctatcatcaaaacgaaggcagagagaagtacacataagtcaacctgacaagcccatattgataaagcagagataaaagttatctccaggttacatgccyggtacaggcagttctcaatgtatgaatgagttgtatacagaaagttcatttgtaagtcatttatttgaaactccaaacacattttctcagagaaacagtgttataaatagtgcttagttttgcaggaaggcaaaaagagctatagagcttataatatagayaaactctagtaccatgagcaggggacaggaggtgaagaaatcatgaggaggtgggtgacttacaaatgaactttctttttcggtacctggaaacaaccaaagttttttttttctggcatcygtctgcctctcctatacttctcccactgtctaaatgcttcatcccagcccatataagagagcaccaaaaaaatttaatatagttaaccctttttcccaaactccccttcccaagtccagttatctggcaatcaaaggctaataaagagttcagttcagtaaagacttgtttctaggttttgacagcagatctaatcttgagagagaggaatggggacatgaccaagctctgggtatacacacaaagaatgaaccatctgggaggactggmtaatttcaggaatttcccygtaatttagtaatggtaaacaagaacaggacccagctcctaagaagtgcagatgaatgaagtaaagtagaagcaggttcctgaccaacaggtatagatcaaaggcagggcttctatcccacacctggtttctagcggcagtatctagaaggttccttgccttttcatggggagccacacatgactgcctgctcttcttcccatgaagataacataagggactgtcagttcagacccgggtggtttaaaagatgaagagtcctggcctggcgtggtggtggctcacgcctgtaatcccagcactttgggaggccaaggtgggcggatcacctgaggtcaggagttcgagaccagcctgaccaacatggtgaaacctcgtctctgctaaaaataaaaaataaaaaatttagctgggcatggtggtgtgagccttgtaatcctagctactggggaggctaagacaggagaatcgcttgaacccaggaggtggaggctgtagtgagccaagctcacaccactrcactccagcctgggcgacagagtgagactccgtctcagaaaaaaaaaaaaaaaaaacagttccgattgactcagtggtctcctgctgttcctgagacagagatataatgccctgcaaattacagggtactcatggccaaatctcgggtggggctggratgggagtaaagatgacgtcaggaaggtatccagttgtggcagaaactggttagttgttgaaaaaacagtttccctgtactccttgacatacaggctgacaattctccactttacctgcagttgactatgtccacatgactaaattctggtcaagggaacatggaaggaagtggtatatgccaatttcaccaacaaacctcccaggagacygctcactctctcgcttccccacttctctcttctgccaggtgcagaagatccttagggtctcccaacactgagggaatgtctgagccttgcgatacaaggaccctgggtcagggaatcaccaccatacagacgccctctccaactgcagaacaccccaagttatccgtaacaccatcaaaaaggaacttctactgtgttccaccctgaagagttggggttgcttgttattgcaacatccttgcccattgtaccatcatctctttgttgcatctcaggaaatgtcctttacattcacctgccctggacaatccactaggtttgtttgtcctcaaacgaaatggyctcacaccgctgagattttataatacttcargtttttataggttttctccttccttcactgtggttagtaagtttaacccaagaaagccctcttattccttctaatctatttgggaaactgaagaagtgaatgtgttgaatcactaatcttactttgagtgtccttgtgagtcaacagggctctgggttcaccagggcttcatctataagtataattcagaatttttttrttggtcatttttctccttcccaagaaggtttttcctatcatttccaggtttcaagtaggacccacrtagattagggtcacagaaatatgtattctgcctaagataactaggrtcatatcacttttataactaaatccatggaagtggcaccaagtgaactttgttgaaaacagcttgctcacttcattcattcactattcatttattcagtttacctttaatggaagaggggagaagagactgaagaaagacagatgaaagtgaagaagagaaataagttgtaaccattccccacrcctaactctctatatattccccttattttattcataagttgttagagggtacaataaaaactaagttaagatgtaatttgaaatggagtctgtctaatccaaaaccctagctttctacccttgctccttgcacagcgattttctggagctgtccaccctcatcactttgttgcatctctagaaagatccagggattaaataattatgtgcttcctgtgtggtggcctaagaattaagagaagtracctgtttgatgcctgtgtgcaccctctctttgacaaagcatggcctgatttcccaatccttatggagctctgttgagggttacacagcaaggattctgcctgcctttaccttgcaatwgmtatgagaataaattcaaaatggttcccgagttcagcatgtgactcccacttctgctgctaaaaaaacaagacagctattgtattgaatgcactctactcatcaggcactctgagaatgaaggtgacctggctggtatatatgggtctgtggaaagacaaagtatttttacatagaaccattgactaccattacaattttgaaatatgttccctataaaaaaaatactgaagtcaatacattagtttaaaaggacataaaaagagtctttattctgccaatgtgaacatatgtgcttccacagcaagcccataaagggaatctagaggctacttcatggagtattctgccatttccaatgtccgctctacaaaagatgtcattcttttatacattattttmttttattttatttttctagagacagggtctcactttgccacccagactggtgtgcagtggtgcaatcatagctcactgtaaccttgaactcctgggctcaagcaatcctcccacctcagcctcctgagcagctaggactacagactcacaacattacactcagctaattaaaaaaaaaaaacttaaagagacaaagacttgttctgtcacccaggctggagtgtagtggtgcgatcacagctcactgcagcctcaaactcctagactcaagtgatcctcctacataagcctcccaagtagctaggactacaggctcatgccaccatgctcagctaagttttaaattttttttgtagagatagggtctcactacgctgtccaggctggtctcaaactcgtggcttcaagtgatccttccacctcagccccccaaagtgctgggattgcaggggtgagccatcacgttcagcctctttctaaattctacaaaaaaacatgcattcatattatatcgtgcaatgctatgtaagtcatgttttagatatgccatggccggttcctattccatggggagttctcagcatcataaaggtatttgaagtttaagtctacatgttgtaaaggtgatgctcaatgctcaattctcagactagaaccagaacttccacaatttcatatttttaagaatatcaagcaacttccacttacaattaactataaaaagggttaattttctcctcagttgcctattgtcaataaaatgtttacttggcctaatgaccgactgataccaaaaaaggtataaggactcaactgttaagaaacaatgatgtataatgttgactgagaaagggacggagatcttcgaagaccttcaaaacataaatctgattactgccacccataatcaaatgtgtatgtctaagtcttccacaggtgaatacacctacggttctgcccctgaaccgcaaggccatacctccccaagactgactctntgagggctaacaggctataattgctgacagggaggttttcagcttgtcatagagataaaaaaatatggttattcttgagtnataagtggaaattcgtgaaataagtgatgaaaacaagggtataaaggctacagaaaccctttcctacccaacacagagtgagacacaagccyaagagaaaacaaaaagaacacagcaaagccagccagagcatgacttcagggtgtgctcactaggtgatattatctacgttgaaaagacatggtacctgaagatcaagagtttgaggtttaagcatgcatacactttttctgttttttcttctataaagttcagtatacttttatggcattttaactttcagttttggtaccttgggaacacagcatcctctatcttggcagagttaagtggggcatgaatggccttttcctaagtagaatggtgatttaacagagtttttatgagtatggtccaacagtagacctgacatttttatcaagaggacagaagtgtcagtttgaaagatcttctaacactgttcatggctactgctaggaacagagtagggcaatctttcccttctttttatgtggagggcagggactccttaagtaggctgacctggccattcattcagtctagcctaagccacaggctttctggcccacattccagcgtaagcagatgctgtgttgacattctttttaatcctccttcctcacctagaatacattattcctcgatgtaggcatgcaaatatctgctgaatggattatttcagttatggacaccaatagtacctgtccagtaartatgacccagaaatcatctttgactccttcctctccattctccaaatccaacaattactaagttatattattttatcccttcaaatacctttgaatatgttgcccccttttcctttcctgccatcctcccaacaccctcaaacgaataggctcccattacctatctttaattcctgactcgcctgtcccctgtttctcccaactctggccaccctacatacattgtcaccggtttcagatatatacacacaaactcactgagccccttccataaacaagaactgggaactctgtgtcacctcctgcatwaacttcacattcctccgccaggtcttagtgatcctttagctctgttatccccacagctgtcawattctctttcataccaatctccagcaatgcacatataactccgctggcccctccaacatatcccatgcaggccatctgtgtcccttcctcatgcttttgtccctgctgccactgtgcctacaatgacccctcagtttcctccacccatcatcactacacatcctgttaaggtccctgtcaggctttgcttctcataggaagctcttcctgaagactccaatccccagccatttctcattcctcttctgaacctgacactggcaccccattacaaattctcagttgtctgttgtcatggattgctctataattgcttcctgtggattggtattgtgccctgaactagattttttgttttgttttgttttttgatggagtctcactctgtcacccaggctggagtgcagtggccggatctcagctcactgcaacctctgccttccaggttcaagcaattctcttgcctcagcctcccaagtagctgggattacaggtacacaccaccatgcctagctaatttttgtattatttatttatttatttatttgagacggagtctcgctctgtcgcccaggctggcatgcagtggcgcgatctcggctcactgcaamctctgcctccrgggttcaagtgcttctcctgcctcagcctcttgagtagctgggattacaggcatgcgccaccatgcccagctaattttatttgtatttttagtagaaacggggtttctccatgttgctcagggtggtctcgaactcccgacctcaggtgatccgcccgcctcggcctcccaaagtgttgggattacaggcatgagccaccgcacccggcctaatttttgtattttcagtagagatggggtttcaccatgttggccagtctggtctcgatctcctgacctcaagtgatctgcccacctcggcctacctaagtgtcaactaggtttttttgaagataattttagatttacagaaagcrgcaaaaatagtacagagctcccttgtaccttccacccagtttccccctatattaacagcttacaaagccatagaaccacgatcaaaactagaaagttaacctgggtcacgactactcaacaaaccgtagggtgtattaggatttcaccagtttttgcaccaaacaggctttttttttttttttcctgtttcaggatcatacttagaattttatgtggtcatatttcttagtttctgctaatctgtgacagttcctgaatccttccttatccttaaagaccttgacaattttaaggggaggggtcagttattttttcgaatgtccttccatttgagtttgctatttttttcttgattagagtgagattatgccttttcagggaggatatcagagatgacacgcccttctcagtgggacacacgatgtcaatatgtatcactggtgacattaaccttgatcactcagttaaggtgatgtctgccaggattcttcaccgtaaacttttatttttctccttgtaattactaaatgtttggggtagggatattttaaaattctaygaatttcctgtttctgcatatacttttgcccgctcattctaatccatctaatccacatctgcccatctaatgcatccatckgtgggactttctcgtggcaattcttactatgagttctaatgatgttttcatactscttccttcctcgtttgtttattaactgaaattctgctgcagggaagagtcattccttttcccttatttatttattcattggactcgttggatattttattctttgggttataatccagcatttatttccttacccagttattctaagctgtagctagatattctaccatttcagagcagacacagccacattgtgtcctgtgttacaggttgtccctcatgtcttaagacaagaacaggcacacagcgggtattcagctcatctgttcattcatttgacaggttatcttgagggccttgtgttaggtgttagagttacaagaaataaaacaattcctctgtccgagtggtttacagcctagttagaagagacctacaggcacatttgcaagtccttattaaaagtattaggcaagtacagcaatggcccagaagaaaacatagtcaactctacctggagaaaaaggggtgtggcaattggtaggcaggaaagacttccttaagaccaagcagcatcctgcttcccttctattgtactgcttgctctataaaaatcaatgggcatataaaatttctagagacacacgccatcacacagttagcaggtactccaagcccctgaatcttctaaactaattccccacatcaaacctcaagggcacactatttaggaagatttaatgcaataaactcagactctttatatagtgactatgtgcttttctaggaaaattggaaacagctaaggtaaaaaaaaaaaaatctgaaaagtcatttgtcttaatccagtcttcaaatccaatttcatcgtttttattccttcacagggaataatgaagagcaaataaggaatatcatcagagaaagatggactccctaagtctctttacttaattcaattttcttgtactgctcttacagtattttccaaacaaagctgttcttttctacatatgatagttcagcccagcaaatgtcctcaggaataataaacaaacagtgggggcatattttctgccacaaattacactctgcaacattcttcatccaaagcattttcaattccaagcaagcaaagacacaaggaaaatacactgccttattacaagaactgcacacaatagagaatctgtattcagacacttattgacacttaaacctgttaatatgtaactcctactattgttctaaaggatgaataagcaaattctcctgcacatataatgttacatcatgcactttaattacaatagtaaatactgccgaaaggaattttactttcactgtttcatatcaccttttctaattaatgtcaatgtgtcttttccatgtaagagagcatacagcagaggcacatatgtgttgtgtctttgtgtatctgcccaaatgtacacatattcatgaatgcacatacaaataagctcttatgcacacagagtaacccccatgttagcatgcatttataaatacagctggccccaccccgagcatgcatggagtatacacaaacagcataaaggccagttgacttccttttgcttttataggagattgacataaaaagctaaaaaaagacaagtagacacttcatggagcctgtgattaagagagaagctaatgagacagatgggctgatgcataaagggaacttcagcacaccagcccacactcagtaaagatttaccgtgcttcactgtctccgtttcagtcttcatcatgtggcatgctacttacattactcttgtccccagaccacagacacaccccgcttttctctgcccagacctccctaaattaggattatcaaatgacacaagatagcagtcttctgctttaatgttgttattcaaggtttactcacaggcaatatttactataaaatcttgtggtttggcygggcacggtggctcatgcctgcaatcccagccctttgggaggccgaggagggtggatcacctgaggccaggagttcgagaccagcctagccaacatagtgaaaccccatctctactaaaaatacaaaaattagccaggtgcagtggcgcacacctgtagtcccagctacttgggaagctgaggcaaaaggattgcttgaacctgggaggcagaggttgcagtgagccgagatcgtgccattgcactccagcttgggcaacagagcaagactctgtctcaaaaaaaaaaaaaaaaaaggaaaaaaaatcatgtggtttaccgcttaacagagagtggacaattctgttacagggcttaccagaatatttttggaaaaattctgtaaacatagaagaatttctgagccagaaaaatgagaagcagaaaaaataattcatatgaatttttaaatttttatacaatagattttgcctctgatatgactgcttctctaagctatttccacatgtgattactgtctctgagagctcactccatgccataagaaattgcagagttatagaaatagcatatgtagagggctctacaatttacaaaacattttcaatgcattatctcatttgatcatcacaatacccctgtgagacagatattataattatttctattttatagagatgcggaaaaaaccctcagattttgartgatttccctaaggtcacaaagctgataagttgcagaactgagattcaaaactagaatttctgatattgtatttcattttctcccactacattaattttattamatttttcttgaattcatttttggttctattttataatagtagactctataaattctgctcattacataaacattttatgtgcttctaaatgaaactgactctttaatctctaaattttttggtaacgttctattttctggttaaactaaaatgcccaggttcccttatcatctgctttctttattccctggaatcttccttttgagagatatgatgttccattatctgaggatctgaggatttctaactatgttgacaaatcttccttttgctttttaaaaactgttgctgcacatattgctgagtagctttcaaatttatccactacgacttccacgctcatatcctaatatttatcacaatggctaccccattccagaaaatctgaagagttctacatttgtactcaaccacatctacttctcgaatcttctttctctgtcactgttattcccaagatcctggaattaaacagaagagttttcctttctggtcagtcagttcatccttccagagccagcccaaagggtgctttaacatcactccttctcagctgagtactttctgatgttataacatgcttacctacaacactatcttatgcagggggcaaaaggaagaggtagctttaaaaagacagatccatttatgtgccagcacagcctgataactagagtagcaggaaaaagagaaaaaaaaaaaaatcacaagacgatagatcaatgggacattagataagcccccctttttggggtgtgtgtaggggattcttgactgtggtcactatattccagcagtgacacaagttagagcttctggggctgaagtccgcattgtctaaacaggacagtcagactttggggcaaaccatcctcccatcttattgcccaattccactttccctgctgttttaatgggattattttggaatctgctatttctgtctcactccttttccccaaactgtcatataagtactgcagcttgactacttcccagctgccaaatttcactccagagatggctgtatttcagtggcaagtgaagtgatgatccctctgtgtcatcgaaatactcatttaaggggttaagcatctggaagagggttgcctttgtgcatgaacagagtgtttttgttttggtttgttttattgtctatcctggagaaggaggtcattagctccacctgagcaagatggaagacacacaccaaaaaacactctatgcagccactaaaatgcacggggaaaacagaaacagtgaccgcttttcataggttcttttccacagggacttcaaagtcttaaagcatcaaggttgcaaaatgatggtaatttttagaggtggaagaaacctctgagagcaaaccactcatgttacagatggagaacttggaagcacagggtcactgagtaccttggtcaaagcccccccccccccgccgattcattcccaagtccaagggcgtttcacttgaattttgaatttggctttatctgcagacacactcagagtatcacatctccrtcagtcaagtcaagcacagacccagcttctaaagcacacggcatcagcactgaattcttgttttgtttggctatgtttatttgtttaggtactcaggaaaatctccaccaggaaaaaatacagggtgttgaayagagggggaacagaacacagtagatacagtagcaagaaatgtttattgagcattgactatgtgccaggccaggcaatgttctcaggtttatatgtatacaattctgacagtggctctgtggctcccattttagagagagagagagagagaagaatgattattttggaagagaaaacaagagggacagcatataattgccaactcaaaaaaaaactaccttcccaaattttactaaaacattcagcaaaaatctaaaaaattaccagtgatatacttctcacttattctgaagagatgatccttcttaatacttttggcatatagctgcttcttgctaataaaaaaaaagtacttccaagatgttctgtatattatttccaaatcttataacagttgtttcaacaatcagtgaatgaatgattcactatttgaacactgatgaaatgagaagcactaatgatattcagggagcacagatcttgagttagggagaaagggaactggatgttcattttctcttccaccgctgaatcctataatgtcaaaagctctcctatctcacattcctgaatttagaaaacatatttaaatgcttcatttcatttgataacctctaagagaaaaaaayagkgatktgaaaagtaccatagaatactgtcattttgataaagctgtatgaaagttggatttctacctcgagttttgcccgcactttgagtagtatggtttgccaacattgaaagcagcattagtgtagcaggggaaggtctgtgcagcagtctgctttagggtagcaataagaaagacaaaattgtaagctttgatatcaaccattttctaatgtgttttaagagtaaacacagatgatggaatagtctaccttatttcatgagagttattacaactatgtgaatgtttccatactgacaccagaaatcatattatttataaaactttcaaagaataaaatgcttcataaagaagcctggtaagttattttaaaactttaaagtatccaaaatagtttaaaagctacgcctacatataaaacacaatatactcttgaatctttgaccctacattttttcgcttttcctaaaaaaatcattaaatgtctcaaaataatgcctttacccaaactggctatgaattatggaggctrtctacagattgaaggaagggtgggagaaaagggaagggcatatttatgctgaaagataaattttggggaagtctgtgttttaaatacttaatatcagtaggattttcttaaccttagaaatgtacatttcaacctttttcatttcattttcaaccttatgatatagatgtagtcgaagggttgagagggactcacaaccctacagtttttctttttgtgtttctgtaggataaaggaaacatttcctaagagctgaggggcggggtgggttacatacggtgcctgaaggggaaaagaccccatgttcgagaatgcactgtgtgtgtgtgtgtgtgtgtgygtgtgtgcgcgygtgtgtgtgtgtgtgtgtgtgctgggtgggtgtgtggatggggagtaggggatgatatgggcaactcaactggacatgttaaagaaagaagaaaacatctgggtagagtacgtggtggatgtttgagggcccgaagagagcagctgaccagggagggatacaatagagaaaaaggttcgtcaaagacagtaaatccgaagctaaaaatgcagcctttaccaaatgcaggtcaaggcctaaggagataaaagaaatctctgagcagagcctgttatttaagagaccactaaaagcacccaggaatggagggaggaaggtaagaagaaccacaatcccacaaacaatgctgagtggaagggtaccaaatagtaaagaggtcaagatgtgacaaatggaggggctattatttagatctggaacctaaaatctgtttaaagtgaactaaataaagttaattatgcatgtgcacaaaaggtaggattaattatataattaatctcactctctgaggtgaattatagtgggtaaagtaagaaaaaggatatggttaataagagaacaaggtacacgtgttctggtgcacctcgattcttcctttgggtggttaagaaaaatcaccatactgtgataaagacacggtgacatccatctttctaacatgtttgtagagttataaaaagtaaaagactcatttcacaatttcttaaggatatggattgtcaataagatgcatcatttacattacctaaattgagagatgagtagcccgatgatctttactggccctagcaactgtgcattcgaggggtgttagacagtacgcttctctccttaccttcttcatttcctggcctggtccggctgtcaacaatcacaacctcattgtcagtccctgactattctctggttctttctgttctatgccttccagatcaacaggtctgtctcccctggtttctccagtttccaatttcagatgcacctcttgcctccttttagaatggtccagttcatctcccctgttccccyaaaccagttatgatggtgttgactgtatctccctgagaactgtaaactccattagggccagtcttttgtcaatcttgttttcctccattatcttcaatgcccagccctatactgggacatagctgcccctaaaaaggcctttgctaaattaataaatgagtgaggaatgactgaatgggattaaaattaaagaccttgtctcagtttctcacaattcaaaagttgtgctttaactttgtgctggcaaaatcctaagacaccccaaagtccccatgggactttgcgaactaagatttcaacaatgattctgcctggtcttgcagataggtcttgtacatgaatgcaaaaatggtgtgggcaaccatgtgcagtatatggaaacaaccaaaaactgctgaccacagatctgaggtcacagcacaattaatatggttaagtatttcccactctcctgtctccctagagaaatttattctggtaagcccttgacaaccaacacgtctgcatttctgcacaccagccagtgatccacagcaagagaatcctttcttcctctctgagtctttattgattttgtagtttgggaggaagctaagtgctattcaaataccaaatgttccatatggtagtgttattaccattcccactaccgttacktgaggccttctacctacactcatgaggtgcctcatcagaatctggcagaacattatgaactcttttcctgacctatatttgctaacacatttgttgtcctctctccctctatgaacttattaattttgttgaaataatatacatgtgtgtataaatccaagttttgttttcttattcatcctcatagtcacaggggaatgatttatgacacattaaggaggtattcttaagctaacatgtcttaattaggaattcagatattcctcttctgctgagaaatacagagctgttcaaattagaccagaaattagggccaaaacgaatgcagcgtctacatacacaagctcatagcagggtaaccagtgaaaggcagaggctgaagccgtacacgtcgttctgtgtttgtctccttcatgccaaatgattctttgaccacttttcctttcacttttcaacgttacgatggagccaaagggtcaagagattcacaaacctacagccttccccttcatgcatctgtaggataaagcatgcgtttcctaagagctgggtgtggcgggggggtctcttcatctaccttctctttcatttatttagtgaaatgaagcttatttagtaatgacgggaagagatgagccaactagggcagctcacatatggtgccagacggtgagggactctgtgcccaaggcacttgctgtaccacaggagctaggcagcccyggctgggaaggaagctctgctctcacccaacggctgctccaagggtgcccccagccaggtgatccagacagccatggtttcaaagctctgtgaaaaatgggtctctgacttgaaaacttgaatcaggaagtctctccaggactgggattactccactaatacaaattaaatccattcagaagtatgctaaaccctttttgtagatactagaggaggatgaaaagagggaggaaagagaggcaaagtaattttggaagattaggattatactatggttcatgccaataccctacatttgtttacttctatattgatcattttctcaaatgattaaatactcctgaaataggagttttaacgattttaaacatttcatatatattatttgcagcaacacccaagggagaagggtactattattatccgaattttacatgcaaagtaacttgcccaatgtcacacttcaagaaaacagcagagctggaatttgagcccaggcagcctgaagcttkcaatcttatctacagcttttccatcatatggcactaacatagttatatttaatcatgttcccgatattggacatatatatatatatatatayayayayacacacacacacacacacacacatatacacatatatatatatacacacacacatacatatataggcacatacatatttttaaactaatgagcagtataacttcagatacatatctaataaaatttttttattaaatacctttttgctctttttaagaaatgaaaaattatgctttccactgaaaaatgattgtatctagtgatttcatagttgtctaaaaatacttggccagaaaggaagaacttaaaattccctaggacccttctactccttctggatttaatattatttctgaaatgtcgaaatctggtaagtttcaaggatgctgctgtctaatggaggaaggttctacaaaacagtacaatttacttgacttacaaatgaccccccccacccccaaaacccaaaatacatggaaacaccattttgcataatcagtcagcaaaaaactctttttgttttcaaaattctcagcattggaaaactgtattaagtagacgctctcataaactgcctctggaaatacaaactggtatgactttactgaaagtaatttggcaacaagttaccaaaagccgtaaaacttgaaaactcttacatttaccagtatgctgctaagaaattagcctaaggaaataatttgtaatgggaactaatacagagctataagaatatttttggcatcatgaaagcaataaaatgtctgggtgtggtggatcacgcctgtaatcccaacactttgggaggctgaggtgggaagactgcttgaggtcacgagtttgagaccagcctgggcaacatggcaaaacctcatcactatataaaaaaaaaaaatacaaaagttagccaggcatggtgatgtgcacctgtagtcccagctattaatacttgggaggctgaggtgggaggatcacttgagccttggaggtggaagctgcaatgagccaaaatcatgccactgcactccagcctgggtgacagagtgagaccctatctcaagaaaataaaaaggcaaaaaaattagaaacggctaactgtccagttagaagggatataaattaaataaattttagaatgtttactcaatggtatactaatcattaataactatacggtagaaaaatatctgttgctatgaaagatgttcagaattatattgttaagaggaacaatactcttaataatctctactacttctacaatctctactaccatttgatgtttgtctctctaagtgaatttataaatctataaatttataaatgccttcagaattatcagcaatgccttgtcatctatcctaactagtgacctcaaaataagtagaagttatttcctttcccataaaaaagcaagggttccatttttataaaagagacagtaggaaaaaatggagtctacatgaatagacatgtgtatgttgtgtgtgtatgtttgtgtgaccagatatgtatacacccccaccactatcttggggactttacaactcaatgataattattttcctttaaagcttttggagatgtttacctgtaccatgtgctttcatcacaatggagaaccataagctatcagttccttgcagcagatcttttcacgaagattttgcttgagtagaaagggtggcagtggagaatctcagtgtaaaacgcctagacctgtaattataaaaacaatattctcactgagttaggctgcttctgtggtcttcattcacattcgctgaagtcacagaaacgggaaacatcatattgcataatctctcacacacacatgcacacacgcaagcatgcgcacacacacacacacacacacacaaggtttttaaatcagaatgtcaaaaactcagcaggcagagacacagcaggtccctatccccagggatgagtgggttctggccaggggttgcttcccaccccatctcctccccttgaggacaccactatcaaaataatcccgttcctgcccctccttccctgctcaatgattctaagatttctaagaaataacaagcagtcagttcttcatagaaaatgtcagaaacattgctgaatttgatgctctctttctctaagactccttctagccacaaaattatgcaaattcagtgcatgtatttaccattccggcctcactttcacttttgaaactacacatgcctctttgttaataactcagttaagacatgatgtcagygatggccaaggtcatcacgaacattgattaaacatttactatgttctgggccatgtgctaagggctttacacacattgccccactccactgcagtctgtgaggtggccaggaatcatgtttacctctgcattattgacaagaaaactgacagtaaatacagccaacggatgttaaagccagtacttaagccaacagttcacagaggtcatgcttaggattctagtactataccatctcttcaaggctgatctttctaccaacacttctgtagttagtattaaaacatatcggggctggggcrtggtggctcatgcctgtaatcccagcactttgggaggctgaggtgggcggatcatgaggtcaggagatcgagaccatcctggccaacatggtgtaaccccatctctactaaaaatacaaaaattagccacgcatggtggtgcgtgcccgtaatcccagctactcrggaagctgaggcaggagaatcacttgaaccggaaggcagagtttgcagtgagctgagatcatgccactgcactccagcctggtgacaaagcaagactctgtctcaaaaaaaaaaaaagtatcaaatcactatcacctcatttttcccagagggttatgtcacctagtcttaaaattactattatttgttttggatttgactgtactttgattttaattcccaagctcaagtgaaaccgacatgttcatatttcaactgagtgtaagttggtggttattttagtaaattaaaaatgctaagtaatcccaaatccagatgccaaaacactaagcagaaacctaaaatccacgtcctgcctaagcggctaaatttcattagaaacaagtcagatgataacatcaaaaggcatrtatgaattccaaagtaaagatatgaaaatgaagagaggaatttcgatatctaatacagccatgtcttaaaaaattcttaaacatgtttacctgttcacaaagtctacatactaatacagatcttagaatcactgcaacacaaaatggatatgagcatatcaagaaatcaacaaaattatgtatgggtcccacaataactctccttttgtatatgtgtaggcatttatttgcactatttttgttatgcctctgcctttgcatatgacactccctttgattaacatgctttgcctctccttgccatttagaaaattcctactcatttttcagctggacacagtggctcatgcctgtaaatccagcactttgggrggccaaggcgggaggatcacctgaggtcaggagttcgagaccagcctggccaacatggtgaaaccccatctatactaaaaaaaaaaactagccaggcatggtggtgggcgcctgtaatcccagtgacccgggaggctgaggcaggagaatcgcttgaacctgggaggcagaggttgcagtaagctgagatcgtgccattgcactacagcctgggcatcaacagcggaactctgtctaaaaaaaaaaaaaaagaaaattcctactcatttttcaaggccaaccttgagcttaaatagcttaaattccattgtgatgtcrtcctcatctatcccctaatgttttctggaaatctaagcagaatagattctgcctcacctacrtttcctagctcagtgatggcatcaacatcactctgacgtcttcctctcccaaattatgccccatattcaaccatgcagccatactcctcaactccctccgctcctctccggcaccaccctggctcatctggactctttccctggccccctaacacgtctcccygcgtccaccctgccaccctactaccttccttggctcctgcctaaggcattgcagtggctttccatttctaaacatggcccccaaaacctgcattctcttccaacttgcactacagcatggctggcttactttcaattccttaaaaggaccttgctttcccaggccttaaagcctttgcacatgacttcctccttgctaagacttctcctcaaatcacccaccccttctatcaaatgaccttgtattcttttctccttcagctctcagctcagtcctcttctcaagggagacttcctcagccaggtcaccacctcctaggacacacttgtatagaatgaccctccctggttatagtagtcattttgtaacttttacattttttggttgattcattgattaatgcttgttttcccccacgaatcaayaaactccagaaagggagaactgtgtccactctcacccctcctttcatctttgggattcaatggaaagctttgcacattatgggcactcaataaaatcttctgagtgaataaatgagccaaagaaggagggaaggaggaagggagggaggaaggtaggaagaaaggaaggtcatcccttaatcatactgatttaattagtgttgattggattcatctgtaaatcgttttccagcacacagagtatgacatctacattcctttggrtaacatgcaaggctccttgagctctgaccccagccagccgggtctctcctcctgctgcacttgaccctcagcacctccaagtccctccctgtagctccctgaccccatcttgtttccctcatctccacacccttctctcttctgttccccccacacatcatcttttcaaactcactcagtcttcaagtctcagggctggggacgcttctctgtgaaaaactccctgacaccttctgggaagtgggggcccttttctctcatttttctacaacccctgtacctatccctattaaagcaattatcatattttcytgtacttgttccttaaccaagtccatctctcccaccacaacctaagtcccttaaaggcaagaaagaggtatcccctcatcatagtaccccagagtttcgtacagcagcgtggcacataaattaacaacaacaaaaaaaagaaatgtgtgtatatacacgcacacatatatattatataatctacatttatatattatatatacatacttatatattatatatacatcacacacatacacacacgtttcatactgcaaagttccagagctgggcatctgaaatatacgattaatagagaatgttattattaaatgtggtaaggcataatgattacaaattcatctgtgaaacgggctaataacacctacctcacagggttgttacgagagttaactaagctacataagtaaaatgtttagcacagagctcagtatactggaagcactccataaatattaattgtacagccattatcactatcagtattgttagggcaactaagctgaatttacaacttatgggtaaaatgtaacagttttatttgccagtatctttcatattaaagcattaattagcattagcatctgtgtaagaacataaaatgcctagaaaggagctcagaaaattaaggataaagaagagtcttatccgttgcarctgaaggactaatgattgtttcggtaatctgtgatatatgtgtgaaggaagcaaagcatcaacaacaaagcatttctgtacaaaaattatctatgaagtctaaatgacagaaactacacatatcgccattcaagtgctgtaaacattgagctgacgtaattataaatacttactgtaagctatttcttttgctaaaaaaaaaattagagatgcatattcatccacttctgttaattactggacagagtaatgtgacttcataaataaatactaaggatttgactaatgaatatgccataaaatgtctgaatwaatagcaagcacatttcatatgtggtctattagatgctattctaatttagaattgcagaaatttaatgaaatagactgcaaacaggaaaatacaggcaagactattttgcaatgcactttggaaaaaaaataagaatgaattgtttacaaatgctaccagtacatagttgaacagaatgaactggtaatagttattttacgaagcaaactcataattctgccctatgttgcttttctcttgcatattggccaaatttaaataatgcatattagagttttatatattaagtcctactgaaatataaagtactatcattattgcattttgagatttctattctcaattcacatttatcactgataaaagataaaaccccaaagcaaatcatttttctgattgaggcttttcctcagagatactagagttgtaggggaagtataaaaatactaaattcataacattcttttttttttttctttgagacaagttctcactctgtttcccaggttggagtgcagtggtgtgatgacagctcacttcagcctcaacctctcgggctcaggtggtcctctcacctcagcctcctgggtagctgggactacaggcacacgccaccatgcctggctaattttttaatttttttttttttttgaaacatagtttcactcctgttgcccaggctggagtgcaatggcgcaatctccactcaccataacctccgccttccaggttcaagcaattatcctgcctcagcctcctgagtagctgggattacaggcatgcaccaccacgtccagctaattttgtatttttagtagagatggggtttctccatgttggccaggatggtctcgaccagcatgtggtctcccaaagtgctgkgattacaggcgtgagccactgcgcccaactatttttttaattttttagtagagacagggtcttgctatgtcgcccaggctggactcaaactactggtctccagcaatcttcccacctaggcctcccaaagwactgggactacaggtgtgagccacagtgcccagctgtaacctattcatttaccatgagactattaaactccttttaaattgaattataattctattccatggccacagctattgaccagtttaccctaagtatatggttctttgcaacataattaaaatgagaaggtagaatagacaaaaccaaaaaagtcttaatttgatcatttttatttaaatttactattaatttcattaccatgatgcttatgtttgcgtcataacatctgatggaatcttagtaatataaggcaaaattctttgttcattaygctggtccttcaatcagggatgtcctcattcattcaagcattgctcttcctttaagattcagctcgatgtcacttcctttgtgacatgctcccatacataytgtattttccctgccgtgtaatgatctgtctccctttctagactatgagctccttaggggccccagcgaggtctctgtatttttcataacaaactgcacaattctttgcacagaatatactctcagtaaacactggtttgatgtgtgggtgaatacacacactttgatactcttatgactatggtgaaaaggccactaattgtgatttcaacttaaaggttaaagccaaaaaaaatccattttttagtgaaatgaaactcttagcgttttcacttccagatgcatcagcattacataaaagatgttgaaactattttaaaaaatagtcatgctgcgcattttcctgtctgagaattagactgaaaataccaaattccccaggggcccctgggtgttctaaagacaaatgttcagttagctattgattccatgcactcatttaatggaaatccggagtaagactcaacctccccaccaccagcctgtcactcattattctgctcagctgtttcagaataagcgacgactcccgggagagctctgcccccctcccagtactggccagcacttcagtgatgatgaatccgagcagcagagaatttcagtactcaaagcagcagaacatcagtcccaacttacattttccacttccattgtcattcttattcctatatgggcttatttctcacatatccrcctttgatttttcaagatcgaacctttgarmaggtgagggcctggctgcctaacatattacatcatcacgcatatgccggactcctgcctcactcagaagaccacgtgttgctcagaaaagaaaggtgggcaccaaaagaacaggtttctcataatatcctacccaggcccacagttagacgtattagtcacygttgggacaatgaatatgggttttccaagaggtgatcaagcctttacttgatggattttcttttctccacgccccaagattttctargcttttggtaggaagcactatacagaaagcacccacgtctcctagctgattctgtgtctggagttggttccttctggtgggttcgtggtctcgctgacttcaagaatggagccgctaacctttgcggtgactgttacagctcttaaagatggcacagacccaaaagactgaacagcagcaagatttatcataaagagtgaaagaacaaagcttccacagctggaaaagaatctgagcaggttgcactggtggctggtgcgggtgggggtggggggttggggggggcagcttttattccattatttttcccgtccatgtcctgtttctgtcctatcagaacgcccttttctcaatcctccccatgattggttacttttagaaccctgctgattggtccattttacaaagtactgattggtgcattttacaaatctcttgctagctacagagcactgactggtgcatttttacagagcactgattggtgcattttacaaacctcttgctagctacagagcactgactgctgcattttataatacccttggaagacagaaaagttctccaagtccccactcgacccaggaagtccagctggcttcacctctcaattccactcagtagttactgtcagcctccccctaaaacctccaccactcaaggagcgacactgtcagaagcagaccttctaattactcctgtgtgatctcaagccccctccctggggactatggaaagagaatgttaggaaatagagatggaaaaaacaagccataattctgacatgctatcactttaaaaatatttctatcatgcaatgtttgtaacccacaaaagaatgcactaacatgtacgtaacctgtgaagcataagaataaaatgaacaggcatacaccgaccaccctatttgagaactagacatttaggggtattttgatccatctacctatttgctatttccctaagccatcctcctgccttctctccaggggtaaccactatcttaaattttctatctatcactctctaaaatacatagtttaattgtgcttgattttaaactttataatactatcatactgtatatagtcttttgtgactagtttttttcacacaatattgtttctaagatttagccatgttgttacaggtagctactatagttccttcatattcactgctgtataatattccattctgtgaagcaaaaaattatatatatgtatgtatgtacgtgtatatgtgtgtgtgcatatatatatatatatatatatataaaggttctcaatagactaatatatatatatattagtctggagagatagaagctaatacatatattagtccaattattatacatattagtctaattattatatattagactaatatatgtctatagagatagaagctaatatacatattagtcaaattatacatattagttcaattattatatattagactaatatatattagtctacagggatagaagctaatatatattagtctaattaatatatatattagtctaattgtcatatattagactaatatatatatatatgtctgttgacgacctttaaaattttttcagcttcgtttttttttctattagaaacaatgctgtgtccattaggaacaatacccatcagcataagtttccctgggttattgcctaggaatgggtctatgaatattcactgttaaacaatagtgccaaattgctttcccaaatgactatatcaacctacactcccaccagcagtgcaccccaccattttttaaaactgatraatcatttcagaatcaagaaagagatctatttgtgctgaagttggtgttacaggctcaaattcctttttttcctttttttttttttatttatttwttttttgagacggagtctcattctgtcgccaggctggagtgcagtggcacgatctcggctcactacagcctccacctcctgggttcaagtgattctcctgcctcagcctcccgagtakctgggactacaggtgcgcaccaccacccccacctaatttttgtatttttagaagagacgaggtttcactatgttggccaggacggtctggatctcttgacctcgtgatccgcctgcctcggcctcccaaagtgctgggattacaggcgtgagccaccgtgcccagcctacaggctcaaattctaaatatccataaagaaataagcatcctgtccctgtctctcacattggtgagtttatactttgttcagcactaagcataacaaacgagagttacttcgtaagatgacggttactttaccaccttcaaacatggcattaactaatgacttagattggactgagggttaataatttgaagactcccmatgaccttctttcctagtcattcaattcttaagcaaggtggataccaaaagtgtccaaaaatgccctagcgtacatgaagtgccaggggccaaaaccacccacttagaacaggaaatcatgtacaaatataagtacctcaagcttgtgaaattgagagacttctttatttccttcactattagaagcagaggaagagagggctgattagatggggggaaggcttagcttttattttaaaatagcaaaatcgaaaaactttgtaattagattttgccagacttaggcttaaaggaaaatgattctttcctctccaaaagaataaggtcagagcctaagactcccaaacctttggtcctggctcaaagggtgagctacgaatcggcccgttcttcatcatcctcctacatatacctatagatctgtctgggcatgagtacagaattggcaaatacagggtatgagaagagacaacgataaaacggacagaatgtggtactgttcaaatgttaagaagtgtcaggaaagcaccacagctgacgctgaagttaatctggaggggaactaatttaccttctttaacacaagtggagatgagggcaacagtctgtgaaacacagtcagtgtgttctttctccattatggtctctttcttactggttaactacaaaaagcaaggaaatggctgaaaggcaggcagtgaggggagagggaggaatgagagactttcacctgtacraaggatgtctctggaaaacggaatgttgacagagagtaaacaagcaacawatgctattaatgcctgttaagtcacctttttgagattttttggtgactatcagtgaagtcttatgcctcttattaaattctcacactgttttaattaagtagggccttattttaatcacagtggtggtgccttctcgttttaagctagtgagctggaacccagccaggcagtgttaaacaggagcgagagactttccttcttcgtcaaggaagcttttgcagccccrttwttttgtttttttatttttcagagactgaatctagctctgtcacccaggctgtgcaatggcacgatcatagctcactgcagcctctaactcctgggctcaagcaatcctcctgcctcagcctccagaggagctgggactacagatgcacgcctccatgcttggctaatttttacttattttttgtaaagacgaggtctctatcttgccaaagctgatcttgaactcctggcctcaagcaatcctctcatcttggcctcccaaagtgctggataacaggtgtggccaccgtgcccagcctcagacctccttttctcccctatccaaagcctggtaaacaaagtgagctgatttgcatatctaaaatcsggtgctggatgcctgcaaatatgatagggaaatatgtatttggaacctcaggtgaaaccccagcaaaaacattaaaatcatcacatttgaaggagccctttgtaatgctgatatgtaaagatcccattaaaacacagccattctccacaactacaaaaatctttgatttaaaaatgactttggattcctatgtcacgttaaaagtgtgttrggcattttatccagtgacttagattatcctttcaggagaaatactgtacttcattgtaagtccttaatgagggaccaattagtccttcccctccacttcaaattcctctgggaaatgaggtcagaatccacttcccacccaaagcacctcatggaggctgcatcaaatactacagcagcatttgtcaaaggggagccctttccaaaggcaagatgggtagaaggagaaatcttcatcaagggctatgccttccaccgacaggcacagagcacaaagaagctcagcatttactataagatcttgcacaggagctgttcaaacaagctgaagcacacacccacgaatttcatctcagcgactctctcttttacctgctgccacagggacagccttcctgctccctgattgggtgtctcgctggctgtgcactcacctgcagggcgcagggtgtcccacctgcatccccctcctgctccatctgcatcatgcactcagaggggagtgccactgctctgggtcaccagcctgctctggctctgccgcagcctcccaggggattgagctcctactccttccactagaagcatggtgagcaaattagaggttataaacacctccggtggaaggaggagaattcctttgggctttgtaagggaacctcgtcagccgcaagaatctccggggtataagacataggtacatgctcacccttgccccttggccctgttgggcatatgtggaccacacctttttctgcccacaattatggcagaaatgcccatccaggaaaatgctgcttcacatgttcgaagaatgcctcacatggttgagaatactgctggtcctcaacaagcagcataaatctattttttttttttttttgagacagagtcttgctctgtcacccaggctggagtgcagtggcgcaatcttggctcactgcagcctctacctctcagattctagcgattctcctgcctctgcctccccagtagctgggcttccaggcacatgccaccacacttggctatttttttgtattttcagtcgagacggggtttcaccatgttggttaggctgatctcaaactcccgacctcaggtgatccacccgcctcggcctcccaaggtgctgggatttgcaggcgtgagccaccatgcctggcctaaaactattcttgatgtaaggagaaacatattcctaaatgctaaaggcagtgctgccaaatccatggctcccagcataggctaaagttttattaggagaccaggagtgcacacatctctggccagggacagcaaagaaaggcagctgagtcctacaacacygctggaaggagaagccaacagtctaggatttaaaaaaaaaaagaagctgagtctgccattaagaatgaagtaaattgctaacacagatttttaatgttcttacacacacacaaaatgataaactggtgaggtgatgaatatattaactagcttgattgaatcttgttataatgtatgcattataaaaacatcacactgtaccccataaatatacataattattgcctataaatataaaaagttaaaacaaaaaattaaagaaataaatggtgaagacattttttaaaaaatgaatgatgctttcatgcatgctacatagcttgtcacaacctgccggaacgggttgccaatgtgacatgcttttaagatcacagccctccagcaacacattgatacctgaaactccataattaagagttatttccttttgtttaaagatgttttctcttttgaaatttcagtataatatgctactttggaagtggtatatccagatctccaaaatatatgcatatgcatattttaaaatcaaagccgagtattgatcctaactttaccactttccagctctgtcactttgaggaaattatttactggcttgaccctcaagttcatccgctgtaaaaggagtcactaacgcttgtctcagaaggttgttacgtatataaaactacgcggcccagaccacacccacagcagccactcggacactggttttcccctctctttctacacagcaggtcataagaagtaaggacaactcaaggatgctggcttcctggtgtggaatgataaggcggccagcaagctggagtgggggtggcaggagaaaaggacacctgggccccatgacagaacctgtttcacaaatgtggtgaggggagctctgctccagtgcacaaaaaggctgcaggctgacaccattttgcagtgttcactggcaaggctgctgacatagaaactggcctccgtcaaaaagtcacacctctccttttcctggcttggtgtccagctgaaaagaggaggggttcatgtgcatctggacagctttaccccaagggcacctgcaaggtagtaggagcagatgaggctatggccagatgacagggggacatgccagcagaaggaactaatgcagcttccaacttgctggtgcccagccagaccccactgatttggagactttcctgccaacttgccaaaaactgatctgacacccaatggtgtcaccaaagatgttttcttttcctatgcatcagtacctccacacccagggatcagtcttccttcacctcactctaaagggccagccatcattgccttccaaggtatgaaccaagaaatgtcaccactcactcaggtgaacaggccacagaggactaaaagtgctggccctatagcagcctcatgcaaaaacagatttgtgcactgagaagacttttgaaatttgaaaggccgctacyaagaagataaaccctccaaagatttccttctatcattgttattcattaaaaaaaaaacaagcttaggccgggcatggtggctcacacctgtaatcccagcaytttgggaggctgaggcgagcrgatcatgaggtcagaagatcgaaaccatcctggccaacatgctgaaaccttgtctctactaaaaatacaaaaattagctgggtatggtggcacgtgcctgtaatcccagctactcaggagggtgagacaggagaacagcttgaaccagggagtcagaggttgcagtgagcagagatcgcgccactgcactccagcctggtgacagagtgaaactccrtctcaaaaaaaaaaaaaaagcttaacttgaatgaatgggaacaagagggttatttaaaaaataataaacagtaacagctatcacacctaaaggtgacattatctagaaacattaacatgtcaagacatcagcccttctgttccttctgttcccccaagaggcctatttggagcaccagcaaaatgcatttggaggatcactaaatctaacagtgttcactgctgtagtgttatgagagtgtttcactttcaggaaatttcaaaagggaaaggtgggaarcaatgtgtgtcctacatggaaatctcacatgtggttcattgcgtcttttttcttacacagctgccattatataattcttggccattgttttttatttaataattaagatgaataatcttggggtcatccattgtatatgtatctgtggtaggtttaaaaattccagttgacctttccctagcccccagtatacttttgggctacttcctccctaagatgagctatgtgcacacatgtggcacaattttaatwctatctaagcaaaaccacaaaccaataaaagcatcatccggtgcttctcaaagccaaaggaaatgattttggagcaacacatcactgattacattccattaatacagataattaaaagttgactgtataataatgttaaatagcaggcataactttttttgaaaatttctccgtgatattagctatgcaaaaacactgactgaatgttcaaygctaatcaaattcatctcctcttaagagcagcgtataataaatgggtagcctaaaaggaatgctttgaacagaatgcttcactattgtctgattattctaaatttaaaactccaacaaaggaaaggattattcttctaaggttcaagattcgtgaggatttggtaacgaaattccttaaggacagcaaattaaaaaattgctatctacaagctgccactattttatgtctgtatagtgttttaaaatcaaagtcactacccattcaacaacaaatgtttgtttggaataaatgaatgaaagaaacagcctcaaaatactttacaagtttaatcacctataagttatgaattaggcagcaacttcaatcattcccaaatgattgaatcatttacctcgctggkgtaaggtatatgtctggcaagccaaagccagaactagaaactcaagtaattcctttgattcttagaaaatgacgcagttgttagagctggttgcctgctgcagttgtcttcctgtgtactctcaatacaatttggaaggcatgttatctaggctaggggaggtaataacaaaggaggcataacaattaggcttgctcctgaaattatacgggtagtcaaaaaaacgaaggaccccaccatcacctactaagctatgtgatgggtacctagctggtaaaaggtgtttccaagaccggatctaagttatttcataggtaactttagaaagcacgtcccaacgtggcagtgttaaattcatgtgtaatttcaaaatagggtatcagtgtatgaggcatgtaggtagtctaagttatgtgacacagagcatttagcctacatcaaaagctaaaactgaaaaatgaaattcttatttaagtatgttgctatcttcactctaatgagatacrtggaacaaattactggggctagaatgtattataacaatagtaaggaagaaggttcctgctggatacttggtaagaggtgggtggggtccaggatttccaggggactttgagtttattcttccaacactgctaaaatgcatctattttctattctgactttctaacaggatgcaatctgagagccagccagccacttaaaatctatttatttcagctgtgcgcagtggctcacgcctgtaatcccagcacttagtgaggccgaggcgggcggaccatgaggtcaggagatcgagaccatcctggctaacacggtgaaaccccatctctactaaaaaatacaaaaaatattagttgggtgtggtggcgggcacctgtagtcccagctactcgggaggctgaggcaggaaaatggcgtgaacccaggaggcggagcttgcagtgagccaagattgcaccactgcattccagcctggatgacagagtgagactttgtctcaaaaaagaaaaaatcaatttgtttcaacaatccagagtagaaatacaagtagaagattttgtgcaagcgtattttgtgcaagcgtaatctattttgcaagcagaaaattctcacgtattttagagtcagggttctcaaatcataaatcttaaagttttcagaatccatgccaagggacttaagaaaattaatattgcccccatataagctgtcttttgtatactaagcatcagcaaagcatctgcccccaacagctattttactggtcccagaggaaagataagcagagttgtcttccgcaaaatcataaagaaggtcaagttcatctgtaggatccttccccttaggccctctaggtgcctccccattgggccccaggggtttctactccgtaattctttcccacccctgccctgtcaacttgaacaccagtgaaacaccacagtgtttcaatatgaatacacttcagtcactgtttttgctccgcccaccaaaaaaaatccatactttaaagcttttaattyttttaagcttttaatttttttaattgaagcatcactttactttcttttaaattctaacatcagtgagcagccaaaattctttttttttttttttagatggagtctcgctctgtgacccaggctggagtgcagtggcatgatcttggctcactgcaaccttcgcctcctgggttcaagcaagtctcttgcctcagcctcccaagtagctgggactacaggcgcaggccaccatgccctgctaatttttgtatttttagtacagatggggtttcaccgtgttggccagaatggtcttgatctcttgacctcatgaaccacccgcttcrgcctcccaaagtgctgagattacaggcgtgagccactgagcctggccgcagcccaaattctgaacggggaaagaggataaggtaacgtctcctacttttgcaagcttcttttgcttcctatgaaggcttgccataaagatagaaatgctttgacatcacaaactgggttcatgttccactgtgaccatggacaggctatgtaactgagcttcggctactcatttacaaaacaggaattatcataatataatgtaatgtaatataataattatgagataatgatataaagtgattggcccattgcaatgttaaagagccctctcagaaggagcaccatactttctttctaagtgccgataaaataaaagataaaagcagccgactgggattgacccagccacctctgctaagggcctcctacctagagtcacctcactgggacctgggacagcatgattcttaccagtttctgagagcttgaggtcttgggccctcgagccaggcgtccgctaaaggcaggtctgaggttagcccatttcccagttaccattctcctttcccctggcttttctccttccaagaggctttaagcctttcccactcctccctcctctccttctggtcccctgcctcaactcacccagagactgagaatgcagtaccattcctcactgggccaccttccctttccaggctccatactccattctgtaataaagttctcatggggagacctccaacagcccaacagttgagtgtacacagccttgagtgcttagcggccagaacctcattgaaaacacagttccataaggaaaggcaggttttaagacgagcaggtgaccaggcaggcccccaccataaatggggtgagctcgccaaaagctaggcttgacttaggcctcatttggaggtctgagttgaatttcaaaaatcaaatacaaaaacactggcagaagtttagagaggcagaaaagagcattaccacaagaaaagacrcgggaggcttcaccagaacaggcaggaggaagtaggtgaggcacagcaggtgaagtgggggaagtgttccaccaggtgaaactggcctggtggctgtggggtacaggggaagaggtgagcaggctggggtggggatgaggacagtggcagaagattsacgaaggcattgtgcagcaccccatgcaaaggggcgcctctccgtcacacaggtactggcatgagggtgtggggaccgagtcctatgagttcctgggtctctaccaggattttccaggtcagcatcgagtgatactatctctcctagaagtggtgggaactgatgggaatgaccatggaagctgaatccacaaaccaagggtctccttatcttgtcctctcatggataaggcttcgtaaaggggggattcctcaaggtcttttaaccaagtctgcacatgggagaaaacgatggaaagcagatggaaatgcttctcaagaacctctcaatacaaagagataaagaggaacaggccaggcacatggcacacacctgtaacctcagcactttggaaggccaaggagggaagaccacttgagcccaggaattcaagaccagcctgggcaacacagcaaaactctgtctcaaaaaaaaaaaaaaaaacaaaaattatcgtggcacgtggtgcacatctatagttccagctactcaactgactgaggtggtaggaccattgcttgagcccaggagttcgaggctgcaatgaaccacaattgtatcactgctctccagcctgggtgatggagagagaccctgtatctaaaaaaaagaaaacaaaattaaaagaaataaagaaaatgtctcaggaagaagttgttcctcttcagacaactggattttgtttctcttcttttttttttttttttttagacaggcttgctttgttgcccaggctagagtgcagtggtacaatcagagctcactgcagcctcagcctcctggaaccaggtgatcctcccacttcagccttctgagtagccgggaccacaggcacacatcaccatgcctggctgattaaaaaaaaaaaatgtagagatgaggcctcactatgttgcccaggctagtctcaaactcctgccctaagcaatcctcccactttggcttcacaaagtgctggaaatacacactcaagccactgcacccagctgaccacctggattttggaaaagaggaaaacggaagtctgactgttagatgtgggaatcagatgttttcatgttatatatgtgaattatattacatgcacatgtatggtgcatatcataacaagagaaagtgttaaacacactagagacattagaaaacaaatcaaggactgaggaacaataaaaagtgttgcaatggtgtaaaagtaatacaaattatagtcttttacgtgaactgcttccactaatgcccaattactatgcagcacagtatcaatttagtggatcatgaactaygtatccgattgactcacttgtataagttacattttatgacaacactaaattctcctttatatgttcaggctccctattttgtgatgcgtgtaattgcagaacttgggagctagaatggaccttgaggagatcccttacgccaacsctttcacttcacagatgtagacaccgaggcttaaagagggtatgactttcccaaggccacaagaggactagtttacagcagagctgggcttatataacagggctgcccatgagccctgcaaggctccagagctattcttaagatcctctgcacttagacaatgctgcagggacacactctcttctttattttgtaagaacatttgctcacaattcaaaattattcaaagagaatgggaaacaggtatgatgcatgggggaagaggtatgctcagggattcagatgctggagctcttggttaagcaacttttggatcatatgatacttagaagaactaccatctctctcagtaagaagattagcaggagaatacatatggtacagtagaaaaatgcaggttattcaagcagtgaccctaggatgagcctcaaagcttactagctatgtggtctggaacaagctatagaaacttgccgggtctatattcccttaaccgtaaaatggccaagataacgatactgaccaggtgtagtgtctcatgcctataatcccagcactttgggaggctgagatgggaggatcacttgagcccaggagttcaagaccagcctgggaaacatgtgagaccctaactttacaaataatgtttaaaaaattagccaggtgtggtggcacgtacatatagtccagatactcaggaggatgaggtggggggatcgcttgaacccaggagttcaaggctgctgtgaggtacaatcacgccactgcactccagcctggagtacagtgtgtcactctggagacagagcgagaccctgtctcaaaaacaaacaaacaaaaagaatgacaattaactcaaagagttatgggatgagataaggttctatatttagaacacctagcacaggacataggctcaatcaatattcagtattcaataaatatttctttactatgtctccttacatagtgctgctaagaaagcctcacctgcgaacacatgtgatgggtacctggatggtgaaacgtatttccaagaccaggtctaagttatttcatggatactatgaaatctaatgttatcttaagatccaaagtgcagaggatcttaagaatagctctggagccatgcaggggataatgggcagccctgttttgtttgtttgttcgtttgtttgtggtttttttgtttgtgggtttttttttttatttttattttttgagacacagtcttgctctgtcgcccaggctggagtccggtggtgcgatctcggctcactgtgacctccgactcctgggttcaagtgattctcctgcctcagcctcccaagtagctgggactacaggcgcctgccaccaaacctggctaattttttgtatttttagtagagatgsggtttcgccgtgttagccaggacggtcttgatctcctgacctcgtgatccgcccgcctcagcctcccgaagtgctgggattacaagcatgagccatcacgcccggccctaaattgaattttgggggaaagtatacagttccatgagttgtgtgtgtgtgtgtgtgtgtgtgtgtgtgtgtgtgtgtgtgtgtgttgtttgtttgtttttgagacggacttttgctcttattgcgcaggctggagtacaatggtgcgatcttggctcactgcaacctctgcctcccgggttcaagcgattctcctgcctcagcctcccaagtagctgggattacaggcatgcgccaacatgcccagctaatgttttgtatttttagtagagatggggtttcaccatgttggtcaggctggtttaaaactcctgacctcaggtgatccacccgccttggcctcccaaagtgttgggattacaggcatgagccaccgcgtccggccaggcagccctgttatataagcccagctctgctgtaaactagtcctttgtggccttgggaaagttataccctctctaagcctcagtttctacatctgtgaagtgaaagggttggcgtaagggacctctccaaggtccattctagctcccaagttctgcaattatgtgcatcacaaaataggaaacctggacatataagggagaattaagtgttgtcaaaaaatgtaaattatgcaagtgagacaatcagacacatgtttcatgatccacttaattgatattgcgctgcatggtaattgagcttggaaagcatgtcccaatgtgtcagtgttatattcatgtgtaacttcaaaatggaatgtcagtgtctggggygggtgggaaatccaaagggaagttctaagagtgaagcctgtttccatctgataggtcaaaatacatgaatatgtacccatctcyctaggcaaccatggtcaactgttgaaaaccacttcttgctttacatcaaaatgtgttagtagaaaacaaaaataccttgggtcaagcatatccccaaattcctaaagatggctctttgctcattttttatgcccaaaatctctaagaaattgatcacagatcctaatatggtcaaccacaggtctgcaggtcacaacatatctttttgggcatggtctgaaatgcccaaggcatccgaggaaaaagacgtgcttggtctatagacaaaggcccctcaatcggtggtgagacaataggattctacagtcttcttatgacatccacttcccatatataatcttgttagtaaatgaaacattaaagtctcatggagaaaaaagtctgcagtgtctgttttatgctataaacagatctccagctgaaattgctatgtgctgaatgacattggagtgggagccactggctttacctgcaagcctcagctttagtccagatctgttccacgcaaccctggcaatattacctctgttctagaaccatctgcgacttggatgttctgccaagcaaacaaacctgctctacatctgtctgcctatccagctctctctctttctgtctctctccaaggtctctctttttctaagtcacctttgttgacaatcattgcagctggaccagtgagaagggataaaatagaagtcaataaataaagctcttctgggttcattaagcctatgacctaccctctgcccatgcacacttgatttctatcttcttaattttgactacactgtgtttggatgtggggagaactattttttcactcttattcaaagacgtgtgacactattattctttgtttccttaaaatatgttggcattcttctctccctagtaggagagcgcctgcaaggatcacaaaagcttctggggagaagcaataatctgctgaataaccaggccccagctgccaaatgccactgggaaaagtgcaaagggtgaattgggcaccactctgaatcataaacattattacaggcaaagtgactggctgctacttgagagttcttctgtacctaattggaccatgcagcgtgatactcctggggaccattacagggatacaggtgtagcttacaatatacaaaagctgtgtgtctgacaatctacgtgtaagcctaactttttacattacttgrtgtgctaagtgtcctgagggagttcattatttagagaactccataaatacttttgtaaaattcacattcctctccatttgtgttttgtaaatttcccctctctgtctttagagcacgtcatcaatctgaacatccatttcccacaaatataaagatggggggaagtctacaccagtgctgaaaaaaaaggagggcacccagcatttttaacattaagacattttgttagatagaccagagaaagcatcacataaaaggctgaatcagaaatgtgtgttgggattctctttcttgaaaaggtggcacagcactgtgagaagaaacaagaagagattctgacagagcactggttagaaatcttcctaaaatggactgaacgctggaggtgagagcaggctagcaaaccagatagtgtctggtgtccagggcattcacattcggaaggcactaagaagagaaccaagcataagtcctccatgcccatggccatctggtgggatgtgagatgtctctctacatagcaggactctgatgccagaaaaatgcatcctctgctacaaagggggcttggagtgaagctagggtcagggagaagttcagaatgagaaccactgtctcttgcacgatggcttcacccattgccaagcagcaaccatgcaaggaagaaccccaatagagattgccctgtggctccagctccctacaaatttgtgcagctgctgaaaaacacacctggtctagtacatttttaagaacaaagccttcagcttaagaccgaggaaaggagtccaacctttccctaatggtacagagattatttgagaacaatttccagggcgggctagccctcccatcattcaatgatgagcagacccaaaactggcaacattgggcttataaggacttggttaacaaaacaagaaacatccaagaaataaaggaagaagacgatttcaaaaaatatttactactggaaatagaaacaagtttcagacaagatgtgatttgcacctttgaagaaggaggaggaaaaagaaggggaggagacccagacttaggcgtgaatgacaagtaaatgaaaacaaaaagaaacaccaacttacaaaaaaaaattaggattttttttcaatgactgattttccaaagtattatttaaaactacattcgatgcaatgaaaaggaaaaacagcctttggagcatcaaaccagcaagtgaagaacaaacctgaaaaagtctcccaaaaggcactggaaaaaagatgaaaagtataaacaaatcagatagatgctaatggatacaggagacaaagtaggaagccaacatagagatagcatgattgatgcatagtcaaagtaaataccacagaagcaattattaaagaaataatgaaagaaaatttttctaaactgaagaaatacagagtaaaccaaccaaccaaccaaccaaccaaccaaaaactcactctatacaagaagaaaaaaatgaaaactgatataaatattaatataaattaataaattaaagaaaacttccatctatttatttaccttctggtgcaacttttgaggtcaaaacaactcataagcattcagtgaggaggaaaagaaatacaggtaaccaggtcaccaaggtggaaaaaaaatcagatttctgacaatagaagaaataaaacaactacacagctctaatggcaaagggttctgatacaaaaattccaaactaaccaactttcctactaaggtatgagagttaaaaaataaaaaaggcattcttggatcccaaggagcaacaaaaacacaatgtatttcatagaatatatttgaagaagctccctaatcaatcaaaaatttaattttaaacaataaagaaaaggggtagttgtgctttaaaacagttcacaatatggattcaggcccagcacaggggctcatccctgtaatcccagaactttgggaggccgaggtgggaggattgcttgaggccaagagtttaaaaccacccgggacaacacatcgagacgtcatctataaaaaaaaaaaaaaaaaatcaagttagccaggcgtggggctgtgtgcctgtagtcccagctacttaggaggctgaggtgggggatcctttagagccaggaggtcaaggctgcagygagttatgatcccaccagtgcactccaggctgcaccacagagcaagaccctgtctctagagaaaaatatatacacatataaggagagcatataacaaacaactgaatatcgttataaaaaggaacacagatatagataatccttattaagaaaagttacataatatttaaaagtaatcataaactggatcaaaacatctatatgtctatatctaactttaaaaaagaaaaggagaattccaaaggagaataaaatgtgttaatcttatcttatacagggaggaggtatggtcagccagcttcctcactttgctcatacagaaatataggtcatatttagtcaaatttaagaagacaactagaagattaaatataaggtatgagtattacagacagtaaatcatatcacacaaaatggaaaatgagggaaatatcaaggaatcataaaaccaaaagaataaaaagatgacaaaaattagaataagcgtatcaacattgaagacaggtattaattcgttttgaaaagcaaaagaatctcagatggtgtcataaattaagaatgcccttagactatctgcaagaaacccataaaagttacaagaagattggggcaaaggaataccaggaaactgcacatttagaagtgacagttttacaactgttaatacaaaatcagtattacatatctaaagcattcaacaggggtgaaatttttactgacaagagatacattccaaagaattaagtcaaaattgtatgtgtcaagatagtagagcatggaaatatataaagaaaataaaacagagattgagagacatgcaataatgttaaagtctaccccactgcattcagtccttggaaaaataagcagatgaaattttttttttttttttttttttttttttgagacagagtctcactctgttgcccattctggagtgcagtggctccatctcggctcactgcaagctccgcctcctgggttcatgccattctcctgcctcagcctttcgagtagctgggactacaggtgcccgccaccacacccggctaattttttgtatttttagtagagacggggtttcaccatgttagtcaggacggtctcgatctcctgacctcatgatgcgcctgcctcagcctcccaaagtgctgggattacaggtgtgagccaccgcgcccggccagcagatgaaaatttaataaagatatagagaagtaggataaaatcataaatatggcagatctgatgacaagataagcctgattagatttaattagagcatgcatcttctatacaggggctcatggaacattaacaaaaatgaatcctgtattggaacataaaataaattttactacctttcaatattctgtgaccacaatgcaacaaaactcattaatagacagaagtgtaaacaattcaaattaacttgtacattcaaaaagaattcttctaaataggtgtagagtataaaagataataaattatggaatcacagactgagacaataaagataatgagaaaattatgtatcaaagtgtaggcagcttacagtcagaggcaaatatctttagtatttttatcattaagaaaaattaaaaataaaagatcaactcaataaattagaaaagggggtgggacacggtggctcacacctttgtaatcccagcactttgggaggtcgggcaggcagatcacgaggtcaagagattgagaccatcctggccaacatggcaaaactccatctgtactaaaaatacaaaaattagctgggcatggtggcacgcacctgtagtcccagctacttgggaggctgaggcaggagaatcacttgaacccgtaaggtggaggttgcagtgagccgagagtgcaccactgcactccagcctggtgacagagagagactctgtcttaaaaaaaaaaaaaaagaaagggaaataaacctaagaaaagcaatataaaggaaaagcacataaaactatccaaatgtgagataaaaattattttggccgggcacggtggctcacgcctgtaatcccagcactttgggaggccgaggcgggtggatcatgaggtcaggagatcgagaccatcctggctaacaaggtgaaaccccgtctctactaaaaatacaaaaaattagccgggcgcggtggcgggcgcctgtagtcccagccactcgggaggctgaggcaggagaatggcgtgaacccgggaagcggagcttgcagtgagccgagattgtgccactgcagtccgcagtccggcctgggcgacagagcgagactccgtctcaaaaaaaaaaaaaaaaaaaaaaaattattttaaaaggctattaattagctagcagtaagtctatcttatttttgcatatattttaaaatatatacaaaatgttttaaaatatatacaaaaataagattgacttactgctagctaatcttaagtttcagagaacaaaccaaattaaaaataagaagtggaataaattcacaaatattgagaatgttttaaatttttaaaatatgtaatatttgactgtgttaacaaaattttgaatatagaaatggtcaggtccggtggctcacacctgtaatccccatgctttgggaggctgaggcaggattgctcaaggcaggagtttgagaccagcctgagcaatatagtgagaccccatctctacaaaaaagttaaaaaagaaaaagagccaggcatagtggcatgcacctgcagtcccagctacttgggaggctgaggcgggaggattgcttgagcccaggggttcaaggttgcagtgagctatgactgcaccactgcactccagcctgggcaacagagcaagaccctgtcttgataaaataaaataatataaatagaaatgacaaattttctagaaacattaaaatgctttaatattaatttaagaagtaaaaatcctgatcaaaaaaattattatagacaaacttttaggggtggggaggctttcataatataacaaccaaaaaatgacataattctaataactttggggacaggtaatttcaaagcttccaggatgctacatgtgccttaatgggggcaaaggtacccttcctttctctcacttttcttctccttgaggcaactcagaggagcgattgtggaaatttccgaagctgctatatgtcagcttgcccatttgtatggaatttcatggtttttttgacaagtcagtctttttgtcatcatcgcatcttgagagtagagaggaagggaatggaagggagaactgttactatcagaggcttctggaaatccccgcttgatggtacatgactctttcttaagaatggttctcttttatgggttgccattttggtgacaattggtgcactcagctctacctcttggtgggccccagtgtacttcagcatgatctcagttctttctttctctaccagtttccatgatacatacatcctgaaaatcacagcatcaccattcaatagacaaaaattatcattatcaaagcggccaaaaaggttttctcttaaatattctgtgggaaagagggttgaaaattagaatagaatactatgtatttgccacagtaaaagatatctaccacaaaccagtagccaatattatattaaaagttaaaaacaagagtcaatgattaaattcaggccacatgcggtggctcatgcctgtaaccccagcactttgggaggctgaagcgggtggatcacttgaggtcaggagtttgagaccagcctggcgaacatggtgaaactccgtctctactaaaaatacaaaaattagccaggcgtggtgttgcatgcctgtaatcccagatacttgggagtctgaggccggagaatcacttgagcctgggaggcagaggttgcaatgagccaagatcgtgtgccactgcactccagcctgggcaacagagcaagaccctgtcttgataaaataaaatgaaataaaataaaataatataaatacaaatgacaaattttctagaaacattaaaatgctttaatattaatttaagaagtaaaaatcctgatcaaaaaaattattatagacaaacttttaggggtggggaggctttcataatataacaaccaaaaaatgacataattctaataactttggggacaggtaatttcaaagcttccaggatgctacatgtgccttaatgggggcaaaggtacccttcctttctctcacttttcttctccttgaggcaactcagaggagcgattgtggaaatttccgaagctgctgtatgtcagcttgcccatttgtatggaatttcatggtttttttgacaagtcagtctttttgtcatcatcgcatcttgaaagtagagaggaaaggaatggaagggagaactgttactatcagaggcttctggaaatccccgcttgatggtacatgactctttcttaagaatggttctcttttacgggttgccattttggtgacaattggtgcactcagctctacctcttggtgggccccagtgtacttcagcatgatctcagttctttctttctctaccagtttccatgatacatacatcctgaaaatcacagcatcaccattcaatagacaaaaattatcattatcaaagcggccaaaaaggttttctcttaaatattctgtgggaaagagggttgaaaattagaatagaatactatgtatttgccacagtaaaagatacctaccacaaaccagtagccaatattatattaaaagttaaaaacaagagtcaatgattaaattcaggctgcatgcggtggctcatgcctgtaaccccagcactttgggaggctgagcgggtggatcacttgaggtcaggagtttgagaccagcctggtgaacatggtgaaactccgtctctactaaaaatacaaaaattagccaggcatggtgttgcatgcctgtaatcccagatatttgggagtctgtggccggagaatcacttgagcctgggaggcagaggttgcaatgagccaagatcgtgcgccactgcactccagcctgggtgacagagcaagactctgtctcaagaaaaaaaaaaattaaattcaggaataaagtcaagtgtatttgtatctgctcttccattattatttggcataccatcaggatgctgtagaagaaataaaagttaaaaatattaaaatacaggagacaaaattatcattattggaaatgttattgtctacttagaatatctaagggaattagctgaaagactctagaactgagatcaatattatggtcagttgaccaggcacagtggctcatatctgtaatcccagcattttgggaggccaaggtgggtggctcacctgaggtcaggggtttgagaccagcctggctaacatggtgaaaccctgtctctactaaaaatacaaaaattagccaggtgtggtggtacacacctgtaatcccagatacttgggaggctgagacagaagaatcacttgaacctgggaggcagaggctgcagggagctgagatcatgccactgcactccagcctgggtgacagaaggagactgtgtctcaaaaaatatatataatatattttatatatagtatataatatattttataatatattatatactatatataaaatattttatatatttatataaaatatattatataatgtataatataaaattatatatattatatattaataattatatataatggtcagttactagaagatatacatatacccctccacacacacttacatagacatactaatagttttcctaaaacgcaatgataatcaggtgaaaatttcccttatacagtagtctccccatagccacggttttgctttccatggttttatttattggtcaatttgctgtctgaaaataggcgagtacagtacaagaagatatttggagactgagagagatcacatccacataacttttattatagtatatttttatataagtattttatttgattattagttattgttgttaatctctaatttatacattgaattttatcatggtgtgtacgtacaggaaaaaacacaatctatatagggtttggtactaactggcagtttcaggaatccaccaggggtatggaacatgcccccagttgatcggggggactactgtataaggaaaataaagattaagtgcacaattataaccaacactgtaaaatctctaaagaaaacaagaactgctcagattctataaaaacagaaaatgcattactaaaaaactaaaggaaaaacattgtgcatggatcaaaaattacaagagttcagtaaagacttccattctctctgaattgatatctaatctattaaattaaattttattttgaaaagatgttttaaaatctgactaaattagtctatgtacacatgaaagaataaatagactaaaaatagctaataaatgctgaaaaaaaatatatgaaagaatctaattatattaaaatcttctaaactcatagaatcaaaagcaaaatagaaaaaaaacaaatatcaagataacagaatataaggcttagaaatgcggatcacgaggtcaggagatcgagaccatcctggctaacacagtgaaaccccgtctctactaaaaacacacacaaaaattagccgggcgtggtggcgggcgcctgcagtcccagctactcgggaggctgaggcaggagaatggcctgaacccgtgaggcggagcttgcagtgagccgagatcacgccgctgcactcctgcctgggcaatagagagaaactctgtctcaaaaaaaaaaaaaaraaaaaaaaagaaatatactcatgtttctaaaaacatttagtttttattagtacttaataaagatgatgtctcctctcagtggggcaaaagactaataaatacataatgtgagaacaactgatctaatatttgacaaaagttcattgaatcctcatgtctaagatcgcacatcaaaataagcgctaaatataaactatgagataataaagaactacaataaattgtgggtaaatagttatctgaccctagtgaatggaaggcttttctaggtataaaagcaaaaaaaaaaattaaaaaaaaattgcagccataaaaaagaatgagatcatgtcctttacagggacatggatgaagctggaaaccatcattctcagcaaactaacccaggaacagaaaaccaaacaccgcatgttctcactcataagtgggagtttaacattgagaacacatggacacagagaggggaacatcacacaccggggcctgtcggagggagggacaaggggaggaagagtgttaagacaaataccgaatgcatgcagggcttaaaacctagatgacaggttgataggtacagcaaaccactatggcacatgtatacctatgtaacaaacctgcaagttctgcacgtgtatcccagaacttaaagtaaaacaaacaaaacaaaagaattcaggcagggtgtggtggctcatgcctgtaatcccagcactttgggaggccgaggcagatggatcacctgaggtcacgagttcgtgaccagcctggccaacatggcgaaaccccatctctactaaaaatacaagaaattagctggacgtggtggtacacacctgtagtctggaggctgaagcaggagaatcgcttgaacccgggaggcggaggttgcagtgagccaagatcgtgccactgcactgcagcctgggtggcagagcgagactccgtctcaaaaaaaaaaaaaaaaaggattcaactgtgggaaaaaaaaaaagcaaaacactttttraaaattattaatatgcttgactacacagatattttgattttgtaaataaaaatcaacgtaagtaaaattcaaaggaaaatatcaaagtgggaaaaatatttccaataccattaaacaaagagttaatatccttaatacaaaataaatacatgtaattgtgagtaaaaggaaaaactttctaasacaaaaataagcaatgaacacgaatggccaatttaaaaaagaaatgtaaaaaacagagaaacataaggaaaatatccaccctcacttgaaactacactaaaaaaagcaaattaaaacaagatataatttttaacttatcaaattggcagagtttttgtttgtttcttttttttttaattacagtacttagtgttgtccagagtgcagacacatgaacgttctttgtcatggttggcaagtgctcaagaagagtaatttaataacacatatcaaaagccttataaagggccttactatttgagccaccagctctagttctggaaatttatcctaaggaaacaaccagagatgttgaaaaaagatatatatgttcaagaagtccagcacagcatcactaaacgatagcacaatatctggaaaattaaatgctagataaatagattatggatggaaattacagtatctatgagtgatgtaaaacttacgataggccctaagatcacactgtgtgggcttgaaaatcacacagcagcatgtttacaatatacagacccctggtaaatatcaggcagctagctcacaaacagtaaatcagcatgatcccagttaaaaaatctatatgactagagacactaaaaatgttcatatttatcgtatgcgtgatctgctctgcattcttttctgtatttccagtttttctaaatgaatatatacatcccttctgtgatcagggaaacaataaacaatttctggggcatgccctggagtcagactgcttggattcaaatcatagctctatagccatgcgtggcaacatgcactatagtcccagctacacaggaggctgaggggcaaggatcgcttgagcccaggagttggaggccagcctgagcaacataatgagactccgtctctaagggaaaaaaaaaaagaaaaaaaaaaaacatagctctatcactttaagatctgccaccttgggcaagttgcttatcctctctgagcctcaacttcctgttctgtcaaatggggctaataacactatgctrttgggctgctgtggcaattgaattttacatgtatgtaaagcacttagtacagcatctggaccataataagagctcattatatattagtattattttgattttaaaacaataacccccctcaaccaaacttttacagtaggagaaaccttgatcttatttctatgctagaggaaaagcagtagtcttcaaaggctgtaaacacaaaatgttaaatattcacatacatattctctctctctctctgtctctcaaacacacacacacacacacacacacacacacacacacacagaatatgtgaatatttaacataactataatttccaaccataatctatttatctagcattcaattctccagatattgtgctatcgtttagtgatgctgtgctggacttcttgaacatatatatcttttttcaacatctctggttgtttccttaggacaaatttctctgtctctctctctctcacacacacatacacacacagacagagagagagagatgaagattctcatatcctaggatcctaagaaattggggcaatctttaatatgcatctttaaggagatcatctgagtttggtcaacccaagtcgaagaggtacgttatataaagaagctagatgatctaagaaaacagaggttgttgatcatcagttggcccatatatgcccccccaaaaggctttagccctccatggcacaggtgtatttacagctgggtgtgcaaagtgccaaggaggatgccactgggtttcagaaggagccccagaaagggagtcaggctgcataagttctaggacccccacctactccgctggccagcaccacatgtggtcccacaggactacactctcctctataagcaaaggagaactctctggggccctttctagatctgaggtcctactaaaaagggtgacaacctcagctctgaacattagttgttttatttcaactccaaagtgggcttctacatcccgaaacaaatgaaagaaaattaaaagataaataaagcattcctggcatccatgaaagcatttgctttccctgttcatgttatttcagtaaatctagcagtgtagaaagagacaaatgagcgcagattacaaggcagcacctgttcggagcccaaggtcattagatgccattagcaatggcataaagacacatgcatttaggagataacgcagctcagtgggttattgcatccttccttcttgacaccttgtcggctgctctcacagacctgcttcagtctcagagcccagacaatagcactaaacatggcaagggcgttagctgcaagaggctgaaattggctgaacctgaaatatgagtaaagtctttgtatatgcaaaacagaaatagccctaaaaggagacacaactatttatcaaaaaggtgcatacagagaattaaacaaggccaggcccggcggctcatgcctgtaatcccaacactttgggaggccaaggcaggtggatcacctgaggtcaggagttcaagaccaccctggccaacatggagaatgccgtctctactaaaaatacaaaaattagctgggtgtggtggtgcacacctgtaatcccagctactagggaggctgaggcttgaacccgggaggcaatggaggttgcagtgagccaagatcgtgccactgcactccagcctgggagacagagcgagattccatctcaaaaacaaaaaacaaagaattaaacaaatgatgagttgatagcccgaaaagaagaaaagatgctctatgcaaaaataaataaataaaaagtcactgagaactagcagcagatgataggcagaaaagtggagtagttaagacaacaggctttggtgtcaggcacactggctttgaattctagcctccaccacccacaagctgggtaaatgtgggcgagtagtttaatctatctgagtgccaccatttttaaaaatctgtagaatagtaacagcaataactacctcaaagagttgttgggctaattcaggcattcattcacttgatgatcactgattatgatcagtgagcttctaggtgtgacaggcccagttttaaacactggaaatacacaagtgacagatgtaagcatgggctctgcttccacagacttaacatcactctcaaattttagtgaaatgagaaagacaaacaagtatgtgtaagtgcaataaggaaaaattaaaccggtgaaggggataaaaactgatgagggtgttattttagagtaatgcaaagaccctgagggaggaacatgtttgcattaaacggtaaggagcttagctcagggctcataaaaccatgtgctctaggagatggtgatgatgatgatgaccatggtggtggtggtggtggttggtggtggtctcataacgataaccaaacaagcaaagagtacaagggatgtgcgaataggtacagcccacattaagtaaagaaatgaactgacaaaattagtatcgaacacaggaagtactaattagaatcttgactaattttcatttattaaagactgcagttctatttttagttatatccttcaatctaacatcattcaagaaaagcttctctccaaaaattctatttcaggaatgtaaatttttaaaagtaagagtgttctgcatgcatgatttctttttacccagccatctttctgttggtttttagcctgccagtagtgtgtatgtgatattttaaagacttactatgcagggtacttagaaatttcatatgagcatttaaaatggcagaaatagctggtagctttcatttccacatgtactctcagaacagagaaaaacgagttctaatccatgtctttctaagcttctagccttttttttttaactgtctcagggtgaaattccactttacttgtttaatgatgcatacttttgaaattttacaaaaataatcattcatattttgaatttttctgcaacgtaacttttttggcttcatatcaggttactgaaatgtatctatattgctcctatatagttttagatcattcactttcattgttgtattgtgttctgtcatttgatcatatcataatttgtttatttcactttaataaacattcaagtagtttgggtttatttttttaaaccattattaacacaaataaagctgtgctggagagcctccatgtctcgtggtatacagtacagaagtctctaggaaacacctagaaggaaaattgctgagtcacagggtatacacatttgtttttgttaactggataatacctaactgtctttctaaatggttgtaccaatgaatattcctatcagcagtacataaacatgaaatgccatttttcaaacttggaccaaaatattcattactgggaactccagatctcaaataagtcaagtgtcagttccatctatcgctttggtcaatttcaaactgttctttgaacaaatccagacttgaagaaatttccattctgttaaatttctagccaactcatcacaatcaactacgcaagcaaacaataccccataagaacaacaayaagtaatcacatattgctggctccaggaagcaaaatgaagacatttaaattaaagcaaacatgcttacaaaaatattctggctatctcaattaatctgaaccaaactaagaataatctagatatttcccccaatcttctgttcccatttagttcatggcatttttataacgggacttgccagataagaagcatgtgtgtgtctgagaactaaggaaaaaaggattggttttactgtctcttcaaaaacatatccgatgtgaatagactaaaaaccattcaattctgcagtttgtgaattatatccccagaaagctggtattaataatatagcagctaagtgaaataagccagtcataaaaggacaaatactgtatgattcaccctctatgaggtatctagagtagacattgtcatagaaatggaaaagcagttgccaagggcttgggggagaagggaaaagaagagttgctatttaatgggtagaatttcaattttgcaaaataaaaagagttctgggttgggcgtggtggctcgcacctgtaatcccagcactttgggaggccgaggtgggcagatcacctgaggtcaggagtttgagaccaacctggccaacatggtgaaaccctgtctctactaaaaatacagaaattagccaggcgtsgtggcaggttcctgtaatcccagctacttgggaggctggggcaggaggatcacttgaacccaggaagcagaggttgcagtgaactgagatcacaccatcacactccagcctgggggatgagagcgagactttgtctcaagaaaaaaaaaaaaaaaaaagagttctggagatggatggtggtgacagttgtacaacaatgtgaattcagttaataccactgaatgtacacttgatggtgaagacggtcaattttatagtgtatgccttttgccacaatgtatggtttatttatttacttaaaagcaaaagtggcggtgttttgtttcagtattaggtcgggttcaagcaaacagaagggttattccttcataatcatatacattctgcaccatagattgagcattgcaccatttttttatttttataagctataccaaatttcagtgcacaaatgctataacagcacatactgtgggtgagaatataaaaaattgtgaaagtctaaagttactgctcacattgcaaccttgacacaacgactctgcaaaaacaagggcttaaatttaactgaatatgccacaattcagaaaatgctactaccatatgcccgaggggactgagtcacacttgcagtttaacttcaactcctgaattttttgacttctgtatgtttaaattctcatcaaactgcagcttcaacctttgtttctgccactgatcgcagaatgcatcgcttatcatttgacgtaatctctaccatgaaatacttgtttttgaacagcctaaggttcggaggacacttttttaaatgttaaataaaaaactgtcaacgattactgggaatggaaaaacagccaagcctctttgatgccatccttatgcctagaaaaatcttcccactcccactcccacatcgatcaagtgagctgcatctcttccttctttcaaagttcaccttaattcacttctctatgattctataatgaaggcagctgtgattacagcagaagtgaagaagagagtactacctaccctgggagcaagttaatttatggccataggcccactagggatacactgaacgaactacattttttaatgtatgtctatgcaataacctgtatatgatttttccatcattaagaatcttcaacagtcccagatgcaaggaagamaggccatcctggagggggctagggatttagggatggcattcctattatttacaaggcgctgagttagacagaccatgtgtgaccatggtgttcctgctcagaagcttacaatcgctttggagaggcaaggcatttatcatgcacagagagctgataatagcaggcaatttttcaatcagcatacatttattcagcaaatatttactgaagacctactaaatgccaggcacgatgccagacattagggacaaaaatatgactaagatgtggtcccagcagagaaacagatggggttccgtatagtaaccatgttatcaaggagtcatcagaatgctactagatgataaaaatagcagctttcccctcttcgaaaaatgcagagtacacataactaatccagtcactgagtgagcattctggcaatgaaaaaacatatttggaatgaraatagtgatcttcagaactctaggtaccaagcattccagatacataaatgttctgatccccttgagtggcaattgaccggctgacactgaggcaaacttgccaccatggaagatgtgaattaaaacgagtgattgtactaaggtatagaaatggcactcgtacttcctgtttcataacagtcctcacaagaccctttttaaatgtctgcctttcctgatagactgcaacctgaaaaaaaggaaggaactgggtctcttttatttacagttttccccagtgcctagtacaacgcctgacacatagtaagcaattaaaaacatttatggcactagaattttcaattagctggctgcatattattgcaaagttaacatctgaaaaggctattaaaatggtcatgtaaagacttggtaaccaatataatctagtttaataatatttatttatttactttatttcttgtttttgagtcagggtcttcctctgttgcccaggctggagtgcagtggtgcatgtgatcttagctcactgcaacctctctgcctcccaggttcaagtgattctcctgcctcagcctcccaagcagctgggattacaggcacgcaccaccatgcccagctaatttttgtttttttagtagagacggggtttcaccatgttggccaggctgttcacgaactcctgacctcagatgatgtgcccacccacctcggcctcccaaagtactgagattacaggcatgagccactgcgcccagctggtttaatcatacttaatcaactaatgaatcaagttaacttatggatactgttactggctgaattttttccccccacaaccactcaaaattcatgtgttgaagccctaacttccagtttctcagaatataactgtatttggaaattggaccttttgagaggtaattaaaacaaaataaggtcatatgaaagggccctattccactatgactggtgtccttgtaacaggagactgggacacagacttggagggaagcccacgagaggacacagggggaagatggccatctgcaagccaaggagaaggacttcagaaggaaccaactttcctgacactttcatttcaaacttactgyctctagaatcataagaaaataagtttgtgctgtttaagccactcagtctgggttactttgttatggtagacctmgcaaactgacagatactaagcccttgtttgagatggagctgtggccctataaatggctattttagaaagacaatgtgaactggcagcaacggtactggaacaggaatgaggagtccatatgtccacttctggttccagtctgacttcttggtcaagccatttttacttctctgagtctctttcctcctttaaatatagaagtttagatcacatgagctctgagtttcaggtgacctagaactgtatggttctatgcagcaaactcaatgttaccttctaagatgtgagagatggcacagaggtgtgtctgtttttccctggctacactgagccactggcagtaggcytcccaaacacttcccatctgcttcttgaaccatttcatacatatcacccaacatcccattaaagacagggtcctcggccaggcgcggtggctcacacttgtaatcccagcactttgggaggccgaggtgggcgggtcacgaggtcaggagtttgagacctgcctggccaacatggtgaaatcccatctctactaaaaatacaaacattagccgggtgtggtggctcacgcctgtcatactagctactcgggaggctgaggcaggagaatcgcttgaacctgggaggcagaggctgcagtgagctgagatcatgccactgcactccagcctgggtggcagagcaagactccatctcaaagcaaacaaacaaacaaaaaaacaggatcctctctcagcaagtctcctatcacaaaaggaatacacatcacaacgcagccctgctggaccaccccagctctaagggggaggtcaacttgtgagcaataagtcgaagcaacatgaagaagaaacaaggacaaggtgaagaatggctccatacattgtataattttcatctattccaaccagaaaagagctgctcattctgatcaaagatgttaatgagccctgcaaacagaaattactacaatagaacagtagacaccttcattaattattttctcctgcaatattagcactaatgattagaaaatcttcaatagcagcacaaataaarataaacagacaccaatccttggtacagcctccgtacagatccatactggactgttcattcagcacccagtattctggaatttgcctattaatgcaggtggaagcagtcctgttcatacaatatgacccaaactccaaattcaatgtgaatttttggttttgatttttggtttatttgtttgttttgttttgtttccccaaggcccagccgtgcccgtccctaaaatccatgggatatccacgtgccctcatcaaaatccccgtttcttagaagctccctctagtgagttacttttactggcaataaagaatactaattagcaaaaccatatttcacacacaaacaaatgcattaggatagtctttaaaataacctatttcttaagcttttattttaggttcaggggtacatgtgcaggtttattaaatagataaactcatgccatgggggtttgttgtacagatggtttcgtcacccagatactaagcctagtacccaataattgttttttctgctcctcttcctcctccaccctctaccctcaagtaggacccagtgtctgctgttcccttctttgtgtccatgagttctcatcatttagctcccacttgtaagtgagaacatgcagtatttagttttttgttcctgtgatagtttgctaaggataatggcctccagctccttccatactcctgcaaaagacatgatctcattccttttttatggctgcatagtattccatggtaatatgtaccacattttttttgtccaatctgtcattgatgggcatttaggttgattctgtgtctttgctactgtgaatagtgctgcaatgaacatttgcgtgcatgtgtctaaatttatggtagaatgatttatattcctctgggtagatacccagtaatgggattgctgggtcgaatggtagttctgcttttagctctttgcagaattgccacactgccttccacaatggctgaactaatttgtacactcaccaacagtgtataagtgttccctttctccgcaacctcatcagcatccaactggttattttttgactttttaacaacagccattctgactggtatgagatagtatctcattgtgcttttgatttgcgttgctctaatgaccagcgatattgagctgcttttcatattcttattggccatatgtcttcttttgaaaagtgtctgttcatgtcctttgctcactttttcatggggttgaaagtaaccttctccccgcctccccctgaggcagagtcatgctctgtcacccaggctggagcatagtggtgcaatctcggctcactgcaaccttcgcctcccaggttcaagcaattctcctgcctcagcctcccgcgtagctgggattacaggcactcgccaccagcccagctaattgtttttgtattttttagtagagatggggtttcaccatgtttgcaaggctggtctctaactcctgactttgtgatctgcccaccttggcctttcaaagtgctgggatgaaaataacctttttaaaaatatatatatttcggccaggcaaggtggctcatgcctgtaatccctgcactttgggaggctgaagtgggtggatcccctgaggtcaggagttcgagaccatcctggccaacatgatgaaaccctgtctctactaaaaatacaaaaaactagctggacgtggtggtgtgcgcctgtaatcccagctacttgggaggctgaggcaggagaatcgcttgaacccaggaggcagaggttgcagtgagccgagatcacaccactgcactccagcctgggcaacaaaagcaaaactccatctcaaaaaaaaaaaaattcaaaaatttcttaatgttgccttcttagagtctgtataaccttcttctggaaagggcaattttttttaacatcttgcccatttattagatattataaaggttaagatgaaaatgcttcccaagggcctgccatgtttttcctgtcatataaatcatgtctgtacgggcagaatcacaaagctagaatgggtctgaggactcctcctctcaggcaacttccttccaactgtgggcattcccttgggtgccctcttacactcactgattcacccaacattcacttgggcacttctgcattgtatgactctcttgaggcaaacaggaaaaacctgtatctgccctcaaggggagtccctcctagaggaggacactagccataccgttgttatgctgaagttgcgaggtccatttacagaaccagccttatcacttagcaatatagcccacatacccataaaaaaattcaagggcctaagtgagtggatgataatgtggtccaaaggtgtgcacagacatatgctgagtcacttagtgggctgatcaacaggggattcatggaggaaaagctaacagaagtgaccactccaatgcattgatgatatcagagcatgacaggtcaagagagcctcctgcaagtcatcatctgctcaactgtgaatcggcatctgagaaaataagcaacaaccttacctcccaaacaccaacattaaagcaatgcattattaaaatggaggttctcaggtagtaaatgaacactttaaaactcatgcaatcataaacattagaatatgcagcaaagagataatgatacttgtcagaagatattaagacgacatggcaataaaaggaatctgttcacagagagaatgattctaaatacaaaatggtcagattgatactcagaagtattgctattaatagaaataatattagagaggtttcattatgtaaatggctcatgtgtctgccagaaatgtacccagtaataatttgcatttctgctatagtgaaaatttcagggatgtctctttgttggcttatgaaggaccctttcattggtaagccacagtttttataatcatgataagaaggatcacctatgctctttgttgataataataataactaataagacactcgtgtgtgcctggcactgcgctgactgccgtatgtgcagcagtcctgtgaggcaggattattattcatgttttaaagctgagaaaacagaggcttaggtcaactttcccagggtcttaaagacgataaattatggaggctggatttgaacttgagtctttctgactccatgcccactctccttccacttgcagcgtaaacacagtggctcaaactctgtggcttcatgaatataatgtttcacagggtatgcagtgatcttataagtagaaatgggtctagaaagatggacactcctggacactgcattgcaaatctcgctatctgctttcactcactgacacctatatttgccccttgagtcccttgaatattggtgccacactctgctcagctcttgatatggtgcaaagcactaaaatcacacaggtgtcacagccaaaaattctgtatcattccaaagctgacttgtcccccatcagtcccaactctgccccagaagtctcactgaaataaagtctccaggatacctgtcttgccactcctcattcacatccttggttttatgacccacacttctataggactctcccttctttagttctaattattaaaagcagggttctgaaatcccaaggtgattgcaaaactcccatctcagccacaaatcttcattagaatggctaatcaataagagttttgtttcagatcccaccactttatttcctctgtatgttttttgaagaatttttcaatttgccatgatataactaaaactcaagcatcaacaggaaagaggaagagaagagctcagaaataagccactagtgctcgaaaatagggcatgtgatgttagagctggtttagaatccatgctccactgcatcgtagctatggtggggcatggattcttattattaattagtctcattccttcacttttgtctcacaccacctgtaaaacaaaagcaataatgcttacttcatggggtagtgaggaggtttaaatgagaggctacagctaatgctcttaatgagatgccttccttttcctctctggccagtgaggggtggatcatgtaacaacctcctttccctattcactcttcttccccaactaatcccctcagccactggcaccatgttccgcatgttagaggcatccttcctggggcagtgagacacatcctgaatcagccttgtcaccctaaaggggaccttgcaacgtttgctcgtgggtcgacaacaccacacagagctgacatgaggatgacatgtgacaagatgacttagagcctgctaaatgaacacatgagctaaatgctaggtaccactgtgctttccatgagattgttaggcagaaggaaaacactgaatctttgctctccaaagttttgatttgaattcacacaggcaagattcttgtcaatgacccagaatcacttaagccccgagggggccatgccaccagcacagcagggccagatcatgaagccccactgggatgcggggttgggggctgtaagggtctcgctgtcaagatgtggccccaccagtgctaagtttatagtgctccaaaagccaggaggggggttaagaaaaaaaaaatgcaaaaaacaagaattaccatgccacaaacatgaacctctacagaacctagaaaatgtgaaattgggccaggctcacatctgtagtcccagcactttaggaggcagaggtgaatggatcacctgaggtctggagttcgagacctcgtcgctactaataacacaaaaaaattagccgggtgtggtggcatgcgcctgtaatcccagctacttgggaggctgagacaggagaatcgcttgaacctgggaggtggaggttgcagtgagccaagatcacgtcattgctctctagcctgggcaacaagagcaaaactccgcctcaaaaaaaaaaaaaagaaaagaaagaaatgaaaatgtgaaattgttaagacaatttggagtttaagggaaaagcacatttttgaaagtggaaaatagatgagaaacataaatacatttgctacgcattgttacagtctgttattgatatatggtcattttgttataaagaaacatttaaaaggaggcatgtttcacctgttaacttgtttacttcataagattctcttgttgggtagatttacagatttaaggcactgccataaatcttttcaaaacaaggaagattataaacaaggtaattaattaattatttaattaattcggcaaacaagtcacccattgacaagcctagaaaaaaatgccacccaatgtttgttttatcagttttcttttccagttttggaagggaaagcccttgaaacaaacwtgaccacacgacccatatgagtcctcattgtaatgtttttccccaagcacccacaattccaggtcctcccaatttgcttccagttcttgcccaagtttaaactcttaaccaatgcctactatctgcagcctcaaagggagctgagtacttgccaacagacaccgccacctcccctccctgaggttcctgccttgcgagagtgtgtcatgtggctgccagggcaaggcagaagtgtaggaaaaggcacatctcacaggttgtccaggaggrttagagcaaatatgtccagagcagtttcaagttgactatagamccaaggctccgagctaattaatagaaagtgaagcaatgatagtgacagctcaaggcaagggtgtgaagctcatgtcattcggtaaagacagyccaaggaaaaaggacatttacgcttgcaccttatttgctttgcagactaacacatttctgttagaaatatgtctttacactccagagagatgttacaaggtgtcggcctgctactaattacagcaagcccgcactacagctaacaatataactctaaattcacttgcttctgattacctacctgtcatatgaaaggctattcttcactccagttgaacaaacctattagatgtctggtttcttgatgtttaactctcacaagcaattatctccagcttgaaatgcccttttgtcttctttatacaatcactactctttcttcttagaaaacacagtttaaaccacttcctcccttaatccatctaaactaaccccatctagttctggcatccatgcaatcaatagatttagcatttacttagcaagcactaccatggatttctctgtaatgaaaaagttaatcctacatatgccttatatgtaatcttgagcaggttctcctcttttctgggcctcggttttctcatctgtaggaggataatactccctacctcatagggttgtttctgagaattaaacatttatttttaaaaaaacagctttattaagatttaatttacatataactcaagtgtataactcaaatgttttttagtatagtcactgttttgtaaaaccaacatcacaatctaattttagattttcttctccaaaaaagaaaccctgtgtacattagcagtcactctgcattcctctcccacctccggcctctgcaacccccaaactaacttctgtctctatggatttgtctattctggacctttcatataaatgaaattgaagtatgtggtctctcaattcacatgatgttttgaggttcatctatgttgtagcatgtattaatactttgcttactggttgtttttttcctgatcaatattccattaaacatttattttgcgtgtgtgtgtgtgaggaggatacatatttcatgagtgcagagtgctcagctcagtacttggagacacagcactctgaaaatgtctgtagctttcattaccattggcattattactatcgttttgtcacttttgtttacaattgcactggtctccaccagttgattattaagctctagagcaggggttcccaacccctgggctacagacctcctgcacaacaggaggtgagcagtaggcgaatgagcaaagcttcatctgtatttacagccactccccattgttcaaattaccacctgagctctgcctcctgtcaggtcagcaacggcatgagattctcataggagcgtgaaccctattgtgaactgcacatgtgagggatgtaggttgcaccctctttatgagaatctaatgcctgatgatctgtcactgtctcccatcacccctagatgggaccgttttgttgcaggaaaacaagctcaaggatctcactgattctacattatggtgagttgcataattatttcattatatattacaacataataatataaataaagtgcacaatgaatataaatgcatttgaatcatcccaaaaccatcccccgctccaccctagtctgtggaaaaactgtcttccatgaaaccagtccctggtgccaaaaaggttagggaccactggtctagagagaaggagctcttcttacacactgcccagaaactgaggatgtgacagaagttcaacgagagctaactaaacaactaagtagcaacctgacaagggctcagacagctccaactaaacctacactgctgctgccgcttacaaaagctcattcatatgtgtgagttcaggcaaaaacacagtcgttatctgattctttaggcaggacattgaccagataaataaatatgtctgaatctgcagagaaataatttcaaaagggcttcagaaggagaaggaaaatccactgtagccagaagcatccaaaagcatcctgaaaacatgagtggaggaaggctgagcaggtgtgggctggggaggcaggcaaccccgcacagcagccagcacaaacacaaagcgacgacgcccactgtgctggggaagcacaggcagcacagtccgtgcaagggaaacgcggctccctacaaggtgttttcaaggttccggtttccccagagcacaaccctaacctcaggcagtgcacagttctcccaataaaagtcactcgcccgtggagatcaccgaacacctgaattgacaccacgggcacttccaacctgtgttcctgaccaccctccccatgacctgcctcccttacatcatttctgttttcctttcccatggtcctgtgacttctcttactctttcaaatgcaaaatgtcacagctgaagggaaggaacctccaaggatgatctgggctactgctttcttcttcayaggggaggaaactgagattccagagaggttggtaactttcccaaggttacaaaattagcagtgcagccggaactgaaacctacattgtgtgaccactctcctcctcccaaagcaatttagtttccaaytggacctcatctgcctacttgtttctcccccagcccccaggcagcccttcactgtggctgctgagtcatcaggatgagctttgttctcaagcaagccactgggacaggccctcatgtcttgagtaggacaaagtatatttggccactccccactttgtggtcaccctgctctgcctgatgcatgggcaccttctgcccatgacaactgtcattcrccctgaatagtctatgccatcacacctccttatggctactaacataaaaggtaagtgactaataaatggtatcatgaattaatatgaaaccttttatacagacaaatatttgattcctcagttatattttcttgggatcttttcttcccaggtcatagcagtgctgtttcaacaggaaatgtcatagcttgaatgccaggtgcactwtaaaaaataatctaaactaaattagcttttacacctaacgacggcctgggaataataaaggaactctttgaaaaaggaagaaagtggagaaataggaacacttttacactgttggtgggmctgcaaactagttcaaccattgtggaagacagtgtggcgattcctcaaggatctagaactagaaataccatttgacccagccatcccattactggggatatacccaaaggattataaatcatgctgctataaaggcacatgcgcacgtatgtttattgcggcactattcacaatagcaaagacttggaaccaacccaaatgtccatcaatgatagactggattaagaaaatgtggcacatatacaccayggaatactatgtagccataaaaaaggatgagttcatgtcctttgttgggacatggatgaagctggaaaccatcattctcagcaaattatcgcaaggacaaaaaaccaaacaccgcatgttctcactcataggtgggaattgaacaatgagaacacttggtcacaggaaggggaacatcgcacaccggggcctgtcatggagtggggggaggggggagggaaagcattaggagatatacctaatgtaaatgatgagttaatgggtgcagcacaccaacatgatacatgtatacatatgtaacaaacctgcacattgtgcacatgtaccctagaacttaaagtataataaaaaataaataaaataaaataaaaaaagaaaaaggaagaaagaaactaattgagcacactagaagtcaacagctgtttctccaattagagtcacctataacaagtgaattcttagcagggaaaatcaccttaaaatatccatgtcragttaggaaaaaatgtttcataaaatagctattaaattaattttcttgaattggcatgggacaagaagctatatagttcagttctgctaaacacctaaaaaactctgatatactacagmtacgccaggcaaatcgcaagttgttggggggcgattcccagaaatatgtgaatcacrattgtgactcatcagtttgggaaatttaggacatgatcactatcagtcaaacatgatattattatctgccaaatgtccaagatataaatttccttggaaacagctggcagaggtaggcatagccctttaattttcctaatttgtgggctagcagattttttggaatttcacatactagtatgaaagagaaataaatatgttttaattaatgcatacatatgcacagtttaaacatattcataatcaggggtggatccagtctgtgaggtctgcagtttataaaactagtcaaggggtagaggagtgtgtatggggtgttagggtctttaagaaaagatctcaaaggccagccatggtcactcacgcctgtaatcccagaactttgggaggctgaagtggaggatcgcttgagcccaggagttcaagacaaaactgggcaacatagtgagacccccatctctacaaaaaaatacaaaaattagctgagcatggtggcatatgtatctgctcacagctactcagaaggctcaggtgggaggatcacttgagcctgggaggttgaggctgcagtgagccaagatcacaacactgcaatccagcctggatgacagagctagacgctgcctcaaaaaaaaaaaaamaaaaaaaaactgcacaaaattatcaacataaaattaggtacagggtcttacaaagggcctgcaggagcgagacgccttgacgctgaagtgtcactagcttccagataaaacctcctggcccacaatgcatgcacacatcacagtggtgggaacacctataaatgaccaagatcaacatatttcattataattcccttcaatgccaagtatatggtaaacactttagtatacatttttgctgagtacacgtgactaaatagaaatgtttacaaattatgttgtcgagctgttaaatgaattccaatatgtggctttactacctcatcaggaaaacctgtatcccacagtcatttatcaggcagcaatgtctagcttatggaaacccatctgcaggttcctaagcaagyagcccrgattaatatcatagkgyagctagtcggtggctataattaaatgcagaagtggtattgagaggtgaagccagctggacttcttgggtcgagtggggacttggagaacttttctgtcttacaaggggattgtaaaatgcaccaatgagtgctctgtaaaaacacaccaatcagcgctctgtagctagcttgaggtttgtaaaatggacsaatcagcactctgtaaaatggaccaatcagtgctctgtagaatggaccaatcagcaggacatgggcagggacaaataagggaataaaagctggccacgccagccagcagagacaacccgctcgggtccccttccacgctgtggaaggtttgttctttcgctcctcacaataaatcttgctactgctcgctctttgggtccctaccatctttaagagctgtaacactcactgtgaaggtccgtggctccattcttgaagtcagcaagaccacaaacctatcrgaaggaaccaactccagacacaggctcaccgcaacctccacctcctaggttcaagcgattctcctgcctcagccgcctaagtagctgggattacaggcatgccccaccacacccggctaattttgtatttttagtagagatggggtttctccatgttggtcaggctggttcttgaactcccaacctcaggtgattcgcctgcctcagcttcccaaggtgctgggattacaggcctgagccattgcgcccggcccctgggtttctttcttaaggcttttggagctccaaggggccagggaagtgcagcttcaaccagcagcagccattgttctaacagaaatctgaaaataacacattcactctgacatgccaactcactacttttaattgtggctcattaaagatgtaaatagaagaattatgttcacctctactacaatttcattgctgcagtaaaattacaatgtttccttctatgcagaaagaaatacttcttctctgagtaatagcaccagaagtggaggcctatgattcaccaattctccaacagtaggcatcacatgtgactgcctgttgttggacagaggcagatggacagaacgttatttttttttaatgaaaagaaaggacacatcagttgaaagatgcaacaggcgcatctcattttattgcatttcactttgttgtcctttgcagatactgcatttttttttcaaattgaagttctgtggcaaccccgtgtcaagcaactccaccagcatcacctctccaacagcatgtgctcatgttgagcctctgccacatttcggtaatacagtatttcaaacttttgcgctgttatatctgttatggtgatctgagatcagtgctctttgacgttactattataattgttttgttcaccatgaaccacacaccccatataaggtaatgaacttaatcagtaaatgtcatgtgtgttctgactgctacaaagactggctgttctctctccctcctctcgggcctccttgtttcctcagacacaagaatattgaagttggccaggcacgggggctcacgcctgtaatcccagcactttgggaggccaaggtgggcagatcacgagttcaggagatcaagaccatcctggctaacatggtgaaactcaatctctactaaaaatacaaaaarttagccggacgtagtggcgggtgcctgtagtctcagctattcgggaggctgaggcaggagaatggcgtgaacccgggaggcggagcttgcagkaagcwgagatcgtgccactgcactcaagcctgggtgacagagcgagactctgtctcaaaaaagaaaaaaaaaaaagaatattgaaattaggccaattaataaccctaaaatagccgctaagcattcaagtgaaaggaagagtgagtcacatacctctcaatttaaataagaaaactagaaatgattaagcttagcgaggaaggcatgttgaaagctgacatatgtcaaaagccaggcttcttgtgactgaagggttagccaagctgtgaatgctaaggaaaagttcttgaagaaaattaaaagtgctactccagtgaactcatcaatggtaagaaagtgaaacagccttgttgctgatatggacaaagttagagtggtctgaatagaaaagcaaaccagccatacattcccttaagccaaagcctaatccagatcaaggccctaactctcttcacttctatgaaggctgagagaggtgaggaacttggagaagaaaagtttgaagctagcagaagttggttcgtgagatttaaggaaagaaatcttctccaaatgctgatgtagaagctgcagcaggttatccagaaaatttaactaagatcattgatgaaggtgactacagatttttcaacgtaggcaaagcagccttctattggaagaaaatgccatttaagactttcatagctagagaggagaagtcaatgcttgactacaaagcttcaaaggagaggctgactctcttgttacgggcaaatgcagctagtgactttagttgaagccaatgctcatttaccattccaaaaatcctagagccctaataattatgctgaatctactctgccagtgctatagaaatggaacaacaaagcctggatgaaagcacattgggttactaaatactttaagcccactgttgagacttaattgctcagaaaaagattcctttcaaaatattactgcttattgacaatgcacttcgtcactcatctaagagctctgatggaaatatacaaggagattcatgtcgttttcacgcctgctaacacaacacccattctgcaacccatggatcaaggagtaatttttattttcaagtcttcttatttaagaaatacattctgtaaggctatcattgccacagaaagtaattcctctgatggatctgggaaaagtaaattgaaaacctcctggaaaggattcaccattgtagatgtcattaagaacatttgattcatgggaagaggtcaaaatatcaacatgaacatcagtttggaagaagttgattccaacccccatggatgacttgagggtttcaagacttcggtggaggaaggaactgcagatgaggtggaaacagcaagagaaccagaattagaaatggagcctgaaaatgtgactgaattgattgctgcaatctcatgatcaaacttcagcagatgaggagttgcctctatggaggagcaaagaaagtggtttcatggccgggcacagtggctcacgcttgtaatctcagcactttgggaggccgaggcaggggaatcacaaggtccggagatagaggccatcctggctaacacagctaacattgtgaaacccatctctactaaaaatacaaaaaattagcccagcgtggtggtgcgcacctgtagtcccagctactcaggaggctgaggcaggagaattgtttgaacctgggaggtggaggttgcagtgagccgagatcgcgccactgcactccagcctgggtgacagaacgagactccgtctcaaaacaaacaaacaaacaaacaaaaaaaccagtggtttcatgagatgtaatctactcctgatgaagatactgtgaacactgttaaaatgacaacaaaggatttgaaatattacataaacttaattgatgcagtgacaggtttgagaggactgactctaactttgaaagttctactatgggtaaaatgctctcaaacaatggtgcatactacagagaaatctttcatgaaaggaagagtcaataaatgtggcaaacgtcattgttgtctaattttaagaaattgccaccgccaccccagctttcagcaaccacctccctaaatcagtcagcagccatcaacrtaaagaccctttaccaacaaaacgattatggttcaatgaagatgatcgttaacagtttttagcaataaagcattttaaaattaaggtatgtacttttgtttagacaaaatgttattggataattaatagactatagtatggtgtaaacataacttatatgcactggaaaaccaaaaaatttgtgtgatttgctgtattgcaatacttgctttactgctgtggtctataagtgaacccaaaatatctctgagtgtccaggcacagtggctcatgcctgtaatcccarcactttgggaggctgaggtgggtggatcacctggggtcaggagttcgagaccagcctcaccaatatggtgaaaccccatctctactaaaaatacaaaaattagctgggcatggtggcaggcacctatagtcccagctacttgggaggcttgaacccaggaggcggagcttgcagygagcagagatcgtgccactgcactccagcctggcaacaaagcaagactcccaactcaaaaaaaaaaaaaaaagacacaatatctctgagctatgcctgtgtctaaaaaattctgaactcttcctaacaggcactacagaaatgtaagcctggccagctgcggtggctcacgcctgtaattccagcactttgagaggccaagacgggtagactgcttgagcccaggagtttaagacaagcctgggcaacatgatgaaacctcgtctctacaaaaaatacaaaaattagccaggtgttgtcgtgcacacatgtaatctcagctacttgggaggctgaggcaggaagatcacttgaggcccggaggtcgaggctgcagtgagctgagattgcaccactgcactccagcctgggagacaagagtgagaccctgccaaaaaaaaaaaaaaaaaaaaagagaagagaagaacgcaggactatgagcctgcttgcagaaattctgagaagaattcgggccaaataggagttaaaataaagtgaggggaaatcaactccaaagaggcacatgaaactatgtctcagaaagagttcgatcgtttgtttgataaatgttattctcttcagttattaagaagaaaaaaaaatctgtatcttctctatgcccatattccaatacaacccagtttctgaaattagaatgagaacttattgataattactgacataataaagtattgataacaaatactttggaaaagaacagtatatttgaaacactgttattaaaaattaaattatgggccagacataaaaggacaaatattgtatgattccatgtggtccctaaaataagaaacttcatagagacacagtgtacaatagaggttaccaggggctgggaggagagaatggagtgttattgtctaatgaatgcagagcttctgttcgggatgatgaaaaagttctggaaatggatagtggagatgattgcactacactggaaatgtacataatgccactgaattgtacacttaaaaatggttaaactgggccaggtgtggtggctcacgccccagcactttgggaggctgaggcgggcagatcacgaggtcaagagatcgagaccatcctggccaacatggtgaaaccccatctctactaaaaatacaaaaattccctgggcgtggcggcatgcgcctgtagtcccagctactcgggaggccgaggcaggagaattgcttgaacccaggaggcggaggctgcagtgagctgagatcatgccactgcactccagcctggcgacagagcaagactccgtttcaaaaaaaaaaaaaaaaaggttaaaatggtaaatttatggtaaattttatggtgtgtgtgtgtgtgtgtgtgtgtatacacacacactatatatttatatatattttaaaaatcaaattaaggacactttcagagtagggtatctgatggatagcctggtccctgagacacagcgtgctgctctatgctggctctccaaagtgggtgagagtggtgccaggaacgggaagggatgatactgacgtggccactcaccaggaaagtagaggtcaccatgtccattttcgcaaagtgagcacagctgcaggtgagcaaagcctctgaaaatcagcactagcatggatgccaaatatttacgcttcctgatttaaatgcatcaagcagacttgatatttttgagactcttaacggtagatcatttttgtagagcagataaccactccaaaactgttcaagctaataaatacagatttgggccaaatttacataatatgtgcttgtaggttcactggccatgacctttgatagctgaaattgaactttcccctttcactaaatgtcattccaaattccaggctgtctttggaagcaaacactgcattgcctgttgccatgtgtcttttagataataaacgtgggttccaccagatggaagaagcaaagtgcttgccccaaatatctagggttcctgctaggtactcacgcccaaactgcatctactgtgaagagttagttgactttgcattctgacccaatgcaggatgctgggctcctacaagtggtttgtctgatgggctcccagagatggccagctgccagcagcatcatttagaagaattctggtcctgaggacagattattgaaaataatctatttccatttaacctctgcaaagtagaytgggtccttgtggggctttcgtttccttaaaagcaactgtgtacttgcttagcaacgtggacttaaaccagtggaagaaatacttagtggagactggaaaacagcaataaaagagaggttcaatagagggaggggtggtggccgactacagaccaagggtgagggagccacagattgaatcccagctttaccatctccaagcagcattactttcttcagtcccagtgacctcatccattataatattaataacatataattgaaatgcaaaaattacactctctacctttaagatttcctatggggatcaaatgagatgaaacatgcacaggcaaaaaggagttgctcagtaacttaaccagtttatttcttctttaaaaaggaaattgtacaaaacatgtttccagagttttgttaaggaagctttgaaaacagactccaccagtatttatggagtattcaccatactgacagtctaataccactcctctggggagcccaggatggtgcaagatgtatctccaaggctatgtgtggtggcacatgcccataatcccagcactctgagaggccaaagcaggagaattgctggaacacagggctccagaacagcctgggtaacatagcaagaatccatctctacaaaaaaaaaattaaaaatgagccaggtgtggtggcacatgcctctaattccagagctctgggaagttggggtgggaggatcacctgggctcaggaggtcaaggatgcagtgagctatgatgataccactgtactcagcctgggtgacagagcaagactctgtctcttaaacaaaacaaaagacgtgtctacmactccagggaagtgaaaaagcagataagtaaattcctgctaagagtgatcatgaccctctcctattcaacaaccttcagtggctctccgccacttaagaaaaaatggaattaatcccattttctcatctgtaaaatgtggatagctatgttgaagggagttgtaatcagagctaatttatgtaaagccccaaccacagaatctgatatatggcaccactcagtgaatagttcacactcaccgttatcatcattatcattaaatcagactatcttcctcccagtctcccactgttccacctcacacaccttaaccctgggctcaaactggtccacagctttcctcaaatatgctctgctctgcactctcccttctccacacctttgggcacacgccctcccgtgtggaatgccttgctcccagctctgtcaggtggaatcctagccattcttccaagtcagctctgatgcttcctccaagtcctcaccactcccaaatcagactaaatatcccactcctttgtgttcccacagcattgcttcgccttccctagctgggttcacctacatgtttcccctaacagtgtaaattcctaaaccaagtttgtaggaaggcatgaagaataaacactggaaaaattttaccacaaactgagtaactaacgaaattccatgaaagtgrtatgataataacagctaccattttttgaaagctttacgtgcatcaagactcatttaggtttttttgtttgtttgtttgtttgttttgttttttttgagaagaagtctcgctctgtcacccaggctggaatgcagtggcaccatctcggctcactgcaacctccacctcccaggttcaagcaattctcctgtctcagacgcccaagtagctgggactacaggcacctgccaccacgcccggctaatttttatatttttagtagagatggggtttcaccatattggccagggtggtcttaacccctgaccttgtgatccacccaccatggcctcccaaagtgctgggattacaggcgtgagccaccgtgcctggcctgttttatttttcttatttcatggattgataaactgagacccaaagagattaagtcacttgctcaacattacacagccattaagtggaagttcggtattcaaacccaggaagtttgcctcaagaacctacacttttcaacacatcatactgtttctcagcagcattataactatttattgtgaactacctaagaaaacatatggtggctgtaatcagttgtctcagggctagattttaaatctttgagatctggggattgaatatacagcacagtgactatggttaataatgatatttgtacacttgaaatttgctgagacagtaaatcttaaatgttctcaccatgcaagaaaaaataactatgtgaggtgatgaaagtgttaactaacttgatgataataaacatttcacaatatatatgtatatcaaagcatcgtgttgtacacaaattttgtcartcataactcaataatgctggaaaaataaaataaggccgggcgcagtggctcacgcctgtaatcycagcactttgggaggcygagacgggtggatcatctgaggtcaggagtttgaggccatcctggccaatacggtgagaccccctctctactaaaaatacaaaaattatctgggtgtagtggcaggtgcctgtaatcccagctacttgggaggctgaggcagaagatctcttgaacccaggaggcggaggctgcagtgagccgaaattgcgctattgcactccagcctgggcaacaagaacgaaactccatctcaaaaacaaaataaaataaaataaaactttgggatccatcaaggtactctggtctgtatgtagatccttaagatttcaggactagttcacttctcttttatatccttcctcattgaagctactattgcttacagacacttcctttcctgctacagccaacactaggcaaccttggagagggtacagccacaatatcaccacatggacccacacatacagtctgcagagggcagttcaacataagcacctactatattgagaggcaccttaggttgtaatgaaaagcgtcatagtctaattgccttcctgagtttttgtcactaggtacttaggatgcttctgagccctggctctcatgaaagtgcaacaaaatatagtcagtacctcctgatgaatgaactgtaacagtcaccaaaaaagtttgcaaccccatggctagtgcaacagaatagctaaagggaaactgggagtctgcacattcaccttagccatggtatatttcatgatggatcttgtaaacagctgaagggtcaggtttttaaatgaatgcaaagatcaggacagacaaaaatgaaattcagctaaggttctttactctgcaaaacagacaaggatcaacttacatgaaatgctaaaaaatgatgtgggtatttaatgtttccaatcagtggtcaatcaataaatgttagtgactgactaatttcttaattagttaatccagtgacagttcaccttttggcatgactttataaacaagaaaactgaaggctgggcaaggctatcatgcaaaaaaaatgacaaatctcaaactgaaattccccattacaacttattgactctaaagcattaataggaaaaaactctattttatatatgtatatacacatatgcatacatatataatataaaataatatatagtattaaataatcttccccgatatcaaaatattattttaaaagatgtgagcagcgtgcctcacacactagccttcataaaattccattctgaattccttgtcacacgtacaaatgatgattttctttttagtggtgtttttgacatgtaatattaaatagcatcctattccttcctttggaaagaacttttgaggagccgaattaattttggagatgacttttcattttatttaagccaagttatttttttctcttttggtattttagccaaacagaattcttagaaatgaaaaaaaaaatagtaacaagtatattcctagagcagagtagcctttcagaattgaaaatgttacatcaaccctttaatgttacccagtctttttaaattcccttaagaaaaaaataccagatattcmcaaaatgtggccagaactggatgtgtcatttatttggatttctgatttggccgacatggttatgcatgacataaaacagtttaaaaaaatggtttttagtaacttcataaatatggcttacagtgaagctgaagcaattctatctgatgttagaattttctaatgccaaagatatacgccagtagtttagtttaaatgatgtgaggctgaatccaactattactgtaaaaactgtttaaccaaaaacatctatttttgtaatttttatgaaatagtaattagtactaagcttatccaaaaacatttttaatatcttacctgaaggattatttctgtatttctaaatgggctctttcctttcttcttacctttgtaaatatttattaaactgtattatatgcaggaatgrgcttaacacttggaatacaaggtttaagataagtcaatttctgtcttcatgaatcatttaccaagatagctatatgarcagaaaattgcaatataatagcggtaacacagcaagaggataatttctgttttgtttttttttttccttgagacgagctctctatctgttgcccaggctggagtggaatggtgcagtctaaactttctgggctcaagaaatcctcttccctcagcctctcaaaatgctgacattacagatgtgagacaccatgcttggccaggaatttcaattaggcctcaacgaaygagtgggagtttaccaggcagagaacaagagtctcatgcgagargaaacaacagggacaggtgcatggttattatatacatagtatgtttaagaagaaaacaaatattatatggagagatggaagggatgggagtcacgggagatgagatttaaatggtaagttgataaggaattcctaggggccttagaggccatgcagtgaaattcacattttaccttatcaggagcagaaagctaacaaaatcctttcaattattcattttacttcaccatattcatttgctaccaaaggagtattaaaaaacacacacacacatgaattgccctaatattaaaaataccttcattcttgttttctttacttctagcctttgtggataggcatagatttttgtcactgctttgtaatcaatgtgtttgcacaattttgaaatatgaattttatacttaacatttgttgggtttagccgaaagctgccttcttccatattttaagtttggcctaaaggtttctccgcatgcagtgaaccgtaacctacctggatgtgtaaacaggctgtaacctattcttgtaccaatctctgggtttcggcgaatcacaggcagcctatcgttcaaaccctgttcaaataaggcgaacgctgagctgaaaccaatctggctgtttctgtacctcacttctgttttctgtccgtcgttttcctttttctgtctataaatcctctccaaccacacaacagcatgtcagaaatgccctgaatctattctagttcgggaggaaaggagtagagaggagctgcctgatttgcaaatagttctttgctgaattaaactctgttaaatttaatttgtctaaagtttttcttttaacacattagattatgagtacttttccatatttccacatactaccaaggattttcaagtgtaggagtaattcaatcagaccctttctttcatatgagaattctcaaaagagtagaataaatggaacacagaaagaaaagactttaagcaaggggcttcttggaagccactgcagcagtccaggcaagtgatgctgaaggtctgcaacagaacaggggcccgagagtggagaagagtgggtaaactatcatattaaagaggccaaactcagactgggggcagtggctcacgcctgtaatcccaacactttgggaggcttaggcaggcggatcatgaggtcaggagtttgagaccaacctgaccaacatggtgaaaccccatctctaccaaaaatacaaaaaattagccaggtgtggtggtgcgcacctgtaatccmagctactcaggaggctgaggcaggagaatcccttgaacctgggaagcagaggttgcagtaagctgagatggtgccactgcactccagcgtgggtgacagagagagactstgtctcaaaaaaaaaaaaaaggcagaactccagcatatgagctagggatgaagcagaggaagaggaggtgtccagcatcaacaaatggtgagctagtgaccctggagcccataaacgtaggacaatgacaaagtcaggtttagattcaaattgaagacacctatgtgatatccagctggagtcatgtgggaggaagttggaaatcattgagcttaaactctgaagagaaagagacagaaatactagttgtgtgtgcagagttgatgaggacatcatgatggtgcagatgccttcagggaaagcatgtgcggtaacaaactctaggtcactgcttttcctttttactccaacaatgtgcacgtgtgccagtttaattctgatttcttctgatgcacggcaaatgcctcccttcaaagctctcaaattgtcactaaagaaggggacctaccatgtaaatcagcatctgttttgatgatgcctgttagaagaaagyacattgcatttcctgaatgggtgtggttttactcacagctatacaaaaccacacagcttctctgaaggacttagacaatcattagcctgtgatagcatcagcaagaggaacgagttagaacacatttaacaaaaggcattttgggtgctgctttaccgaacactggcttaagtacctgaagggaactacactcctctaagctggaaagcactgcgagagctttctaacgatggtctttagtgggggtactggactggygcttttcctatttacatctgttccaaaagcagtacctatgatttaggtggctgtttggaaatcatgtacctctcaaggatgcctcacggtaaacgatacaagtgacacagtttctaactagacaaatgctcttttagaatcatttttttctgttttcctaccatggatggttacttgcaaggaaatagtttacatggaccactaaagacctccaaaacagaaatgccaacatctggcattttgctaaaatcctgtactctataattttttaaaaatctcgcccctcattactcctccacctgacatccttttagacaaaggctcaaagtcaattatgcagacaatggcacctttctcttctgtagctgacaacctggctcttgccttctgcaacccaaaaacagccctcgctcccatcagatggaaagaactacgcagaggaaaatctagtaaggtctccatgaagcacatattaaaagcctaatgtgcccttaacatggcttcagcaaactgggcttttttccttcacttagatgagaatttgagaagaatccactcggtaatacctttctgctcgccaaacctcctttagtcaaaactgaatagagacctgggagaagatacttctccaacactgggcttgaaggtgcttgctttttcacacaaactgaattcaggattgccacaacttctccaagcaaaactgaactaagcaacagccaaataaaagagaaaaagttgtcaaaaaaaatgtgttaatgcatttggtagtggttagattaacagctaataaatgtcctgatggccacgctggttcctttctaggctagctaagcttctgtgagttcttctgtttggattccatctaccagggctggagccaccagcaagggcattcaggaggtgcaccagaagcagcaacgccctgcaaatctctcctggatcatccaagaccaggcatgcccttgctggaacaagaggcggacggaaggagagggccaagtgtcaccactgcagtctgctaacattggattcaaatcctgaatccaccactgtgcactgtaggtgctttgatgtgcgtccactagagctaaacttgatccttttcagcagcgggaccgctcttctgccaccaaaactgacaacctgcgaggcctaacagctgaaagaaataccactcagaataaactgccaagggtagcaggtgtggctttgggagccaaggataaagcttctagtttagcacagtccggttcctatcctcagatctttctcctagcctgctgctccagcccagctcctcatagctgatgtccccactatcccaatcttagtcaggggctcctgtcattaccaccaacagagttagtgattacaaaagataaagagacaaaaaaagatttccaaaagagcctctgccctaggggaacactttacgtatttggaagaaagtgggtttctaaaggttcagagaatatgctgacctcacatcctgaaaaagctkggcaactgaagagggaatgcaaccctyatggcttgatgttgcttaggtcaacaagcaaatatttcctggacacctaccataggctcagacctggaccctttgctgtgggagaggaggcaaagaggaggatgcacaattattttcagatagttattctcaaacctcagtgtgcaaaagttaactaaggtgagtttcctgggttctacatccccagaacttctgattcataagcctggtgttgctgaatctgcaactttaataaacatatccaagagattcggaagcaggaggtactgggattagaccacccttgggaaacactggtctgtgatttgattcctgccttgaagccatgtgcaacccatgtgcaattgtgctgatggcaaacactcacagagtaatgcacagcagtacattctgtaagaagcaggccctaaatgtgatagaagttcataaagagagactgctcagggccgggcgcagtggcttacacctgtaatctcagcactttggaagrccaaggcagatggatcatgagatcaagagatcaagaccatcctggccaacatggtgaaaccccatttctactaaaaatagaaaaattagctgggcacggtggcgcatgcctgtaatcccagctactcaggaggctgaggcaagagaattgcttgaacctgggaggcgaaggttgcagtgagccaagattgccactgcactccagcctagcaacagacccaagactctgccttaaaaaaaaaaaaaaaaaaaaaaaargagagagagagagagaccagtcagtgaagtcctgaggattcagggaagactttgtaagtgacagccaggatttgtggtgaggcagaactttgatagagatagtccccaagcaactgtcttaatcaaacctcccgattcagcatgacaaagtggccatggcatacagcataaatggagaggaagatacaggatagaaaaccaccagcaaacaggtaaagagggttcctatgttgattacaggaaggatactgtcaccaggagaatcacaaaactagcacttccagataacactgtgtttgcatttgctttctaccacattcatgtggtttcctgcacttcataatttaatatttgtaagagaaaaaaaaatgctgttatgaaaccccaataatgcatcacttgarggcagaaagccagctgctaacaagagtgacatctgagcatcatttctgaagctctgcttcagaaaggggatgtttagtaagaaagaacaataataaatgctattcaacgtaaaacaaagtgtggggatccacagggttaacaggctggccggtaaccagtaacacaatgacggcaagcacagagaaggaaaaagtcagatcccctaaagaaaaacaaaggacagtatttcaaaagaagcctatctcacttatttggatataatattcaggccaggcacagtggtgcatgcctgtaatcccagcactttgagaggccaaggcaggatgattgctggagcccaggagttccagaccagtctggacaacatagcgagacctcgtatctacaaaaaaatggaaaaattagccaggcatggtggcgcgtgcctgtagtctcggctactggtctgtgatgatgattcctgccctgaagctgtgtgtacccctgatggcgtgatgacaaacactaacagaacaacacatagcagtgcattttatatgatgcaggccctaaatgtgacagaagttcataaagagagaccagtcagcgaagtcctaaaaattcagtgaagactttatgaatgacagccaggatagtcccagtctcatatggtcccagcacaagctacgattgcaccactgcagtccagcctgggcaacaaagagaaagaaaccccgtctcaaataaataaataaataaataaattaaaattaaatacataaaaatgaatataatattcataaagcactgtgccacatttttttttaatgttgcaagggaataaattatttactgcgggccgggtgcagtggttcacatctgtaatcccagcactttgggaggctgaggcaggcggatcacctgaggtgaggagatcgagaccatcctggctaacatggtgaaaccccagctctactaaaaatacaaaaattagctgggcatggtggcacgcatctgtagtcccagctactcgggaggttgaggcaggagaatcgcttgaacctgggaggtggaggttgcagtgaactgagactgtgccactgcactccagcctggtgacagagcaagactccatctcaaaaaaaaaaaaaacaaaaaaattatttactgcagatgctgacagtcctgtttgaccaaagggctggctgtcaaatgggcaaatggggccaggagggaccccccgaggacctggctcctttcctccacactggttgatacaatgagcccctctgcaaatgaccaccaagcctacacagaaattctgttgggcaagaactgaagtggataattatttaattcattgcactagagggaactgaattataaatttgcaggagaccttggagatcagttaggcacatacatctttaaaggcaagtcgttccaagatgatgagcaagttctccaaggtgaccaagataggtggggcagacctaggcttcaatttgaggactctgcttccaggtaatatcatgaacggggttgataaaaaaaaaattcctggaagtccacattatgttggtgtatgctctggaatgkttttatcatttatttatagtttagagtgtttgaattccaacccccagactaagactgtcattcaagggcccatgtatacttaaaagttactcagtaaatgtttgctgaacaggacttggaaacccccatcatctttcaccttgcccatcacaatagtcatgcatcatttaatgacagggatatgctctgagaaatgcattgttaggtgactttgtcactgtgcaacatcacagagtactttcacaggcctggatggtacaccctactacacgcctgcgctatacggtatagcttattgctcctaggctacaaacctggacggcatgctactgtagtgaatactgtaggcaactgtaacacaatggtaggcatttgtgcctctaaacacatctaaacatagaaaaggtacaaccaaaatacagtattrtaatcttttttttttttttttttttgagatggagtctcgctctgtcgcccaggctggagtgcagtggtgcaatctcggctcactgcaagctctgcctcccaggttcacgccattctgctgcctcagcctcccaagtagctgggactacaagcgcccgccactacacccggctaattttttttttgtattcttagtagagacagggtttcaccgcgttagccaggatgatctcaatctcctgacctcgtgatccgcgcgcctcggcctcccaaagtgctgggattacaggcgtgagccaccacacccagcccagtattataatcttatgggaccactgtaatacgtgtgatctgtcgttgactgaaacttcattatgtggcacatgactgtatttgatcacaagacgcaaaaaacttgccattaaattgaatctacttcctctcgtgcrattaatcccttatgttttcagctaaaatggagtatctggtagatgtagtttatttgctgtttgtgtgtttagttgtttgggtttgctttgtttttgcttttgttcttttttctaaccacaaatacattctattcagatcatactattctgcaagtttcagaaacaaacacataaagtaaatgcggttgctctctcagtgctctgtcactaggacaacattttttcaaatgtcctgttatttaggatgtagagaaatagcaatacgcttgaagaagaagttctggtacaccagtgaagtgatgcccgatgacatttaaagctaaaagatgtcaagtcttttggatgacttaccaaaaaccatttgtgtttcaagaccatccgtgcaggctgaaatccactctttctctcttgttcctggtctgcagcagcactaagtttgaagcttcaaaatagactctttcactatgctccagtatgctgcagtcaaacaaaacaaaataccaagtcagaatgaaaatgccacttcaagcagttagtggatattcagggggaaatccctggcctttctcaaatgtatatttcataacctcaaacaagcatgttaattatcaggatgaagccatctcactgcttatctacataaggtgccctaaaatactggaggtggggtgtgggaaggaagaaagaaagaaaaaaaaaacaagcatgacactgggggaggtagcaggtcttgaaaatcagaatgtacaccagtgggaatgcacttgcaaaatttcaagtttaccgattgaaagatgtgaataaagaaaaattcagtacgtctaagtgattaaagactgatgtgcagtatcaagggcagaaagtgaagaaagtttgcttcaaatgaaagactcagactaatcaactgatgtgaatactttttaaataaagagctattaagatggaacaaaaaagataaagcrtaagagagagaacattttccattttgccctataagtaggtaatgcatgggtttcccttgtgtgattcttgataaatactttctccacccaagctgaaaagcagtagttactttacacactgaatatgaaatgaatgtttaaaatatgcatgcctctttacccccactcagagcagctgataaagcctacacattagaacctcgtctgacaaggtcactctgaaaagttcctttctgccttgtgagcttttaacgctcacttgtcacaggctgttgttaaagcatcttctgatgcttagtcaaatccaccccactgtttgttttttgacaatggccatttgagagcctagaaacagtcttccaaaggtgtctgcctccttttttagccttttatgagctcatcctcatctatgttgaaaacccatcggctgactgtcatccagttccctgagtatggtggccacatcatacttgtaacyctaaactccataaatctccaaaggtcccacggtgawcatcaaagattggatcaagtgaccaagttrtwagaaagaggatatgctcgtatgcctcagaagcttactgtgtgaataactaattccttgaaagccttctgtaactattactttatggaatagtcaacctttttttcgggacgtttgaggagttgtgtctatctgtggttaaattcctgggaacactaaaaacttttgaggaggagaaagtgtctctccgttaatgtttaaacatgtgagttgagataatgccattcaattttccatctagccggaggaacaactgcctgaaaatggcaaaagccttttttattttttggatgctatcagtacccacagaaaatggggttgtaaggattttattagttttatgtaactcagctcccactcaaatgtgtaaggcaacayactgatagaaatcaacataagccaggaagttcaaagcatgacaaactgtctttactttaccrgcttggtaaaaacagaatttggagagaggaggaggatttaaacaagttcactgcaagttactggcttgtatcaatcttttcttttttaactaaaaatatcttgctgcatttctcttatttgttaccaacttcatatctcgaggtattctataattggaagaggtccttgacgtttcattccaatgtcttctgcaaaggaacctgctgacccagggaggttgacatacctctttttaaagtcatacagaaagttaatatgtactttgactggattctgggttcaaccactcatgctcattgacgcttaatggacataaactcatttaatgaaatgtaatgcggttttagtttgaaaaatttaccagtagcatgatacttcctcatagtactctctttctgttttgtttttgccataagaaaataaattcatttctggattatattattttcaactrtcttgcagcaaaatcgatctgggagaggcagaatggtcccatttgttactttaacaaccttcaccagctgccaaagctaggtgtccagaaaagtaaggtttatactattcatacagaaaaaaaaaataaggactcatctaagtgacaatattttccattcttacttatatctgtagatgtgaaggagttggaagtgattcattctgtgatttatcgctgaccttcatttgcacatactacaacagctatgaggcaactcttatcaaaagaaaacaactgaaaattctacacacttctttttaagcaataatttcaatatgcttccctctttcagcaaactctttatcaataccgttaataataatcaacaaaacaaactggcttgggtttaatctctgtcacctatcccttcttgtttaccatttgaagttatcataagcaaagataaggccaaaagcccaaaaagcagaagagaaagcacaggggcctagggcattcacagatatgcctgcatatgtgaaagttggctatattttaaaaaggatctcactccagagggttttccaatttgatagacattttggtgaaaattttctgaacagttataagcaacagcagcagcagcaaagtatgggatatcaacaacctataaacagtgacctgggagtcatgaaatatactttttagtcttaatgttgtagctaattggacttttaaatgtaagtcacggccttttaaataaaattagttcctaatctatcaaataaaggaacttattaaatgtttgccataattaattctcaattataatttgtttttacatgtatttgaatgtttcaaatcaaataaaatcataacaaacacaactatcttatatgatttactagacccactaagtatatctttattcaaaaatgcaacaattagacacagattgcataataagagacaaacaggttctcagtagaatatcaactcagggaaaaaagaggtttattttgttttggktttttttttttttttttttttttgagacagagttttgctctttcacccaggctggagtgcagtggagtgatctcagctcactgcaacctctgccttctggtttcaagcaattctcctgcctcaggctcccaagtagctaggatcataggtgcccaccaccacacccagctaatttttgtatttttagtggagacgggatttcaccatgttggccaggctggtcttgaactcctgacctcgtgattcacccgctttgacctcccaaagtgctgggattacagatgtgagccaccgcacctggcccaggaaaagggtattgtaatcaataaatagtgctgggaaacctggctcttcgtttcgaaagagattgctatcttacaccatatggaaaataaattctagatatataactaaacatataaacatgtgtttatacaaatatacatatatagcatttattayacatatatattattttacaaaatatagaaaaataattttataagcatgaaaggccttgtagrccattgtaaagataccgacttttaagtaaaatgggaagaccagagataatttttaatgcagtagtatcatgatctgccttacattttaagggctcatttggtctgattgtcaggaatagaccataaggggatataaattaaagcacaagttactgttataagcagcctgyaggatggcttccagtgatcccacctcttggaattcatgcccttgtaaagccttcttgagtgtggactggatttagtgactcaattctagcaaacagactgtggcaaaggtaatgggagatcatttccaagactgggttacatgaagatggtggcttccatcttgggatcttgcatcctcttctgggttactcacctgggggaggctgactgccaggctgtgatgcagtcctgtrgaagggcccacatggcatatcactgaggcctgctagcatctatgtgagtggatttggaagcagatccctaccgcccccaccctatccttcagatgaaacgtcagcccaggttaacaacttgactacaacctcatgaaagacttggagctagagacacccagctatgatatgcagtgattcacacttagaaaaactgagagataataaacacttgttgttttaagccactaagatttggagtaattacttacacagcagtagataactactacagttacaatgtatgaaacactcttctgggaactttacatgactttttacagtgggagaaactgagccccaaagaagttaaatcacctgttcaacagcacacatacatggtagaggtgggactcaaactcaggccatctgactccagaaaccaggttcttaatccctgcatcacactacccctttaagaaccatttttcctactttaggtgtgcatgcctgaaatttgactttccactgtagaatatgctaaaatcacacaatttgcacaagcaatgaagcatctgcatcttcatcaaacttcttttttttttttttgaaatagagttttgctcttgttgcccaggctggagtacaatggtgtggtctcagctcactgcaacctctgcctctcaggttcaagcaattctcctgcctcagcctcccaagtagctgggattacaggcacacgccaccacgcccagctaattttttgtatttttagtagagacaggatttcaccatgttggccaggctggtcttgaactcttgacctcaggtgatctgctggtctcggcctcccaaagtgctgggattacaggcgtgggccactgcacccggccattcatcaggcttcttaacctgccacatagctctacaattcttgcatctttgataccttaactatatcataagctatattcagttgtcaaagaaaacagaaaggtagcctcttgctgtttgaagagcaacctcagtatggttcttccatttcagtctggttaatttgcgtcatttaactattagagaatttccagcaccatttgccaacgctgtaataaatagtcctataaactgaatgtctttttgcaattgtaaagggttttccctgaaactactcagtggtaaggaaaagaacaagatactgaataagatagccacagtattttctgtttggattttttttttttttttttttgaaatggagttttgctcttgttgcccaggctgtagtgcaatggtgcaatgtcggctcgctgcaacctctgcctcccgggttcaagcgattctcctgcctcagcctcccaagcagctgggattacaggcgtccaccaccatgcctggctaattaatctttagtagagacggggtttcaccatgttggtcaggctggtctctaactcctgacctcaggtgatccacccacctcggcctcccgaagtgctaggattacaggcaggagccaccgtgccyggctggatttttttttaatataggaaaaaatcaattttcagttggcaatagaaagtcactaaggattcaaactgtacgaagtgtttcagtaggaaccggcaagaccaaaaaattttttaaaaagaacttttgaattatataaaatacagtgactattgtccctataattattataacaaattaagatgtttctattctttctgtggcatagacatgtgaaatacagaaggagaaagaaattctcgctgcactcctgcctcaatacaaatttagaatggcactgtgccgggaagaaactggtgctgggtggtgcaagtatcagtctcatgtcttaggaagatgatgctcatcacgcagcagccaggagcatgttttttaattttttatttatttatttatttatttatttatttatttagagacagggtcttgctctgtcacttaggctggagtgtagtggtgtgatcatagctcacggcaacctcgaactcctcractcaagcagtcctcccagctcagcctcccaagtagctgggattacaggtgtgacccatcatgtccggccaggaacatgtttttgatccatactgatggaatattctttattttggtctgactcttaggattgtacccacaaccaatggaaactaaagcactggaaagaaagaatcataaaaagaaatacaacaaaacccactgccatttctaaatctttctgttacccaaagtgactgtgttttattaaaggcatgtgatgcatcaccgaaggtattttttgccatttaaaaataccaaacagtagtaacagctcaacagctaggctgctaccacttaacctgcaatttggacaattttgtggggatgaaattactttgtcttatgacacatggagcagatgctactaattaacacacaaaaatgtctaaaacagagctttaaaaaaacatatgcatttggaaacagaagtagaaacagcttcaaagagtataagcaaaatggcataatacaatgaatgaagagtatgtttttttaagaaagtcaatcagattcgcaagtgaattttataggcctctctctaaataaagtatggatttgaaggaaaatgtcttgcttttaatttttttgttaacggaaagagggcagcccatatcatataccagccggtacgttccataggatgttatattccattgtggaacattatgttgtgccaaaattaaaaggaggataaaaaaaggttgggataatttgtttttaaaggttgggataaatttgggaaagactttggagggtctcatatgttcatgtgtattgtaaatctatgaggggagaaagcactcatctaggcccaaaatatattttaccacagaacactttttccagaagaaaggtgaaaccagtggacacagggtgtagacactgaccagactaggccagtggtcctcacacttttggtcctcacacttaaaagctccttgggtcctcaataaattttaagagtataaagtttcctctatactcctaaaatttattgaggaccccaaggaacttttcattaggtagatcatatttaacaactattataccatattagaagcaaaattgagaaaaatgtaaaatattcattagttcatttaatagaaatactaatatacccattgcatactacatgaaataacatctttatgaaaaaataattatatttttcagaacaaaaaagttagtgacaagagtgagatccatttagatttttgcagctctctttaatgcctggcttaatggaaaatggttaaattctcttctgtgcctctgaattcagttttctgtgatatgttgtttggttgaagtatgtggagaagatgtggccaatagtttcagcaattgtggatattctttttttatatcataccaaaactcaataagtggtagtttcttaaaggggagcagcaccatggaatctgaagcatagaaataaactctaagtattcttttatattaaaattcattagtctatcttgaactttggatggatctttagctatgcatgattttgtaacatcataccctggtcatttggaaaattatattagttcagtgaattatgcaaatcttccaaaagttgacacatttcattacacaatatcatcacacatcatatagcctctgaaaaactccgctgtacacatggaagagaatgggaatggaataggtaaataatgtcttagtattaccataaaaataatcttgatcttacagatgtccctccagaaaaggtcttgggtgggggtgggggggttcccaaagtgagaactgctgaccaggcagacattctaaaccccacagatccctactggaagtaaaagcacagaactctaggtttccttctggcctcaatttccataattcccaccatttgtcctcttggggatcactgagtacaacctaacaaagaccattaacccatgtggtcaagaacatgagataaaccatgagggcaccagagggaagagttatctgtgggcggaaaactgtatttacttggattctactaggcaagaaactgtgagaagtgtgcatttttaattttgttttatttttatgggtacatgatcgttgtgcatatttattgggtacatgtgattttttgatacaagcacacaatgtgtaatggtcaaatcaaggtatttgggatacccatcacttcatttctttttgttagggacattccaaattcattcctctagttattttgaaatatacaataagttattgttaactattgttgccctattgtgctactgaacactagctcttattcctactatctaactatatttttatagccactaaccaacctctctttattcctccctcctcactaccctttccatcctctgctaaccatcattctactctctgtctccatgacgtcatgtttcttagctccctcatatgagtgagaatatgtgatatttgtctttctgtgcctggcttattttacttaacataacgtcttccagttccagccatgttgttacaaatgacagaatttcattcttttgtatggctgaataatattccactgtgtatatgtaccttattttctttatccattccttcattgatggagacttagattgattccatatcttggctataatgaatagctgcaacaaacatgggagtgcaggtatctcttcaatatactgatttcctttcttctggatatatacatgacttttcttttctttctttctttttttttggagtctagctgtgtcaccaggctggagtgtagtactgtgatctcagctcactgcaacctctgactccctggttccagtgattctcctgcctcagcctcccgagtagctgggattactggcacatgccaccacactcagttactttttgcatttatagtagagacggagtttcaccatgttggccaggatggtcttgctctcctgactttgtgatccgttcgcctcggtctcccaaagtgctggcattacaggtgtgagccactgcacccagccatgactttttttttagcaaacactttcttccaatctaggctttaagaatctagttaaaatttmttttaactaaaggaataaacttttaaagtacatggaaagagattcagaaagacctttttcatgaaatcaattcatgaagtaactaggtaaattataaatcattatctatttagwaagaaaatacgcaaagaactactaaacaacactggttatctttgggtgttaatggacacatgcaatgataatagctaacattcacatgttaagcccttgagtttcattatctcctctaagccctagaaccatcctaggcagtggacacttttattacccgccttctaataaataaagaaatggaggtgaaggagctacataatgtacccacaagtgacagattgaggactccaacctccatccacctgagagcaaagattctctatctcctcagtctgctgcctcctttccaattaatagttgactgaacttcggtagattcttcctctggcaggtattccacaatcatgaaacatcctcttcactttcttgtttcaaagtgaggagttggcttgatgaattggctcagagcccatcctaaaatatgtacgtgtcggtaagattcttttgcctccccaaagcagaccggttatcacatggaaaaaggagtctcactcacaagccacacgctggattctgtgaggttaaaacttttgattcttagaaggacatgaggatagagcactgatgttctgtaaacaaaatgatggtctgtaaacaaaattcaaggtatcctcagcccagcccgaatcccctgtttattcctctgaaagcacatttatgaaacaagctctgcaaaaatgccagtcatctctaaggcaccacagtaaggcaaggagctatgtagtgttatccttttgaagtgctttctaaacgcttaactcccttgggtcagttgattcaccatccacctctgtcccctttgcttattatttctctcacctcagatggctttccttctgctaacccacaatcgttaaaaacatactgaacactttctagattattcttagtcatttttcaatgcccggctcaagacatttgtctttctataaccactgcagctcactctttccccaaagtgcctcgggccaggactcccatcaaggtgggcttacctatgtgctctctgaccccctgtaatgttgcctcatttgtgtgagtctcggctttcgtaactattaatagatgacagatgttcttaaaaccttctagagaaatctctcaaggcagtgcacatagtgccagatacaaaatatcatgcttgctctcatttttctctaattgagtgaggactaaagaacactggcatgttttttttgtttttgttttcttatttttttgtttttattactaaagttttagggtacatgtgcacaatgtgcaggtttgttacatatgtacacatgtgccatgttggtgtgctgcaaccattaactcgtcatttagcattaggtatatctcctaatgctatccctcccccctcccccaaccccacaacaggccccagtgtgtgatgttccccttcctgtgtccatggaacacaggcatgtttttaacgttgattttatttttaaacatcttgccttttggtcttgagagtcaagatattagccatgtaattgaaccagaagctttagatattattaaagagaacaggagtctatagagttcagccaagggtgcccactgagaagctccatgctagtttatttgtgactttctcagggaagagaattaggtctgtcctactgcaaactgaaatagaataaagtaggatagtatactaactcttggcaaaaaattctcagccattcttaatgacatccatacctccagttccatgccctgttcaagcatttcgtatacctctgttttcagtaggaatgccacaaactggtatggagcttttattattttattttattttttattttattttattttatttactttattttattttgagataggggtctatgttgcccagtctggtcttgaactcctggcctcaagcaatcctcccaccttggcctcctgggtaaggatctttgtaatgaatattattatttggatgacagactgcaggaagcccagaatccaccccattttcttggcatcataattactctttgagaaattgtgctgtacactttgtataaaatgagagcatgtaaatcaagcaataataacaacaatcctcccatagtatgtcaaactcacgaggcatttccttctcctccaaaccctcctttctctcagacaaaccaagtaattgaagacatgtattttcaaggaacatggctaagagcagactgtttctttaccacatcaaacttctgtgcagaagttaagaaaggagaatcactctaatgcttattcctaatgactgtgatagactttctgccttgaatggtgcatttccatttgtaagctccatttatagaatcacacaagtttttgccttcctctgaaacctaacaccctgatcttacccttttttgtatacatcactcttggtggaaattttcaacaaccacaaaggtgggggaaagggcgtggcgtacactgactccttagtcatgtttcctgatgttgccattttagtrtattttaagtatttacttatggcaacaattatagttcacaaagcactgttctctttttccatccggcagacccccttggtgtgctctactacaaaaggcagttttctgaatcactgctattaatcagtaaagaattgatgtccctatttggtgaatagcaaactgctcctattgctctctgaactgaactgaacaatcttttttttttttttttttttttactttaagttctgggacaaatgtgcagaacgtgcaggtttgttacataagtatacatgtatcacggtggtttgttgtacccttcaacccgtcatctaggttttaagccccaaatgcattaggtatttgtccaaatggaactcagcagtcagcaaaatatattaaatttgtcagttctagaataactcttgttgcctacctccacattcacattggtgatgtctactccctgtcctcactcctgagcacctgtcacctcagaccacaccactgaagctgaccaccccatgacccccaaccaagaaagggtaagccaacacagagaagccagggtgggcgctcagagagactcctgggtcyggtcacttctgtgggtccactaagcctgttcctggtaccccaatatcactaagtggcccaacttagaaatactagaatcaactcctctgccttcccccttattccacaggtcagcagggaccaaatcctatcaattctatttcctggttatgctacttgaatccttccctttctgcctctccagcaagtctggctctgccgtcactcacccctcgtgccctctcacccagatgtctgcctgctctcatggttctccaatcacctctccagaatgccacaaaagctggctctagaaaatacagatctgatccttgtactctccaaactgaaaaccatggtgactgcagtatactctccaaactatcactaaagaggaagggggatgtgaaacatatacagtacattactctctgcgatcytcctctgtgctatcaacaagcaagaaaaaagagatctggagaaaacagatgtggaggatacatgcagaggaccaagaaccaagattttattcagatttccttccgtttttacttggctcatctatattttgggtcagttttttagaactcaatttgacttttaatcattaaaaatgatcctagaagcatgtcctgtgaggcaytgccaagtcgcattgatgcatttcattactgcttgaaaggccacatattcaaaacactactagaagtcaggctaaagaaaataaaatgattttggatatttttaagcagttactaaaacagaaacaaatgttatttttaatctctggctcactgtaaactgacaagatatgaatatgaattttaccaagtaatgtataataactgcttctgctcaccacaaccacatgccaacaactcaattttatatttcatttcgatgttacatgtggaacatataatctagattacaaaccatcctcattacagtccatttactctagctaatttttgatagcatgacatcattagcataaaaaagcttagtgaataactattctgaaatttgcttttataaaagtccttgcaaagttttacatttctaaacaagtgaaaaccaatagctgaaaaattgtaagatgatgccataattgtccaaatgttgctcagttcaccaacaggcttactgagtaggttctttagaaagraatwctgccaggtagtttgtaataagaagtatctgctatggatcatgcctttacaaagtttacattccagcagggaggaaagcatgtacacaattggcacttttcttttctttctttttttttttttttgcagtaacgtaacagaataagagaagtacaaaagagctacaaagtctcaaaagaggaaccattttatgcaggagagggtatcaggaaagattctggtaagaaagtgggcctcaggagctaggcagatgggaattttgaactctaagtgtctatttctgaagtgaaactaatcaatgtgtttctacagttaacatttattgagcaactactatgtgtcacaaagttcataaatgttatctctaagcttccaaacaaacatggaatgacagcctggttacaaatgattaaaaagggactcacagagtctattaacattcccaagagtcattagttcttactgaacattagtaagccaaaggcatatttatatcaacacaagagttaatcacacagaaaagatgacagtcttaattcgaacaatcaagggtcaaaatcattatatattttgaatacgaatatggttgaatatgacaaggatttgaatacgtcaaaacacaaatcacattccctgacatgtaactgaaatgacaagaatatcaagaacttaagtacatgtttattctaacctctaacatcagtattatgcaatgatttcattttaaactaaatgattaaaatgtacctttgttttaaaataggtatttgagtttctacagcagtgtttctccaagtgtgagccaaggaccttttatgttaaatgaatcacaggagggtgctcgttaaaagtacaactcctgggccccacccctgacctatttaacatactttaaggcccaggaatctgaattttcaacaggactaagttgtatattcaagtcctagggcctctggtctagagtttcctccccacacctttccccccaacacgtttccctcttgtttactcccttactgaaatgtgtctttgccaatttaaacaattacttttcaacatcctccaaatgttttctgtgtcatactgcattaaaagaaaaattacttctaaacactaaaattataccacaggaaaaaaaaaggcttttttaaaaacycatttttataacacttcttttgctacatctagctcaagtcagcaaaatgtggctctagtaaatgccttggagtctgtggtaggcacaacaagggaccttcaaacatacccacgtcctaatccccagaatcagtctgtgaattcgtggtaaaagcgatttcacagatgtgatgayattaaggatctggagatggggagatgatacaggtgggtccaatgtaatcgcaaggaagtttaaaagtctgagaaggaggaagaagtgtcagaggaagattcaactatggaaacacagcacagagagatgcaacattgatggctttgaagataggggaaggggccaggagccaagaaatacaatggcatctagacaatggaaaaaggtgggccaggcacgatggttcatgcctgtgatcccagcactctgggaggccgaggcgggtggatcgcctgaggtcgagagttcgagaccagcctggccaacatggagaaaccccactctagtaaaaatataaaatttagttgggtatggtgctgggctactcccagctacttgggaggctgaggcaggagaattgcttgaaccttggagacggaggtggcactgagccaatatgtgccactgcactccagcctgggcgacagaatgagactccgttcccccccgccaaaaaaaaaaaaaaaagaaaagaaaagaaagaaaacggaaaaggcaaggatatgaattattctctagagtccctacagagaatgagcctggctgacactttgatttcagcctggtgagacctgtattggatttctgacctgcagaactgtcagataaaaacagttgctttaagccacaaagttcctgataagttgttacagcagcaatgaaaaactaacacaggtgctttgaagaaactcaggtcacctctaacacaaaggccatggcccagccagccacccacatactttccggctttaccaaacacataaagacagaatcccaaatattaatttggcacaaatgggatatggcccgggtagtttattttcatgcaatgctgctacctcttttctccgtttccttccttatcctgctcttcccactcacgcctgcagcttacctcctcacctttgtcaaggcaggctgatttatcagcttggaaactatgagaaggaaagggtctaaggcagggtttctcaactccagcactattaacattttgggccagatgatccttggttgaggcagaggactgtttggtgcattgtaggatatgatattgattgattgattgatttttaaaaatcattcattcattcattcattcaagagacccctgactctgctgcccaggctggagtgtagtgacgccatcacagctcactgcagcctcaaactcctgagctcaggcgatcctcctgcctcgacctcctaaagtgctgggattacaggtgtgagccaatgcccccagccccattgcaggatgttcagcagcatttctggcctctactcactagatgccagtattgctaccttgttttcccatttgggacgatcaaaaagtgtctccaaacattgccaaatgtcctgagagggcaaaatggtccccagttgagatccactggttgacagcatgtggcagttaatgtggtggtctgtgttctctccatcagttccctcccatacatggaaatgctctaacgtgttttatatatatatatattcttacattgctgctggtctcattcaaatgagtctcccaaggattcagtctgtttgacattttaaaacagctcaaactcagaattcaaccacaggacttttttttaaaatggccccactatacttattcccagccacaggcaagggaaacatggcttttccacaatgacccgcagcccaacctagccaacaagctcacaattcatccatactgctgctacagaggcgacagaggtcagcacttgctatttgactgttacagagaactttcttttttttttttttttttttttttgagacggagtctcgctctgttgccaggctggagtgcagtggtgtgatctcggctcactgcaacactgcaagctccgcctcatgggttcaagcgattctcctgcctcagcctcccaagtagctgggattacaggcgcccaccaccacgcccagctaattttttttttttttgtatttttagtagagacggggtttcactgtattagctaggctggtctcaaactcctcacctcatgatctgcccaccttggcctccgaaaatgctgggattataggcttgagccaccacgccctgcctacagagaacttcctaaagttcactgcaactttattacctagatttcattaataaaaatcctttcaatcagaaggtttagcacagtgtagaccaaagagatcattcactgaaaggctggctctgatggcaaaacagatggtttggaatgagatcctgggaaatggccactgtactggagtaagaaatcaatgctcctagagaaacagatcatttcctcagcaagtttttgccaagaacatgacttaaacaaacatgtgaaaagatcctgttttgtgtagttctgaattctgctcagactttcaatttcaaaataacaaagcagtaaactggaaacatagcccccattctttctgaaatcttaaacagactgcagcttccaaggttggatgtgaaattcagaggcacacaactcttttggtagaaagctgcagcccagcagagctctctgaagtctagggggaggtgggtgtctgtgttgtagattggtgactttatagaatgtgcttccaggaatgtgagcatacacacccctggcaactgaaagtaaccaatggctttttaacagatccactttatttcaacgtttggagattaacccgcaatcaaatactgccgtatgagtccgtgctaagacttcatcatttcacattttctgtcaaaagcctttcttcaattgcaccatagtcccataaaatctgaaaatatcacatgactgaggatctaagagccaaggtcctgaatcacacaacatactcattagggaatcttctccctttccccctttcagatattttaaaattaaaacgaagggtggagggaatttatatgtaatgatattggcctgrtggcagtcaacttatggcacacatgaaggcgaaaggagcagggaaagttttttcagggagaggtggagatggagcctacatatatttaaaattggaggccaggtgcggtggctcacgcctgtaatcacagcactttgggaggctgaggctggcggatcatttgaggtcaggagttcaagaccagtctgactgacatggtgaagccccatctctactaaaaaaaatatataaaaaaaattagccaggcattgtggtgcatacctgtagtcccagcgactcgggaggctgaggcaggagaatcacttgaacctgggaggtggaggctgcagtgagccaagattgcaccactgcactccagcctgggtgacggagtgagactctttctcaaaaaataaataaataaataaaaataaaataaaattgtgatgcaagacactgccaaaggagaagcggacagggttatggggaaggaacatacacatcatcatacatgtctccaatatagaaaaatgctgcattcccaaatgctgcattatgaatgaaaacatcaaggcaggtaacaccatgaagcctgtgtctctaatctggctacccaaataaggctactaatgctcatcaacagggtagtattacattggtaagtgtgagtgagtttgcaattcgatgaaaaaaatatatatacaactgaagatttctaaaagataattcactaacttacattcacccttttacatggctagtcaagaagagcaaaagaatgctcttacatggactgagactcaggttttaagaccctgccagatttaataacctctaactttttaccttgaaagttactgaagtatataacacagttgtataaaatcaatgtacaaagtagtacattatttcaaaacccacaattaacagcctatgaaaaccaactctttctggtattagcactagtttcatacatccttttaaatgttagggacattgaaacatcttacttcttcattactgagtgcctactttgtgctaggccctgaggatacacatgagtaaaatatggtccttgcactctccatctagttgtggggaaaataaacaaacaatggcagagtatgccacgattatgaaagaggaaagcagtctgagtggtggaatggattcttcttcctataaaaagaatataaaattgggtttcctatcctgattcccaactcacaaattaaagtttcggttatggactgcttgttgtgataaaataattttagtatgattccttctggttggaaacatcttcctaccagatttaactacaaaactgacctctactctggaatgttcaactggccaagaaaagtgtyacatcaacaccaatcactttttttttttctattccatcacaagattggggatatcattgtgttcctttcctcttatgtccactgaaccctctgctgtattttgtagcctttcagatctaggcgtttgtctcattttgctgtttcattttattttcacttaactagttaacactttttttaaaacaatgaatgaatcatgtctgtagtggccactgcgagcaaagcaccatgggaaatgtaaaaaggaacaagaggttgtccttgtccttaaagatttccaacctgagtcagggagacaaacatgtaaacaaacaatacggtgtgaatcaaggggaatgtgggtgagcgctgagagatgacgagcaaagaactctgctggcagagagctcccagctgcaacacaggcattaattacgtgtgctctgggagaggggagtcttctattttttgattcccctccccagaatcagtgctatttgaaaatcccaygtaggtaagaggacagggaggcatacaaagcctagccatgttatttttacaagtcaaatatgctactgcgtttatctaatacttagataaaaattatttttcaggccattgcttattgaattttctctctgtgtcctcatcattaggtcaggagtggtttccagtaggtgctccacaaagagcaaaaagatggggatacaaaacttgtatagtagaattttttttccaagtcctatttatctcatctgttttgcctgtatcttgcttcattcacaccagaaaaagctgacacatttgtgcckttgtctgctgaaggttagtcttcatgaaatttaacatgaacatttgtcctttcaagcagctaattcctttttaagcagctaaatgttcacctatgtctttcacgggatgactaattgtgaatgtaagcaagacaactgatgaaattcagatataattgtttacaattttctattactgctcttaattcattctgtttctgtcaactatcataccctattttctatatttacagtgcacttgaaattgtttatgcaacttaaaaaaattaaatggtcatctgaaaagtgtttggtgcactcgaatgagatttttttcttgcaacttttatcaggggctgtttgcctaaaaacttgctgctctagccaaaatgtttttagcacaaaattctagcaataacctcagagctatcttttctttgccacttaattttaccaacagcaaaaagaagggaaaaaaaagtctcttcattttgccattgcatggcaaaaatgcacattaacttaactcttctatggcagaaatacaaatgaaatatgtccaatgccaatgtttaagttacttttaggatttccgttgactatcttattttttcataatctgacttcttggatatctattttaattccttttgattttgagaaaatgtacatgtttgtaccaattctaaagtctcagccaactattcaatattttcagcgatttaggtaaatcttacttcaaattcttactaacaatgccacatagtataccaatcattatcatttttattctatcttatattagaagatggcttttaagccaaaatgttattttcttacagttagtttgatatgctatgctcacagagaacctggctgtcttttggctgggatgttcccagctaaaaatgagaaatcagagacagaaagctgagtaggaacataggatgtggaattaagattgacctttatagaatatttttatcattcctaagagattggaatattcagcatactaataattttctgatttaaatataagtagacatcaccatattaatttcaccaaaaaaaatgtttaagttaatttatcaaaaggaaggcagggaaagagaaaaagaaaggagtgaaggggctgggtgcggtggctcacgcctgtaatcccagcactttgggaggccgaggcgggtggatcacctgaggtcaggagttcgagaccagcctgaccaacatggtgaaaccccatctctacaaaaacatacaaaattagctggctgtggtggagcatgcctataatcccagctacttgggaggctgaggcagtagaatcgcttgaactcgagagacagaggttgcggtaagccgagatcacgccactgcaccccagcctgggcaacaagagtgaaactccatctcaaaaaaaaaaaaagaaaggagtgatggaagaaaagatggatggatggatgaatagatggatggataggtgggagggtggatggatggacaaatagatagatggatgaatggatgggtggatggatgaatagatggatggaaggatagatgaatggatgggtgggtgggtggacggatgggtggaaggatgaatagatggatggatgggtgggtggatggatggatggatgagttagtgggtggatggatggatggatggatggatggatggatggatggatatatgggtgggtggataggtggatgggaggatagatagatggataggtgggtgggtggatggatggatggatggatggatggatggatggatggaagaatacaagggaggaaggaaaaaagggagaaaggggggacagaagtagggaggcaaagagaagggaaatatagtggagtgagtttttatgtgggcggttaagttcaaaagttaagcaaaagtcatacatagtcaaaattaactttgaaaatcctttggctttcccacaagacactccactcaggattttatgtatactgcacaatcctttactgcacttttcatgtacactgaagtgtgataactattgggttagactacaagaaagaactcaatggaagaacacatgtaaaagtctgtacattcaaaccattcctcttttaaaattaagtattgtatcactacagttaaacggggggattagataaagataagtaaaatattggtgtttyccagcaagtattacttcattctgttgtaatagtaagcttctttaactttaatgaatattaacaaatgtactgttgttaaagttaaaggaactgtaggatctcctattgagttcataatgtggtaatattaagagtaatttttaaaataatttcttttaaagataaatatttaatgtgattgctatattatctgccttttcaaaaagttaaagcacatagtcaagtaagtgtcaaaaatttgccaaggcccaatacacctttatttttctttcctagtttttcactgtcttgaagtcttttacccacagtctcccatattcaatacagataataaattctatcagaatgtgtaaagttcaaataggtatcagaggctgctgccctgcctctttgctctgtactcttgtttttttctggtgggagcagaattggcctgtgtagagggtcaggggtagacccaggcatctttgggacactgtaactaattatcacaacatttgctttcagaagccccagaaaggccccctaccccccaaacatgtccttctgttccttccttttctttcttttccttctctaatctacagtgtgctgagttccaaagcaaattctcatccattatacttttcagcttcttttttgaaacatacattcctccgggaggattaacaaactgagatactaacaagctgtgtggttcattcatcagacccttcaagggaagaaggacccagggcagctctgacactggggcaggggtgaggcatcacccaagagagagcaaggggcaggttccagaaaacaagggaaaccagttactgtcctatgctccaactgcctaaaccttaaaatgaaacaaatacaagtaatgggtgtttttcactgttatatacaaggcagcctattggccacataattctwaaacaaccagaaaaaagctgaagtatgaccatcaatacgggacatggaacatgccaaaagatcgaaagattctttcttcyccctctttaggactaaacagctgtgggcataaagaaaaaatmaattccattattttagaaagcataatattccacccttcattatttctttgagaatggttggaattattacatctacgagaggttagcctctatcgattgagtgatttcattaaaaaaattaaaccagtgattgagctaaaatgagtggccaagctacaagaccaaaaattgtgtgtggtcaacaggtgagaggaatgtggaatataggagctacctaatcaattccaaaggaagggagacatgaygatgatgattgttatttctccccaccaatgggacagtgctccagtagaccccaggatcttctatttaatsgctgttgtaagactctatctctgttcctcttggaagaaaaggtgccactgaggacaagggaacaagaatctgtgtcaatcaacaatgcccctgaagtaaaccaggcaggtccgcactgcacagtctcagctgtaattctatcccaagaaaccagagcacaggaccagagccacacttaagcctgcagtgtagggtgacgccatggggccacgtgacagcctgcctctccaaagctgttactgtcagtagtatttagaggaaaggaaaaaagttgtaacaagtgtaacacgaacattaaggaataccaagtcagagccaattaggacgataatttggcactcctgcctcatgcatatgaaaaaggatccgccatcaatgagcaataatgcatgggatttgtgggaatgctctaacttcaatacatcaaagacgctgctgcacacctccgtcttttttattcccattagctcacccttgtctggatgaaagagctcagtgaatcaactgcttctgttgaactgtttatatatttttcaagtcatgattaggccattagtcactgagcatattgcacagtaaactagagtaactgccattatgcaacttcccaagaacatacagagagcatttacagtgaggccacagtgccagcaaaatgtgcaayggagactatttatcagcaattataagaactgtgcatttaaatgccaaataaaatatacacgtggcagatacagaasttgagggggaaaagatgcatgattaaagtaccaatatytgctcttctgaatgtattagagcctgaaaaygaaagtccccctgaaccagaagcgaatcttgaactcagtctcagttagcttggttagccgctgttctccttccgaatgcccccatacctgccaacatctgtatctgaacacactcaatgttgggtccaacataaggaatttcccttcttctttcttattaaagattcccaggcctcagcatcaccccctacccaagcacttggataattcagtagaggccactggggagaactttttttttttgagatggagtctcactctgtcacccaggctggagtgcagtgatgcaatctcagctcactgcaacctccacctcccaggttcaagtgattctcgtgcctcagcctcccaagtagctgggattacaggtgtgcaccaccacacccagctaatttttgtatttttagtaaagatgcagtttcaccatgatggccaggcttgtctcgaactcctgacctcaggtgatctgtccgcctcrgcctcccaaagtgctgggattacaggtgtgagccaccgcgcctggcctctctggggttttctgaagccacatagacttacatgtttgaggatttcccattcaaagtcctaaagaacactaatagaagaaaaagaaaggaacatgtaaaagtggcatttaatttatcaggacccttagtcacattcacatacattgcccatgataagccagtgacaaatataattgaagttttaaagtacrtgtgcaagggatcagctacttgaaacctcccagcaggaaaacaagaaataagggaccatgaggaagagatccaggtctccacatttactgtacaagtaataacataagcaagagacttcctaagagtgttttatagtattttacatggcaagactcttactctccagtctgttaatcctcactttcccgcttctattcatatgctttatatgtatttatttgttgagttatatattttagctgaacttggaatgacagttatttttaagaggctaccaacaygggtcaggaagaacctcagaaacctggctcacagttgctctggcataaaaagccttgaccgccaaaaccaaccagggagttgatgagatctaggtttccaaaacaccacgaaaaggcatcttttgctttctcccatctggccattaaaaaaaaaaatagttatttaccaaagaagattctttttgtaatacaatcaatcacttcctcctgtgtttagggttcaaatctagaagtccatatgtcagtctagcttasagcaaaatgtagctttcttcaccttggactagaacaacctatgagagaaagatggtgcccaatgggccagcacacagctgctttctaaattgacagccctgagcttctccatggacagtgttccaaaactaactgtggctgttaggataaagagggcagtttctcagcttcagtgcctttaaggttatttcaactttccacctctgttaactacgctgcagaaacttttgacactgaactctccttaatatccataagccagagatgttcattagaaaaatttctcactcctcatcagacagctgaagacctgagtcctttgtcttcccctattctggagatcacattgaagggatttttgggctacctgaaagtgtttatgacagacagactcttggattyaggcttaggacaagcaaacctttcatatgagtccttaaaaacagacagtgctctgtttgtaactttgaacyccattctagtacaaacatgcttggcaactagtgccggagggttaaccagagagttttcttcctggcaaattgctctgccgccaccatgggtattaacactccaggatccctgcaactttcccttcttcctctattcctcrtcccctgcccygagatattatctgtgcccaagctgcaggggttgaggtcacacatctggtgccaaggagctgtcagtgcctccrgcagtggcacagttcatggttcacggttcttctcctggcccctcccttggtctggcatgctgacagaaaattgttctttttttcatcatttgtctgtgactcagaggcagaccatggggccaacaaatccagcccatgatcacgcttgaaggcacagggatatctagaagtcatcccccaaacttcagggactattgtcaaaccttcttgggatacagacatatttctcagatctcctttggaaagatcttagacttgcttgacaggggtccttggagatgatcaaatccataaccctcctctcattttaaagttttctttattggattctttatgggagaccaagttccttattggattgcttcctgtggaccaaggatgatgttttctagggacttattgaaacttgagagtcggaagtggtctgaaggattgtttgatttagtggtcctgtgaactgacattgcctaatagctgttgtaacataaagattctcaggtctcagccccaccccttacccaaacccttggctaattccacagaggcctgtctcactctgtcgcccaggctggagtgcagtggctctccagggttttctgaagccacatttgaaaaccacttatataacccaacttcctcattttcctaaggctcagagaacttcggttatttgccaaaggccgcacaacagttaatgacaggcctaagacttccacccagttcccagcgtgctcaaccagtgatggtctttgcatttactttctgagcatttagcgttcagtaaaacctcaatcatttactctctgctaatagagataatgtattcttaatgaatatataattcaatttccttgaatgtattatataacctataaaattttaggatcttattagcaagttaaatgtctcctttcttaaattagggctggtttttttttttgaagaattaaggattcttcattaattcgccttcatgttctaagagtgataagagacttcacgggaaacaaatcagaagcacaagtgagtgaaattttctttaggacaacgaaagaaatggtcaatgaactaacatatttgttaacttctacagacaamacacacacacacacatacgtacatgcacacacacatacacacacaccctcccacttctggctccagaaattacttgttacttactatgtgggaaggaattcaaatgctttcactgttatgtcaggtcaatctgttaagtgtattgtaaatttttgccacatcagtatcccactttgatcactaatgccatttgtatattagcttgtaatacacactgatcataaagcaataaaactgcattttgctaaactttaaaaatgaaggctkttgcccaatgacactgacatcctcacgccaccacctccccgcccccattattcagaataagtggagtgtggagcattgggttttccctttctggggaggaacaaatgaatgagtaactagtgagggcatcttagggagttcccccgcccacagactatgaggcatcttgatttgaaaggaatacacaatattgctgctgcacccacaccacacgcacacaaaaacacttttaaagttgacttcttacataaaagccagcagtactccctgctagaatctgaagaaaagaatattattattactattattattttactggcaaggcctttcagggggttatgcttcattcaattgagcctaattgataaagctaacacatgtttacaggtaataaaaatgaagtactatctacatggaaacaaatcagggagcagaggaaccagtcattattcattctttaaactgtaaaaactaaaatgttctctaagcattatcaagtcctaaacaaaaatataatttcacaaagcaaagacattcattttatckttcaataaattattttaagagcagaaagcactgactttagctttactggtatatttatttgttatctctgttcttaaaaatggaatatttccagggacaaaaagtataagtaatacgtgattaatatggtttcatatattttaaaaatatctgacatttaaaacaatatcttaataccgaatattcttaatgaaaagttctgttttttttgaaaagtcctccatacatacatgtcaattcacaaaaatgcaaattctaaaaattactcaaaatgcattgtcttttcgcttcctgatactatattttgcagtgcatggtggcaaaggcaataaggtttttggtaataccttgttacacagattatttatagtcatcccaaaacatayataacacagagtcttaaattttaaaaccatatcagatactaaaatatacaayttatccttccaggtctttcctaaaaggtatacatacacttccgaagtagtataaaaaaaagaggtcatttcaaatctgataacgcactgtgaattagtgaattatcttaacaacactgtcctaattaagaccaataagaaagccatccatccaatattccacgagacagccaggcttcccgttgtgtaattattcacctcatagtggtccaccttgaaggcatgcaacacacagttttacgtggattatgccgaaaagagatatttatatagaagggaattacttaggacatgcggatgtccctaaaataaagattcttgaccactcgagctactcagtatttctctctaggctagaaacagaaaagattaaataacatattcatatgggaagtcaatttttccatcaatgaaaagcaagaaaccgtaagagcatttcaaggcaagatcttttaaagtcctacaaatatttaagtataacctctctacactttttaaaaatacagtttatttaaagatataaggaaagtccatcaaataaacaagaaatatttactgagaacctcctttgtggccaggattatgtttctatctaagtcccatgaacttggagcatatttacaaaattatttaactttataaagtatttcaatgaataatgcagtcttccaaaatgtgcatggggctgtaattccatctagtgtttacnatgacactataagccttggatggaattacaatcttaatgggaacaatcagagtgcactactccatatgctcagagaattcaggatgaactcaacttctaaaataaaaagcaccaagccattggcatgtaattacaaccaggaggccaagctgtctgcttgctagtatatgagaaatgctcaattgaaagtaccatctcaccttattgtagcaaaacctatttaatgtatctgaaaaacctcttcctctccaaaattaaactttcgactttcgtgatgagaaaatttccacaagggtctaccacatagaggtgatatatatcgggtgatgacaagattgtctggatgctaccaataaaatctaagaatcttctaataccacctacatgcacctaaacttaaactctgaaaagtacaatgtattaagaaacaggaaaaaaaatcatgctcaagagccctttgaaattactggcatttcttctaatttttgggggctagtctgacatttattagcataaacaaagcaaagtgccttgtgtccgcaagagggaaaaaaaaaaactttagagagattaaactcagagttgtagaaaaagtttagaaacggatttagaatttcgcaggaaaaagaaaagacagtgacactatgaatcagcattttcgtataagcagcctggaatcaaagaagaaatacacacacacacacacacacacacacacacacggaggatacagcaccgtgaagaatgaagacacaaatgcatacaaatttagtctgtatatttatatttrgaatacaaatggcttctacggtctttttgtgcctttatcatacctaactttatctggtactcatagaggtcaccaaagctgtataaaatcatagcaaccagaaaactaaaggaaacaaacacctctggcagaaatcctcaccaaacaaagtataaggcataaagaaactatactttcattggccacttttaacatagccatgcttctacctgtgaaggtatgggacaattccatgaaaactgagttcacggagggycctcctgtgggttatgtatcctgggttccagcataacccctggttgagaacttactattaacattagctcttcaatttattttcatgatccagggacttgtgtatattgtatcacagtggttacctaaaataaaaagtaaccagataggagacagtaaaacaatattgatgaatttccatgagaatgagacatatcatttaggagctttacttaaaaaccttcctgctaaacaaacaaaaaaggactaatgcgatatctgtctcttggggtctcccatgcttatgaattgagaaaacacacttgatataagtaaatgaagaaacaatagttgaaacagccctgaagtgacagaaaaaatggaagtagggttctaagctcaactccagaggcaaggtggtacagaataccagctggatgaacagttcaaagcttccctagttgagggtctctacctcaatgacagacaaaactcctaactttggctttctccatagagcatcaaccaaattcagtaatgatgaagtacctgcttaacactataggttgaataacttttgacaagctgtaacatcctgttggtggaaaatagccagccttgctcaacataatattgcaaacccaaaacagggtaattgtgcaaagagagaattttgtgtatgtcccctttccagaaaatattctgggtgacatccaatctgcttttacccggctcacttatttacaattggggctgcctaaaatgcaatgccattctaaaactaccaataaactattttgtgaaatcaagtttagtaacttgagattctcatttatgatatccctgacaaccaccaaaacctgattagacatctctctcctttgtctaggtgctttactgaaaaaaagcatggaaatagacttggagatgcatgtgtgtgtatgtgtgtgtgtggtgtgtatacatgtgtattgcatgtgtatgtacatatatagtatgaatatgtgcgcatatgtgtacgtgtatatgcagatgtgtatatgtgtactctgtgtgtgtgtrtgtgtgtgtgtgtccatgtatttaaacacactgcttttcctatatgcagcaggaatttcctatctggcatatgaagacaatacatactcttttggatggagctggtgagtcaggcagtgttttggaactgcaatacttgagtctgcrtgactcatgaggaaagcaagtctggggtctgggactgttgtatcaaaatgggaaggagtgggaaagaagatggctttttataatttaaatttttattttttatattgttgtaagtttttacttttgagacagggtatcactctcttgctcaggctagagcgcagtggcatgatcatagctcactacagccacaaactcctgggcccatgggatcctcccacctcagctcccgagcagctgagactacaggcaagagccaccacacccagtcaattttttcttttttttccttcctttttttttcttttttttttcttttttttttttttgtagagatggagtctccctatgttgcccaagctgctgtcaaactcctgggctcaagggatcctcccaccttggcctagatttgtatttttaattgacaaataataattgcatgtagttatgggttataatgtgatgttttgatatagctacatatactataaaatgattatattaagctgattaatatgtccatcacctcacatacttattttttataatgaagacatttaaaaacgtattcttttagcaatcttgacatttataataccttattatgagggctaaaaatgaataatattaataatcctgtacaatgggtctcagaaacttagccctcttgtctaactgaaacgtctgtaccgtttgatcaaccaaagatggcttttgttggcaattcaatttttttgacaaattcctcatttttgtcttcatttggagtttttatccattacaagagaggaagatgacacaagccagaatagaggaagatgaaacaaaccactcaggattctgaagggaacactgggttgggttttttttaattttaattttgatgtttattatttgtcttagagacggggtctcactatgttgcccaagttggccttgaactcctctgctcaagtgaccctttggctgggactgcatgagcacaccactgcatcaggctcatccagttgaggttttttaaaatactgtttttgctctgattgggtagcctcaaagaggaggaagagagtcatgatgagcttgattcagaatcttcagctctccactctatcagcaacctgccttccttcaagtctacttggcccagtgctgttattcctcctccactggcaactagatgtgtgagtgacattgattcctattaccagagggattaactccaaagttctcttgaaggttttacagttcttttccagcagttcctcattcttcaaaggtaattaacctcttgatgggcttacagcagaagcagtgttagaagtcccaacacattgatgatatgttataaaccaggggagaggataattggaaaatgtatttccagcctcattggaaaatatatttccatttattgagaaaaagtaactcaagtgtttaggaacatatgaatcacagaattgtagattggcagaggccttagaaaaccatgctatttcgacttctactaataatgagaaaacggaggtggaaagagggagagtgacctgccgagccacagttacccaaccagcaccaatgtagtcagtgctgcctggagcgagacctgaccatactgtggggcagaatctcccctccaatccccttcataaagcacgatgatgctgttcaaacacaacctgtgcctcctgtccttagagcyccagatttcattttaggagaggattacgaaataatgactaagctctgaaaactgagaatgagacaaaggaagaaagggagataagaaggaagacagtaagagagtcaacaagcaacttattgtagtgtttgcaatcactacttgtgcctttcattacatttaaatgcatgtcgaaatgacatgatgcaaccaccttcatgcattctgcagtgaaaaagatggtgccaggttggaatttcattgtaagtgtcgcagaaatatccctttggaatcaggtcccaaatcattatttgctccttttatcattgtcatcatcgtgtatcatggcaaagctccctgaggggaggagctctgtctgtcttgttcactatcatattccttacacctacggcatccatgggacaagctaagtaaaatttactgaaaggctgaataaaaacttccacatggaatgaagaagaaatatgcatagtttgaaaatgcatatgcagtattacagttttctgtaaaggaaaatgaaagaagacctgtttaaaatttaaaaccacattaaaagattgagagttttttgtatttataaaaagctgaggtatgttaaaaatggaaagcacctattaagctgttactgtcagtttcacctgttaagtaggtactattagttaagccagcatagttcctgagttgcaaagcatatacaggctgaagcacaatgtcaagaaaacatgttaaagggtggtaaataaatagccactgagaagatactctgaacagataaataagaaaaaagcaaatgtagttgaaataaatggaagctctaggcagtgtgtggacagacagaacaaaagtggtcaatgtttatgccttggcctgaatgtctgtgtgcctccaaaattcacatgtcgaatcctaactccccacgtgatagtattagggagtggagcccttgggaggtgccctcttgaatggaattagcacctttatcaaagaactcccccaggaactgctttgcctcttccaccatgtgaggatacacagagaaggtgccatctgtgagccttagaagaagccttagaataggccgggtgtggtggctcaagcctgtaatcccagcactttgggaggccraggcgggcagatcacctgacatcaggagttcgagaccagcctggccaatatggtgaaacctcatctctactaaaaatacaccgggcgtggtggcacgcacctgtagtcccagctactcaggaggctgagacagtagaattgcttgaacctgggaggyggaggttgcagtgagccgagatcatgccactgcactccagcctgggcgactgagcgagactctgcaaatatgtactttatatgattaatctatttgtaaccattgaagtaaacatttttctttgtgcttttaaattcaaacctctaccttagcagccatatcacagtcacaaattaactatatggcaagtaatctgtatgattactttgggttctcagatgacttgctatgtatttaatgaagtaaaattgtaagtcaagtcagatataggtaggtacaataatattaacaaatgtaatcaaaagatttgtctattttaaagactcaagaaagacaattatacccaattaacacacacattcatatgaagggtacaaatacctaatttttggaaaacatttcatataattttggccattgtaaatatataaataataataagaagaagaccactaccgccaccaccaacaacaaaaacaatagcaaccactttctaaaacatgaaggctaaggaataagcagtgtgctgggcactttacctgtattccattgtgttcttacaggtacattccatgttctatattttcactttagagatgtggaaactgaagctcaggctaagtaatgggcccaagatctcaaattggcagatctgggttcaaaaccttagtcagaacgagcccagacctcccatacaggcagaggtctttgcagatgggaagatatggatagataagctttctcctctacttaagctcagtgtatctgtacactgagtagccatgtagcataatggtggagtgcatgggctctggagccaaagctctaagttcagatttcagctccgccactcactagtgcatgccctaacttctctgtgcctctcagtggcctcagctctgaagatgagaatcgtaatagtaccagaagaactgatatctacctactaacagggccactgtgaggattaaatgagttactacacatacagcacaaagaacatcagagatgtgagcaaatgtttagtatcctttgaaatactaaaaagagcactgaatttgaagtccagtggtctccgccattgatctactgtatgagcttaggcaagtccctcaagcttcctgagctccactgtcctcatctgtaaaaatgggataccagcggccttgcttcctttccagaacatcacaagaaacaagcaatggaagacaaggtrtgtgaaagggctttggaagctaaaaagtgctatatataccatgtacatgtgaattatcgtcatcaactttcagcctctcaaagccaaagaggtcaatctctattccattctctcctgcctgagaatttaatactaagcatcagttccaaaacctggacactgaactgctaatcataacagaacacatgtccagtcacccaggacttgatcaaacagaactctattaactacctccttctgcacacccaccgtgagaacataattgatgctcatcatggccctaaagcactccaagactctgaagtaccttcagggaaagattaaattatgttcagcctagtttattatgaagtgtatttaattatactcaaattctttgaaaattggtgacctaggaaaagcacagagagtaagtcacaggctctctggtaactggaagcctctcctcaccagtccacccccagtcacccttcacagagttaattgtaaaaaatacagtccaccctagggtaggaaaaactgggattccgacacactaattataaaagtcaaaagaacttggccttgcctaatcttcaaggatcactaatgtgcagaaatacaaaagtcaaaacttgaaacaatgaaaaatttaatctacctaagatgcctacatgtttcaaatagacttttgttcttgctaagaatgaattcaattgtttgaacaaaaaataacacaaatatatcactatccgattatcagtactcaaaartataaaaacagaggagtaagttagtattatgctcctgagaagaggaaattaacatttagtttactgggtaagttttgtcacttcttttttttttttcttttttttttttttttargagacggagtctcgctctgtcgccaggctggagtgcagtggtgtgatcttggctcactgcaagctccgccgcctcctggttctagcaactctcctgcctcagcctcccaagtagctgggattacaggtgtgtgccaccacgcccagctaattttttgtattttagtggagrtggggtttcaccatgttgcccaggctcgtcacaattgtcccttctttaaaagaaattatgtctatgttaatgaggaacgtaacaaaataatgaaaggctaaaccgtattatggttgtaaaagcacagttatttactttgtttaaattatttcaacactgtagattatgttatcttttccgattagaaactgggaaacacacgtcagccttaaggactacatttcagagctgagagagaaacaagtggtcgtctacaataaccttctatccaactcacatctcctctctggagaattcctgataagagggtcctactacctctgtttgaacatctccagtgacagaggtttcactgctaaatcaatcagcttgttccatttttagacagtcctgattgccagaatgttcctcctcaagtggagtcgaactctccctagggttaacttccctcctgttcttagttcttggttgcgtactctaccaccacttcagtaagtgatttcacttcctgtcaggccctttgctagcctcactcattttatcagttaggtaatgactggcttctattcacaattgtcactgttattctgtgaaccacagtgaccattcttcacaaccacctaccacccactgaagtggtggctcttgggcaccatggctcttggggaccatggctctatggagactatgatgggcatggtcctaaggccattatgggatattttggactttactggggtcctgccatcacatacactgtttctctgagaaacttagacttacaatctttctgaaaaggayacattataaattagtatttctacttttgggaaaaatctgtttcatgagaaacaaggygtaatttatcactctgtcttttaagcagtcttatgagccaagtcagtgttttgatgcatgcataaaaattccatagctcctcctcctgcagtagaagcagaagtagcagagctggcaaacctgtagtatccagatgactacctctgtttcctggaataacagaagctgaagatgaacaggtcatcatctcccaggtaccacccaagtacccaagcaagcccaccaggtgtgtgggacaattctagagccctgggcccagcctaggacggagacagcttctgaagttcttagtctacatctaacaggcctgtctttcctccttgctgtggttaacactgaagttctagaaaatgtcctattagtaccttcatcttgagaggtsaatgatttaagaagagaagtgactgtatttatttttattttacccaatgtccatttgggcagttactaaacttaaaaatgcagcctgggcaatggaatgagaccctgtctttacaaaaaataaattaaaaacaaaaaataagtgtggtcgcacaagtctgtagtcctagctactcagcaggctgaggcgggaggatcactggagcccaggagttcgacactacagtgagctatgatggcaccactaccctctggcctgggcaacagagtgagactctgtttctctctctatatatacaaataaataaatgaataaataaataaataaaatgtaatatgataacatataaatatcacgtataccgacagtccttactttatatattaatgtcttatttaaccctggacagctctcctgggctctcttagccttcaccactcagaacatggctatgaatgcctcaggccacactggctaggtggagagagctaggaatgagaattaatgtatatgattcagcttagtgattttatcagattgattatctggtttctcttaagtttacagatataggcaaatatgaaaggagattgaagacatgacaaccaagacaagtagataggacagaggctgtggcatcgagaagaattatgagcttttgaggcatcaggacgctactatgtcgaggtaataacttcacagaaatgacaataagtctccaagaaaaaaagttaaattatattcactatatagtagcactctacttaggaagggaggaaattttataatacattttacaatgatttctgccngaaaatgttgagttttctcccctttctaacaatgtcagcattaatgcatttaaataatattctgagtaaatatactatctggaagcagttatttcaggagtctacaaaattaaatatttaaatctttactagagaaatatggaagtaagaacaaaagtgaataatcattgaggaactcttaagaattacggttttgcattctctgtgtagagaggaacctatgatgggaaaaaataaatttcctttttgacctactggttagtgctgtcataaagcccctccagcttaggcgacctgagagaatttttaaaaccctcttttcagaatagtggaaaaggttttctccccttctcatttccaagagaaaggtagtgttgaccctaaaagctaagagaggaaaagactagatgtgtgttgtggaatcctttctcgactcttctttctctaatattcttgctatataaacatggtagttccatcagtaagagttttaaggaagcgttggcgaggcttgctcactctttgggacaccacactgtcacaatgagtagcaccaacaccaccacgttacagtggaaacgccacagtggagctagtaacagagtgttagtattagcgggatgaatacacctgctggtgcaatttaggtgaatttccataacagaacatatattagttaattttgctttagattatgaattgggaaaattccttagcatattattagcatattatcatatcagcataacaacaagtattaaggacacaaaaattctaattacaagtaagtttttgycaccaaacttataatttccacttcttcaactatctgtttgcttttttacccttggacttgtctaagactctactcaggccttctcttcccttcaaatcccagttaaggagacgccatttagaatatagctgttgattcatctttttaacagcactcttttttttttggtacaaaaatctctagggcttttcttctttccacttaaatcctttttcccacccagtgctctctgaagagctaaggctaactttttccttttctaaagatcttttttttcctatgctgtttccccatagttccacccgcccctcccccaccctcttcatgtctcatataaaaacagcactctcactgggcttaatccccaaatgtttttaattgactcatttggtgaggctctccctagctaaatgaacagtctgccttttcaaaggaaccaaacatttcttccttctgagtattttaaactcttctaacaaagccaaacatggattaaacagcrttacataagtctcttcacagcacctaagttcaaattaggaatcaagtcccaataaccaatgggacatggatactgttttcaccaataaatagccaccccatcaagctgccccatcgactaggaagaggcccactcaggcacccggaagctttgccccagagagcagaatgaggtcccttcctgaaactataccactgctctgcagacatatctcacccacagtgctttcctattgccaggagcaccgggagggaatatttgcccattctaatcatcccttctaatggcgcagcaagagatcatgcacagaggtgacggggaaagaaagagcagtgccactactctgtggttaacttttcacctgtattgtgaattaactacactcattattcatttaaacagcacctaaagaaccttcaagtctaaacacatcactctatcattagtgactgttgctgaagaagggcttcactgaaatatgattgtattaacatgtgaggaagctgaaatgaattttctttagagcagctcatagtaccaaccactccctgcccctcccattctcactcccagtagctgggagatgatgcttcattgttctaagcttagacttaatacaacactgcacttttcttaaacaaataaaccttttgctaaagtggattaaaacatctcaacagctacggcacacatgcagtcattaaagactgttcagcatatagacagataatttccacagtrtatggtttaagaagttaaacagaaagttaacagagaaactgttcttgaagtatgagaatgattaagtggaaatgttaaattttcaaggcaaagtattttttaaataacctcaaaaattaaaaaaaaaaaaaaaaaaaagatcttcactgaagctaaaaagacatgaccaatgaaggaaaagcattaaattaggagtctggagtctggttttcagcctcagccatcaaacaaacaggctgtgtgttgtaggagtggtcatttaaccgcactaagcctcaaatgtttcctctgtaaaattagaacattaggttcaattaaagccatttaagctttaaaattctacgattgtccgtccaattcaataaaataaactgtatttaataatacctgctttttcaactaagctaattttttaaaaggcagaaaatctaaccagaaaagaataaaaaatgtttaacttgtacaacataaactttgtccagaaatcagtatctgctcttccaaagaaaaatagccttttgttttctattgttcagtgtacagcttaccactaagcaaggaataaatgtggggctacagttcatctgtatgtgccagcatgttactttcaagggttcagtagctccacggcagaaagaaacttctctattactcactattaaactgcatttcaaaacctacaaaaacagctccaaaattaagccagcaaaatgttgctgtcatccatctgaacctgttagaaatctcaagctcgtcatagaatctttgacctcaccattcaatgttttacaaattgagtaactatgtccctgtcatttactactaaaatgacaaaaataaaaataaaaggtaaagagaacactgaaggttaggagtaggtgaggatgggaaaagggaagaacaaacatgtccggctgaattcagagctagattccaagtgggtttcagggaggactgaagtcagagaactgcaaatgttgtttcaccatctgtttattcacagctttacctttgactcatcagagtgaggtctgaaaactgtttgtgggtcatagtaaaaagagttctgaaggacaatgtgacttccagggagaggtaagccaacctacactgcatgagccagcagagcagacactgaaaggtgataagaagaaaaagaagcacttgtttttattaacgtaagacytcaccaacttcctcagacttccccaaatgaaatgtcagactcgcatgattctgagtaagaatcaactgtgtcccttagaagaaaaacatcccaaattcagtgataatcgtgggccattctttttgaccaaatagattttgctcacgaacatttttttaatgtaaatttcccagtaggaagcaacacagtacagagttttaaaaaataaaattcttaatccgctcaggatgaaacacactacttaaaataaactgaatgacacctaaaatgatccgctgaatgaaaagaaaagctattccaagtcacaaaataaactattattaagccatggaagcttactctgtattctcactctccttttcagtgacatttttatgaaacacatgtggtaggcagtttgtgctttgcagcagagaaaactcaaataatgctttcccaattaaaaaaatcctggggtcttccaggaccggcccttccttgttctcctccatgctggtcaaactggcgatctggacaggctctttggagcaaggtgctcaactcttgaagaatagtattggcaaggacttggggatgtacttctctgcatctggggtgcagaaaagataagaacacagtccctgatttgcctctgcccctgttcttatgtttctgctggtgcatatcttgctgtgctctgcaacccccaccagccgaccccttacggccattcctactcgctgcctgacaacatgatcaaaggagggtggaagaggagagccaagtttaataaccttaccaggagatcagattgtctggggccaagcagaagtcctgagatagctgctgaatcctggccatttacagagcagcacaaaactagtcctgttccttttcctgccgcrgttgccatggccgacccaaacaatataccccagcttcagcctcctttggcttcctaaccgccacccacagacctccaaacgtgggcaggaggaggtgaaaactgctcaccgatgggaattgaggagctaggtagaggatggaaaggggatctgggctgcagatcagcccggagggtgtaacgtggtaagcagacgtgctgcttttagctgctaggctttgcttctgtgagttttcacctcatttctaagtggaaaacagatcttaagaagaaaaagaaaccagctaaaaacccaacatgggacaattactatcacctttaaactttggttttagcacctttaaactctggaatgaaccgtgaaccagcaaaacaaatggaaaaaaaaaaaacaaaaagcagcgacctcctgggtatggtaatatctgaacagaagcgaggtttgggaggggatgttggcatcagggtgataaaccctaggaatggcatacgtgttgtgacgttctggtttaaaacaagttcctatttgaagatgccattaaaaaagtttagatacagaaactacacaaagaaagagacagaggaaaaaagaagattaccctaaaaataaaccaccaatgaattttttatgacacatgttgaaactaacaacagactagcccagggaatggcgctcaggcgatggagcacctatgctctgggacaagcatggccactgtccagctaagcaagccattaacccttttggccattcacttcttcatctataaacggggcagagaaggggagaaggagtaggctgtctttaaattcctttacacacaagacagggatgccctctctcaccactcctattcaacatagtgttggaagttctggccagggcaatcaggcaggagaaggaaataaagagtattcaattaggaaaagaggaagtcaaattgtccctgtttgcagatgacatgatcatatatctagaaaaccccattgtctcagcccaaatctccttaagctgataagcaacgtcagcaaagtctgaggatacaaaatcaatgtgcaaaaatcacaagcattcttatacaccactaacagacaaacagagagccaaatcatgagtgacctcctattcacaactgcttcaaagagaataaaatacctaggaatccaacttacaagggatgtgaagaaccccttcaaggagaactacaaaccactgctcaacgaaataaaagaggatacaaacaaatggaagaacattccatgctcatggaaaggaagaagcaatatcgtcaaaatggccatactgcccaaggtaatttatagattcaatgccatccccatcaagctaccaatgactttcttcacagaattggaaaaaactactttaaagttcatatggaaccaaaaaagagcccacattgccaagtcaatcctaagccaaaagaacaaagctggaggcatcacrctacctgacttcaaactatactacaaggctacagtaatcaaaacagcatggtactggtaccaaaacagagatatagaccaatggaacagaacagagccctcagaaataatgccacacatctacaactatccgatctttgacaaacctgacaaaaacaagaaatggggaaaggattccctatttaataaatggtgctgggaaaactggctagccatatgtagaaagccgaaactgaaccccttccttacaccttatacaaaaattaattcaagatggattaaagacttaaatgttagacctaaaaccataaaaaccctagaagaaaacctaggcaataccattcaggacataggcatgggcaacgacttcatgtctaaaacaccaaaagcaatggcaacaaaagccaaaattgtcaaatgggatctaattaaactaaagagcttctgcacagccaaagaaactaccatcggagtgaacaggcaacctacagaatgggagaaaatttttgcaatctactcatcggacaaagggctaatatccagaatctacaaagaactcaaacaaatttacaagaaaaaaacaaacaaccccatcaaaaagtgggcgaaggatatgaatagacacttctcaaaagaagacatttatgcagccaaaagacaaaaaatgctcatcatcactggccatcagagaaatgcaaatcaaaaccacaatgacataccatctcacaccagttagaatggcaatcattaaaaagtcaggaaacaacaggtgctggagaggatgtggagacataggaacatttttacactgtttgtgggactgtaaactagttcaaccattgtggaagtcagtgtggcgattcctcagggatctagaactagaaatwccatttgacccagccatcccattactgggtatataccmaaaggagtataaatcatgctgctataaagacacatgcacacgtatgtttattgcggcactattcacaatagcaaagacttggaaccaacccaaatgtccaacratgataaactgcattaagaaaatgtggcacatacacaccakggaatactatgcagccataaaaaatgatgagttcatgtcctttgtagggacatggatgaagctggaaaccatcattctcagcaaactatcgcaaggacaaaaaaccaaacaccgcatgttctcactcataggtgggaattgaacaatgagaacacttgggcacaggaaggggaacaccacaccccagggcctgttgtggggtggggggaagggggagggatagcattaggagatatacctaatgtaaatgacgatttaatgggtgcagtacaacaacatggcacatgtatacatatgtaacaaacctgcaagttgtgcacatctaccctaaaacttaaagtataattttaaaaaaattcctttataactctatatttctctttataacctctatgaaaagtattgcaactaggtttgaacaaaatcatgtaaacaaaagacttggagactaacatcttaattttaacaatgactatactgggctgtgggggtaaatgtttcctttctttactcagtttaggaaactgtgcctataataaatagtacatctatggtgaatgtacttaatgccactgaaatgcatatttaaaaatggttaaagtgggttgggcacagtggctcacgactgtaatcccggcactttgggaggccgaggcgggtggatcacctgaggtcaggagttcgagaccaatctggccaacatagtgaaaccccgtctctactaaaaatacaaaactagctgggtgtgatggcgcacgcctgtaatcccagctacccgggagcctgagccaggagaattgcttgaacctggggggtggaggttgcagtgagctgagatcacaccactgcactccagtgcaggcaacaagagcgagattccatctcaaaaaaacaaagcaataacaacaacggttaaagcagcagcttttatgttgagtgtctctaactaccatttaaaaacttaaatctgtataagagagcaggcaaaacacgtcatggagcccacactgtacgaatgttttggaggtgcgcactgagttaaaaataaaaaacatggaatttattttcatttcctatctaatttggtctccagagcctgctaagtacagtttccatttctactcgggtrcaagagcaatggcttatttgctgttttacggagcagttccttaactatcattgcctctgaaccccctttccccccaagattgactgtcggtctacagaatcagttaagtgctacaaatcactactaacagctcctgcgaggcgctccctctaagaatctgtacagatcaaaatctcaagtgcttacttgcccagggactgccataatttgaggtgttgcttctttttaaagtataaaaaacagatgctctaagctgatgaaagtaaatgtcctttcaacacatctcttccccagcacttgaaaatcttaccaacaagaagtacttcccacactccggtcggtaatttctgcacttttttacttttcctttgaagccgcagtgcaatgtgattctacacccggggtgaaacaattccttacggggagcctttggagagcaccccaaacaagggggctgctggaatgcaagtgtgmtgcccaaggagactgtctccctacctcagagctgaagtgatcaaatgcttcttgacaaccttcacgagaagtctcaaagttacacacacaggcttagtcatttccaaacgtctgcaccaatgtgcagaacttttcctgccctgctctctaagcactcagcgagggggagggggcacagtgcaaaacagaccagtgaatcaagcgaccacactgtagccctacaccagtgctctgcaggcccccttgcctcctcaggcctcacctctctcatctgtaattgcagagattggacccagtgatcctaaaatccctacccgctggagcatcctagagtctctgtgacaggaatatgacacgattgcccacagcagttcacacagaagccaaaatccaggtagtgagcctatgctgggacttgggggagggctaaagtgaaggcagggatcagagggtgagcaaagaaattaatgatacagaattccagacctacttcaaacaatagccctactgttttgctcaccccacactaggttttagggaaagagatataaggatacctcgtcctctgtgaggtgactcaacagtcacagacccaaactgaatgatggagcagaataaaatcaagtaacgtaaacatccacatagtccaattctttccctgatccagtaagtcacggaggcckttcctgagatccagacctatttatacaagtgcaggctgggcacctttccctgaaggtcccactcagttattctcttggttccccaatcacagtgagtggtgtcatttgcccattcacttcctcaaaccagacactacccccctctcattcacttccaatatctaattgctcatcaagtcctctaaatccttgcttattaacatctctccaatctgctcattctttccattctgtcacttccattgccactccaaactccatgagaacaaggggcctgtctgtcctggtccctgcagaagccgcagcacacagacctgtgattagcatgaagcaggtgctctgtggttctggaattttcaacattcctctgtcacctggatttctacaacygcttcctctctggtctccttgcccaccacctggtcccttatcatgccaaatgcatagcactaacagaatgaaatcactgaaacacacacctgacttttcacatccctacagtccttgaatgggtctacaytgcatccaagataaaatccaagatctctgcttggctcacaagggcccttcctgatcgagaccctgagcccctctagcgstgtcaggcctgcctcactatggacctaccaaactgcttattgctccttcagcccatccatataatactattttgcacttcttttgtctttctttgcccaagcttgtctgaacaactcctcattctgaaaagcttggactgaaggacgtgctctgcaggccttctcagcaccctttcctccagtcaacctgactcaggtatgaaacataccctaccataatgcttaacagagagcaatgattaatctgttgcctgctcccagtactagaggtcaaagaccacatcctatcttatgctttagcctcaatacctagagcagaatttggcgcccaatacgtatgcaagaaatctttgttgaattaatgaagaatggagaaagagaacgagaggcagagagaaagaaagagatcttaaaggaagagagggccgggcacagtggcttatgcctgtaatcccagcactttgggaggccgaggcaagtggatcacgaggtcaggagttcaagaccatcctgaccaacaaggtgaaaccctgtctctactaaaaacacaaaaaaatggtccgtgcgtggtrgtgcacacttgtaatcctagctactcaggagactgaggcaggagaattgcttgaacccagaggcggaagttgcagggagccgagattgcaccattgcgctccagcctgggcgacagagcaagactccatctcaaaaaaaaaaaaaaaaaggaagaaagaaagaggamcctgagagggttaagtgctttattcagggctaaataaaccagactgggacaagaattcaggcctcctaactttctctgatggatcctccttcttccaatccatcccataaatgcttttcaaatttctcttctcttcactttatcacctcccgctagacgagcttctacagttttcctaacagctattgaatctctatcatctcttttcaatcctagacttagatatacaattttctgtcaccyaaatgtctcattggcagctcaaattcaaaagatgaagaaatgaaataattacatttctaaccaccctgccaccaagaaaaagaagttgttcctcctcaggaatctgtaggctcctcctccccattcatacagtcagcacttgagacagaaatgtggaagctagcatctattttttttaattactatttctatactaggacatataccatgtgttttacatgtcttatttcatttaaaatggcagaaccaaaccttggtaagaagtcatgcaaatggaatttgggagggaagagaatagggtaggaaaaaataaaagaaatctgatatttgccactcatacttggcaccatcaacttctctttttctcaaactcctcaaatacaacaccaaatcctcccggttgttccaccagtcctcccactctactgccactactctaacctggaccctcctraagtctcctggacttcttcaagagtacctagatggtctctctgtctcaataacaccccaatgaattctatcttctactctgcccagagaatgaactttctaaaagtagaagtcatttccggttccaagcaaggtggggaagttgcacaggctagaggttgatgcagctgagagttattttccatgtgatggggaattcttgcaggaaagaaggtggttaagtctcagtagagggaacactggggaaaatagcagactgagagagaagaggtccaatggttatgagtgggggagtcatttggggaacttaaaaattactgataatttttagacataaaggaaactatgtttatacctaagtttatgtttaaataaaggtataaatgctacaagaataaaataaaatgtgttcgggaaaaaaaatccgatctatccaaaggaagaaagcaaaacaaaacaaaacaaaaagtaaagccaagtagaaaacattaaatgaagctaaaaatcttaataaaaatgattacagtaaggataactgggtataaagtcactaatcaaataacagagacaagtacagagctatgcacaatatgtggtgggggggaagaatgatgcgtgtaaaatgaacatatacaatgacattaaaactaaaagatttttaaaaaagaaaatataagcaaaactaaaaacaaaaaccaggatagcactctgaatatcagacaaaatggaatgtaaggttaaaagcattataaatgatggtgagggacatcctaggctggcaaaaggaacaaccaataaagatgattttataatcgtcaacatacatgcatctaacaaaatggcacagagatatttaaagcaacaactatgaagagaaataaataaataaaaatgtaattagcaattaaggaaaaaagggaagcttaaaaattccccacatgtctgtgaattaaaatgtttactactagacaattcccagaggaaataaaatggaaatacaaaatactgagttaagtgacaataaaagtatatatcaaaatttgtacaatgcaattaaaacataagggctcattgcaagacctcggctgaagtctgaacagcctgcagctcttgtagccatattcagatcagtagatttctagacaaggagaattgccagagttaaagggtcatttcataataattaaagggtgtacttattaggaagatacatcaatcttaaaagtgtgtgtacctaggaacagaaaaaaaaagaagacgttcaaatcagtgatatagagaaaggaaagcaagccaggcacggtgtctcatgcctataatcctagcactttgggaggccaaggcaggtggaacacctgaggtcaggagttcaagaccagcctggccaacgtggcgaaaccctgtctctactaaaaatacaaaaattagctgggcacggtggtgcatgcctgtaatcccagctacttgggaggctgaggcaggagaatcacttgaacccagggaacagagtttgcagtgagccaagattgtgccactgaactccagcctgggtgaaagagcgaaactctgtctcaaaaaaaaaaaagaaaagaaaagaaaaagagaaaggaaggaggaaggaaaattaaatccaaagtagggaaaaagaaggaaataatgagaagaacagaaagcaaacagtagttcattctttgaagagcttaataaaattaattaacatctagcaaaactaatcacaaaaataagtaaatgaaaacatcattaaaaatggaaaaggggatatcactataaatcctacagacactaaatagataagaagaaagtattactaaaaactttatgtcaataaatctcacaacttggatgaaataaaaaacttcttgaaaaatagaaagcataacttaccaatagcaagaataaacagaaaatctgaagagttggctatatgttaagaaattgaattcagtatcaaaatccttggcacaatgatgatacaactgttctgtatcctgattgtggtggtagttatgcaactctacacatgttaaaatgcatagaattgtacatcaaaaaagggaatattttactttataatgtttttaaattaaattttaaaaacttagaaccttcacacaaagagaactccaagcccaaagatttcactgtggaatttcatcaattttaagaggaaagaaaatcttacataaattctttcagaaaatagtaaaaaacaggaggactccacgaatacattttatataatcagtawtactaacactaacactaaaccctagtaaatattatataaagaaacaaaattacagaccaatgttcttaataaacatagtcgcaaaaatacttaataaaatgttagccaaaatatccagcaataggtcaaaataacacataattataactggttcttatcccaggaactcaagtttggtttaacacttaaaaccaatcaatataattcaccacataaagcggaaaaccatatgacatctcaacagaggcaaaaatgaactgcacaaaattcaacacacattcccgataaaaacaaacaaacacaaattcttagaaaaaagagaatagaaggaaacttcgtcaatccaataaaaggcaaatgaaaaacctacagctaacatcatgatgaaatagtggtgaaatagttaatactttccctgtacgatcagaaaaaaagtcctggttatataaataatttgaaaaggatgatttaaaaattacatgtattatatcgaaaagcataaagtacaattaaattttaccaaagatatgcaatgtctctgcaggaaaaacagggaaacattcctggcagaaattcattaaaaaggcagagaaagatataccgtgtttttgaattgaagtttcaatattgttaaggtgaattttccttaaatttctctcttatgattcagtgcaatmtgaactaacttctaacaggcttttttggggggtagggggatttatatggaactctgaaggagatagaacaccaccaaaataatcttgagggaaaaaacaagacagagaggactcacgctatctgttttcaagatttaccataaagctatttagtttttaattttaacatttattcattatttttgaattttattgttattatttttgagacagggtccagctcagtcacccaggccggagtgcagtggcatgatcacagctcactgtagcctcaacctcctgggctcaagcgatcctcccacctcagcctcaccagtagmtgggactacaggcacatgccacctcacccagctgatttttgtatttttagtagagatggggttttgctatgctgcccaggctggtctcaaactcctgagctcaagcaatmtttctgcctcggcctcccaaagtactgggattacaggcatgagccaccacacccagcctattattattatttttaatagagacacggtctcactctgctgcccaggatggaatgcaatgctgcagtcactgtagcctcaaactcctgggcccaagcgatcctcccacctcagcctcccaaggtgctgggattacaggcaagagccatagagcccagcccatgacagtattttaatcaagacaatatagtattgacctaagtacagactgcagatcagtggaacagagagtcttaaaacacatataaaaccaaatgatttttgacaaaggtgtgatggcaatttcataaggaaaaaaaatcacttcaataattgttgtttcatacattttaataaaaactgaatcttgacccctacacctcatatcttaatttgaaatggctcatatacttaaatgttaaggctaaactagaaatcttccaggagaaaacaggaggataacatcttagcaaccacagggtaagcaaaaatgttataaagacacaaaaagcatatatcttaaaaaatgataaattagacttcattaaaatttaaaggggctcatcaaacacagtttaraaaatgaaaaaggtaagccaaacactgagaaaaaattcatatttctgataaatgacttaaatccagactatataaagaactcatatatatacacatatatatacacatatatatatacacacatatatgtaagttcacaaaataaaaaaaaaaaaccayctatatctatatagatatagrttgtttgttttgcgacacrtcattctgttgcccaggctggaagtgcagtggcaccatcatgactcactgcaggcttgacccctcccaggctcaagtgatcctcccacctcagcctcctgagtatctgggattacaggtgcgtgccactgctgccgcctagtttttgtatttttaatagagacagggtttcaccatgttgcccaggctgatctcgaacttctagactcaagcaatatgcctgccttggcctctggctagcattttttaaattaactgttgctacctgcaacaatacagatgatctcaaaaatgatatgctgaacaaaagaaagcagatacgaaaaagtactgactgaatgattccatttgtatgaagctcaagaacaaacaaaattcaattacagtgacagaaatcaaagcagtggttgatgacggggaggtggaaagttgacaggaagggggcagaggggctctggggtgatggaaatgtcccatatcttgattaggatgctgattatgtggatgtatgcattcatcaaaactcattgygctgtacgcttaagatgtgttgatttcactgtatgttctccctaaatagaaactaatttattagtgaaaagaaagatgtactttcttttcactattaataataaactaatttattagtgaaaagaaagatgtactttctacctggagggtctgtggggataacccctattccgtacaaaggaacagtgaacatgcttgagtgaaaacrgccacgcaaggcagacagcaagtgagaaacgcctaaggcaggggaagaayggtggtctgctacagtgagaagagaaatagagaagactgagtcagaaggggaaggtatacaccaaacaggaagacacgagtgaactgaacgcaagaagtagaaagtaagagacctaaattcgtgtttccaaataatccagttaccacattacactcaaaaaaagaaccaaaggcagttttatttggaaattgttctcttcctccctcgacacctctgttaatcaaattggaagctaggggagggaactgagtaaaggcagggacctgaacatatccctccgtttttgcttttttttttttttcttttgccccttaatcagccaccttcaaaacagtgcctttctagggctaacgtcctgcctgtggcatctcatcactgataaacatcaggaagtaactgccattcgccatttatagatttatatgtacctgctaggataatgagattcacaatctgttcattcccttagtaactgaatgaaactcacaaatggctacgagggagtatcctagttcactgaagcccaagctggcctcaggaaccagagataacatttctcctttttccagctgaattactaagacaagcaagagatgactcataataagcatagttgatgaagcaattaatgccaactcttcctctctgartcatcccttccagtgaaagaatcgctaggagtattaaccctggctgaaaaagtagatgccatgtgagcacattaaactttaccaaacaatggagtggtaagggaagagttggagggtttctgtccaaactatctgaatctagagggaccgctccatgaataagtttcaatacaattgcggtaatcagcaccgcttcctctatttcaatttacaaacgctgggtttacaggaatagctttctgagacattcctataaaattagcttactcactgaatttttaaaaaggagaacaaagccaaaggacgccattggcctctgggggcgtatgtgtgtgaacaagctgatgctgtgtagaaatgatgtgtcaatatcatttgggctacttgtgtgaaaactgctcaatccaagagttacttcttgtttctactgactgaacatgaagagagaaccaaatattccagacagggaaagaatctgagaaaacatagagtggagtgatttcagtgtgtgtatatgaagaagggggagcaaatataaaatccaactggatgcttttcatcctccatgcagttctccacccgcttactacccctcacttaaagtgtggtcctggggccagcagcatcagtttcacggagggatttgtcagaaatacatattctcaggctccaccctagaactattaaatcagaacccctgggcctggcgcccagaaatctgtggtctaaacaagccttccaggtgcctctgatgcaaacattcaataaaatgtaatcgtcaaatcttaactggtccctggccgcgcgtagtaactcatgcctataatcccagtactttgggaggccaaagcgggtggatcacatgaggccagaagtttgagaccagcctggccaacatgtgaaatctcrtctttataaaaatacaaaaattagccaggcgtggtggtgtgcacctctagtcccagctacttgggaggttgaggcagagaatcacttgaacccaggaggcggaggttgcagtgagccaagatcacaccactccatgccagcctgggcgacagagtaagactgtagaaaaaaagaaagaaaaaaaaaaaccacacaccacacacacacacacacacacacacacacaccaaaacctggccccatttgcatgtactactgctacactcatccctcactcccacccacctttcggaggtaggccgcccatcactagatttagcagagcatccgctgactgaaatgagacacagctgggaggcacccaccaccacccgcctttgtagaacrgctacccaaaaagacaaggatagcaagtcccctgaagcttttccaatctattcctttttgtgattgttttccttttgaaatagtgttaacacattttaaaattatatacatattcattttgaaaaatayagaaatggcaaagaagaaagtaaaaacctcccagctgacacttaacatttgtcccatctttttctaagcatcaatatataaatatttaacagtatatacatgttacttaatttttaaaatttgtaattgtatatgtattttcttgtatacattcctttgaaagctctgtgatgggtgtaggctgaaytgctgggctgtactgttttagagcaaaaaaagatactcatgctgtaattctaatttttctgtgtttcaaagggggggctattaatttattaaattaatttttaaaatttactcaaggtgaattcttatccagatcaattccaggagttacggggcgtggaatttgccagataagccacaccattctatgccatcaagtcacagaaactggcttccctacactctaatttgtgccttgtctgttgctttgggcatgaaacagaatgtggcttctttcatttctcacttcattacctaaagtggacatacaccttcccatactccctctcccctctccttccctaacctatcccctgcccaccctggccccattatttctcacttggataacaggaaggtcgtacaactctcccttttgaactcatcgtccacaytgggtcaaatctaaaatacatctgcatatgccacatcygctaaaaatcattacaatagcttctatttaaacatgagtatatcccatcagcctggccccatgctacatgcgttcagacattatcatatctttataacaatcttaagagacagaggctattattttaacrttagagataaagactcttacagctgaggtatgttaaataacttgctcaaagtcacaaagctagtaaaatttagggcagctgactctggaacctataacatktgttaattcaaaaaatttcatgactactgccatcaacggcagtggttcccaacattttcttcaatcaaaaatgttgcagacttcaggcactagatgtttaactcttaatatctgttgatcaagaagatgtacaatggtcaaaaagatactatgaacttagtaacgctgtgaatgaattctggctaatgacttacaatatcagccagctacatatatttggaagaaagcycctatttctgttagtgattctgatgaccaaatctacagaccatgctttgtgtyggtatgaatgtgcaggtcctcttttacaagaaatgtggtctcccatatgttttggaatctacagattagaaaacccctagaatataagccaaagtccatactccttagcatttgaaatgccgtaagtttcccagtttggctccaacttacttytccaactagatttcctgtaaccccataccacgtcccctaagccctacctctagttgtgttagacaagcattcccaaattactggataccatgcacactcaagcctagaggaccacagccatttctgctgcaattctctacctgaagaactcaatctcctttgagacagagctcaaacatctccaaccctatggagccattcctgacaacacccccacccactcaaggctaaattaacgcatccttcgtccatatgatcacagycctatgatgataagtaacacactacagataaaatgacatgcatctctgtatctagctatctgaccactcttctcatccaaacttcccaagggcagggattgtgcttcttcatcagtgtcttagcccctagccccatccctgaaatatggtaggtactgtttgtaagattaataaatgagtatcaatgccaagctggctagtgattttgcctggggaagtcagtttggaaaatagctctgaccactaaagaagctttctttcagtatgttgtaatggttaatcatctgtaaaccagaaaactcacaacgtcctccaaaagtagaagacaaatacactaggaactggaagatctgagctcaggtcctggctttcctatgaaccagctgtgtgactttggtcaagtcacattccctctctgatcttctgtttgttcactgaattgtggcagggttgtgggggtgcaaaaggagggcttctagttcttccctgatgcaattctctgacgtgcaaaggtrtagactacagttggcaaacattttctgatgaggatcagatagtagatatttcaggctttcttggactatggtctctttcaccatgactcaaatcaaattctgccagtgtagtgcaaaaactgctatagacattagacaaattattggatgtagctatgtgctaataaaactttatttacaagaacaggctggatttggcccatggaccatagtttgcctactcctggtctggatgaatgcctccttgttgccattcagttcacagagcttgatatgaagatacagttcacsagatgtccatcccaaagcctctatccattccaaagggacttataagaaggacaataaagattaccattccccaaccargaacttgacaacggggaagagattgcctagttagcggtttatagtaagaacaaaatttagtggatgagaacatggacatacaaagccaactgaagaaagataattactaccatcaccactacccctgccccagccagcacctgatgaaatatagtcatgaatttaagaaaagactgtgtcctcaaaagggcgccagggctggcttagccaggaaagtacagagtcactaaagtctatgtaggcaatgccaaggttgttggggagaatacagtgtcttcacaggcaaggccaccctagtgagatgactgtagggagtagcaggcaatgactgacatgttcctggtcccactagaaaagccacccttctcctgagatgaacagagaggcaggctatgtttgcttggtgccacttaacagtcaactcatcccactcccttgttccgattccctgctcaccaagcaaacacctgactccatatggatcttccttagagagcatgtgcactgtgactgctgctgmtacctgcagccagagagcagcaatttctcaaggcacatcaataaagtagcttccagttaggatttacattcccatgcagcttaacacagagagagaatgtgctcatcatgtgggccttgagagtatgttagtaatggtttccactgcggattaacattctggcataacgatctcgtgggtctgaggatatgctggcatcatggtctcaactcaggctcatctgtggcatagctctctgaatcagcatggcaagccctggacacagaccagaagccatctctagtctccaaaagcaggggcagaaggcggcgatcgtatgcagatccagccagccctcgctgacagcatggcttacaygccacttctggctctactcactttcaactgattttcacagagctgtttaggatgatgaagccaaagaacctggtgcttcaggacaaagtttctgtttgcttccctatacatgtatagaatggaaactggcacaagatttaattaagtgatgtaaaaaccagaggaaagtaaataagagcaacagccaaatatccacagtaccaattagtgactggcagagttgccacacaacaaggtgcaatgaacagtttatgtgtttctttaaaaaatctaaatcatagtgaagggtcaatgatgcccagaaaatgccagctcttttgccctattaagcagaaaacaaaggctcagtgtatagaagttagaaaacttttagccacaaaaatatgacagtgaattatgcctcttaataatatgcatggggcaaaatgaaagagcattccagaaagaaggtcagtgcctgttttgcctaaatcttgccaggatatgcaaggccaaatgcccccaaaccaaggaaggaaaacaaaactaactgcaacggagcaagaatgcaaagcacctcctttcctgttaactgtgacataattcatttttctccttctgttccagaacttctaacctataggtcatgcttatacccacagaagaaccaagggagtaaggaagctgctggtttccaaagaaaatgcttacttcccatttgcaaagcgtttcgctggaaatgctgtgttgagttacaycatccaactaggaattaaatatattatgctctttggtaaattatcaaaatgtaaaccaacagctacagtggagaccatctgaactgccaagagttttaacactgtgattttagtgagaaagaacatttcccctgctgtttagttttcagmtaagttcagcctagctgtttagttttcagctagcttcatacaaagctgtgcattgtacgcacagatgtgtgcacacaatgtatacatgaagacaaccacacacttttgttcataggtttttactgggaattttcacataggattcattaagtgaaggtatgtagcatgataaaactgtcatttcctaagtttttctacccaccataatttgggaagtggctttgtttctctgactactagacttcctggggactctgtctttatttcccggggactctgtctttatttcccataacatttgcagagtgccatgcacacaatgagcacttaataaacatttgttgaatgattcatctccacaatatcaacgcaattaaragaaatctggcctttcacgtgaatttatgatacaagcaaaataagcacaacaaattttaaagctctttagtcctctgtcttcttatatagaaaactattcagtatttctacatcaaaaattctccagggaaggataaacatacatttttttatacattcccccaaagcacaggaagaaagagcaactttatttcatttgtgcaaattgatagatcaccttttgaattcatgctaaacagctaaatgtcgcaagcagcatgctgtcaaaaactgtcaagtgaaataattattgattggtgcattaaaattaaaaacgaatgtagattaataaatgaagatggctttaagaaaaagcatgtcatctacaactagaaaaacccgacagcgaatctgccagtcagggctatagggcttagaatgaaagattaaagaggaaacaagaataagaagataaaaattaaccacacaatggcctttgtgacaacccatgacagctgagataggctctccggatggtcacatcccacctgtccttccttttccagcccctgacataaatgtcatggatttcccgggtgggtcctaaatccaatgaccactgttcttctaagagacaggagaggacctggtacagacacagaggagaaggccatgtgaaaacagaggcagagactggagtgacgctgccacaagccaaggaacgcctggaaccaccagaggatgacagcggcaaggaaaggttctcccaacagagcttcgggagggagtgtggcccggctgacacctgatttcagacgtctgccctccagaactttgagagaacaaattcctgttgttttaacccaccaagtttctggtaatttattagagcagccctggaaaactaacagagtttcccatcacatttagcgtaaaatccaagctcctgcagcctctagatcaattcaaaggctccttctggcctcagagccttcacctggccattctcttcctttacagtgctcatcctcagattctcatctcacccttcaccactcccatcttccagggctggctcctataccttactgcagtctctgtacaaaagcccatcccctaagactttccctgactccaccaaacaaaagaatccccttcgcccctgccatcactctttctcctaacatatcctactctattttggggggtctgcaaatagagtctacttatgcaatttacttgtggttgtctccactatgagaacataagctctctgagggcagggacttagacaaccttgtttgttctctgttacgtcctcagtgcatacaaccatgtctggtgcagaaaagacattcaataaatacttggttgtataagaatgaataaattatttttctgtgctttcactcaattataaaagcctgacttgattagcaccatcaagacatatgagcttaagacattctctgcattgcaagtcaagaatgcttactattatttttgaaaatatctgagggtttacaacctctctccaatgctcttctattaaaactcagttgatccaaacatggcttttttgcttttattatttgggtcgagctaaagcatggtataaaggagaggcctaaatccttttcctaccagctatgtgagcctgagtaagtaattaccctctttgagcctgtagaaaagaatgataaaacatgctgtgtctatatccacagggctgctatgagaacccattgaggtaacccatccagcaaaatatttctttagatgctgttcaggccagatactgtgctagcagtgacacagttagaacccaggcaagaaatgtctgtccttatcaagcatacctctaggcacattttgcaaactgtcaagacttgtgcagatgtaatggaatctgagatttgtgcttgacacacccagaggataaccagctcccccgttccaaattattcctgctctgcatacctattaatacaaatgcaaaccagaagatggttcccttaagacagctattagtttttactcaattactcacacatttccccaaatgttcctcatttgtctcatgccgagcaatttctaatacagataaaaatcaggagctactacgaacaaggttacggcatgtagccatcccaaaatgtggatgccacaaaccctgaaacattattccttttcattatttcaaaagaaacaaaccacatttgaaatatgtaccaagtggctgggggtggttgttcatgcctataatcccagcactttgggaggctgaggtgggaggactgcttgaggccagggagttcgagaccagcctgggcaacatagtgagacctcgtctctacaaaaaatttgaaaatgagccagctatggtggcaygtccttgtagttctagatattcgggargctggaacaagaggactgcttgagccygggtatttgaggctgcagtgagctatgatcatgccactgcactccagccagggtgatagagggagaccctgcctcttaaaaaataaataaataaatacgtaccaggtatgtctgcaatgcagatttaatgtaataatttacaaaatggccatgtcatggttatttttaattgaataaaataggtagcttatggcttgttttctgtaactcagccttaacattttgttaagcctttcatttgttttcctcagaagatgtgcctayctttcaattctaaataaatggttcctatgaaccttttgagaaacagaattcttggaggatctgattgaaagctacaatcctctcccagaaaaacccacatacacagaatgtcatgctgtaatacagttcctgggggagccttgggacgttctggaaaagttcagtgatcagaaatgaagaattcccaaccaccttattgcagtggccgcaaaggggcacactcagtggcctcacctgaccactgcaaagattcgttcttctagccagcctacacaattaggcaccaactcaaagcaatatcatgttgcaaactatgcagcattaactgatgttgaggaaatgaaaggagataacgagtccaagcacgcacattacacacttctcccaaayggcactgcagcagggggcggctgtaagccaggcaacaggagatgcattcattagccatgacctcccaatgccaagaaagggcccaaagttcagcaaatggggatgattagaaattttacaagaaaatgaaatcttgagcttttaattttactgaaatgtgattttctgctttcaactcaaaatgcatttacatgttccacgtcctgtgaagttataaagaaaagatacatttaaatgaacaaaagccaaaggaagtgctcactaataatagtctaattacaaaaaagtatctccccccacctgccccactgtttgttcaataaaactgattccatacactgaaccatctcactatcgcttttctgggctacatgtatatgagcgcaaaactcacagtaaataacgataataaaaaatccaaaataacaggaaacatctacaattatccagagaaaatatgtcaaattataaagtctctgagtcatgatagtaatcaaacctgagtctctattggctttacaaaacactattaatatttcctgtaataaaaactgaggtgtagttactcaggttctttagtgagtcaacacatgtaatttgctaaagctgaaacacactgttgctttccccatggctgagaatgcagtgtcagtaacatgcgagttttctgctctgcttcaaaagatctgttatgtttaagaatttaaaacacacacacactctctctcacacacacgcaaatacagaagtattttctaccaaagaaggtacaaggtgtttttacccaacaactctgaatgtgtgtgatcatgcgtaaagttctctttaagtactattggtatgctacatttaaaatatttcagactgtgtttccataaacatttatacagacttctcagaaataaaggagaattctactaaggattaaaagtcactgccgtgatttataagctatttcaactaaacattgtaaactttggactatttacttttcagtgggagagawcattccttccagagatagagtaacatactatattatcatttttcctacttttaagtttccaggtgtaacatctctggggacattttcattttattaaaaaataataatttttgtatgatcctttaaacaacaatctatccttctgcagttgaaatgagttcaactacccacagtcagcttacacataacttattactataaatcaactataaaaactaagctacaatcattacttaatcctaaaaggaggaggaagagacaaaactcaagtacaatcttttatagataaaatcatgttctatatcacccctttggataaaccttttatttatgaatctagcgcatttcccctcgtaggctaaatttccttaagcttttctggacaaattccctgcattcaacagaataagttccaatgtttagtcagaaaagagactctggagcattaagataattacacaatttcaacttctaagtatatatatttttaaaattaataacatagtgcacttccttacttagaaggaaatttaaattacaaagaatctgacattttgaaatttctgaacccaaaagccattaaaaaaatagcccatgagccaagcagcttcactaaatgtttatcacagtgtaacatttccacagtatgaaaagtttctggctatcatgcaattttaaattcatgtccattttcactcgactgtgtttttttaacataagactaaagcatgttgattcttacacaaatcataaaagagactatgaggaaagttcaaagtaacctcaagcatgatgacttcacgttcaaaagatctttctcatgttaataacatttaaatctctgcctgtgtgtgactcacatgcytcagactggaagttcagcccaatcagctctcccaactgattggtgagggaagtacatacttcattgtcttaaaccccgagtgactggcattccctttaactgggcagtgtgtctaaatatggaaaaacttcatgagaaactgaaacaggcaaagaggaaaaatattactggcaccagtccttcagtatgaatcgagagaaaattcatgaagtctccaaaagaattytttaggtgtctttttgatgagyaggaattccagtgcctagggctttcagttctttgtgcatcaaagttttcttctaagcatgtatggtcatggaagagctggagtatctttcatgacaatggcctctaatcaaacccagtgttcacccctgagagacgacctgtgcacttcactccatccatcacaggcaactaaatatacaaccagggcaagcaacccatgaacagggtgaaaaacagccactggagctggctatttacaaccttgctctgctctaaaactttctacgggacaaccattcagacccgagttctatgtacaataggtttcagccttagcaaattagayagatgcactgacttacttgctaaagaacctgaggaatgacgccttaatttttattataggatatattaatagtgtttggtaaagctgatatagagtcaggtttgattgctgatatagaatcaggtttgattactgtcatgactcagaggctttataatttgacatattttatctggataactttagatttttcctgttattttggtactgggttgcagcacacaggtggcacctagtcttagggctgtgaggatcccgccatggcctgagctcrgtcactattaccagcttcaccagagaaagacaggaagtggagaagtccaggctaacatgagtttcccagagaaacacaacttattttaatgtcaaacctgttaaactaaattatgatccatttgagagaaggcaggtcagatgactaaaactaaccgtttattaagttttgaagaatggaagtggctatatggttttataacatgatcccttggaaaattaaaatgaaagtatgttaacttcctatggctttaaatggtgtgtcttgcttgtaatgttggacactggactcctctagagccttcttaagtacsagagctgagttttctgtgtttatttaggtttcgagaactgctatttattactccgatactgcgtgttttcattccagaggagtgtgattgttaatttgttattgcgagttccttaaggagtcaaaacatccagagaaaagcatgaactacacacagcaataaaggctagaaaatgtctcaacaacatggaaatgactcactgctaaagacatgggggattaagaaacactctcccattcaattcagggtaaatttgttcagatgaaacaaacaagaaaaagagctaaatccagtttttgaatcagaaaccgaatttagaaaaacatcttggttgaaatgccctgtgaaaatagttttaaagtatttctcttccttcctctcatcagtaaggtcaataatcacttgcactcattgtgcatatttggcccagtagctactcccacattctcacattcaacaatatttatgcccagataagggagagaatcatcctttcacaagctgactatgtttattccaacattttcctgcaccattttaaaggaagagaaaaaaagcatcaaaagaaagcttaagcgctcctaagggaaaagactcaatacatacagacctttttaatcaattcagatccaagtacacaaggaacaagtgcatatgggcaggaacgactggtaaatatttgctaaataaaggcagctgatatttctctgcccrctttgcccctagccctctgastcctcctccccacaatacccacataattttccttttggccataatatagaactcaatcaccatattaagatgaagccctagaaagtagcttcttataccctgtgaactgtaagagggaggggttccagccgggcacagtggctcatgcctgtaatcccagcactttgggaggccaaggcaggcggatcacctgaggtcaggagttcaagaccagcctggccaacatggcaaaaccccatctctactaaaatacaaaaattagctgggcgtggtggcgtgtgcctgtaatcccagctacacaggtggctgaggcaagagaatcgctggaacccgggggagcagaggctgcagtgagtcaagattgcatcactgcactccagtctgggtggcagagcaagactcygtctcaaaaaaaaaaaaaaaaagggaagggttcccagttctgcccactaacattaagagattttcatatgtataatatcttagtgtcactgctaaactaaaacactaaggtagaacttctcttcgtagatgataccaattatcattttaaaatgcaaattactaagacctcttgcacccaattatgtatgacatagaataatttcttggccgggcccggtagctcacacctatagtcccagcactttgggaggccgaggcgggtggatcacttgaggtcaggagttcaagactagcctggccaacacggtgaaactccrtctctactaaaaakacaaaaaacagctgggtgcctgtaatcccagctactctactcaggaggctgaggcagaagaatcgcttgaagccgggaggtggaggttgcagtgagccaagatcatgccattgcactccagcctgggcgacaagagcgaaactycatctcaaaaraaaacaaagaataatttcttaacagggtcctacttcagatggattgctcaagagttcaggccatatggagtacaattagacactgaacatactactttctggatctgggccagtatgacaaatattacaaaagctattttttccagaaagtcatcacagtttgaaacagacagtgacttattaccctaaagccttttcaattatgaagtgcctgctctggtgttactacatatacaaaggtggttacaaacataaataagtaaccaagtctgttttctctttctctcctctagtaaattatgttaattaagcaaattaagatgattaaagttcaaaatctttcataattgtttacaattttcaagyatcagtaaaaccacaaagcaaatagatgtattaaatataataaaaaagcaattaattttggatccatatatactagtaggtaagagaaaaaatggaaataaataattccaaagtgaggtttgatgctgaaaatttgaaccaccgtctctgtcaattattgtaacacacaaaaaagttactacatactcagtaactgggctcagagaagacatctaatatgaataagaaaacaagtccaaattacaatgtttyaagaagaaatatagttttaactctcttaagtacttataaaaaaatttcaaaatgatcatcaaattacttaatgaatagactaagagagcttatataataatgtaatacaaattatgtatatataatcatataatgcatgcaaacaggaacttccaaagtgcttaaaaacaaatttcctttattactgactcttagctgttattagtctgtgacattatttatattatttgttagcataaaaaatcttttcttcttagacatattactaatataaatattaattcaatgtgtccacaaattcggactataaaatgatcaaaattaacaaaatttctgtctactgaaagtgaaaattcgtcagagaccgtttcctccatttaccaagccgagatgccagtgggcacaaaaataatttaagccacaactgaccaacttgagactgcacatttgttcattcattcgggccatacttattcaccatctactactctaaaatggggaagctgcaagggcagctgtagaggtcacttggtctagaccctcattttgcatgaggaggctgtgaggattacagagattaaacgcctggagcatgctgagtttatcacagagaaagggctggagaagagagcaggtcccttccctccctgctccttgctctttctgccacactaccctggagctgaaaggaggcaaaggcctccagtcacatggagtctgactgggacgcaagacatctaagccacaaaatgaagcaataaatgacatgatcaaataagctgtgcgcacagggcagtggggagggaagttggtttgggctgaagcagctggggaaaactttccgtcccggagaagtggagattcatgctgggcatggacagtggggcagaatgaggacaggtaaaggcagaggggctgggaaccctcacagcaaagcagggtggtcagaaacaaacaggatatgtatgggcaacatctgggwtgtaggacagaaaccaggttctgcccaccctttctacaactcaaggtctccctctcaccaactccactacacgccatcacccataygcctggtattttgccctaaatgctacacaaataagttagaaaactccaaaggagaatggtaatatcatcatagcaggtgaagtgtgaatactaggggtattacgtatattgattttcttagtccttacattgactataatccccactcttcagatgaagaaactgaggcacagataggttcagggacttggccaaggtggtaaatgtcaaggctggtattcgaactagagagatatcaaaattctggtatacccaaccacagatgagggacgcaggcacaaccttcaccaagtgtggatcccagctgcaggacagcttggcattcccttccccgtcacccagcytctattccttcccattctccttctatttaktcctagttactaagaatttttaaggtgctatcacacctccagggctacttccaaaagcctagtcgagctgactcaaagggaaggttctttagggacctcagcaatccaaacacagcagacatctgagaaatcctgaaacaagtcttcctacagaatgatgactgcctgcctctctggcaactgagaatgggttttaaaaacatcctcctttactgtacaaagtatctggtcacaaagtttgttattggcagaaccaggattaaaaattatgacctctgycttttttctctctcacccttattctcccaaggtgtatatttatatgttttgcaaagtagccaaaggcagacttcaaaaggagctttcctgtkgggtgagcggtaaatgaataacggctggactgagagagcaaagagaaaatgagtcatggatattgtgttaaatatataagcgttcgctggctttctttgaaatgttttctcatctaaacttgggagctgctggctttgtatttactcaccctgaaactgcatctgggactccggagtcaagctctgaataacattcaaagcctgtattctttcrttcgaattttaggcattgcaacttgtcatacctatgtcttttacagcaatgcaacttaaatgaggcaataactgaaatggcttaaccagggagatgtggtttagcaccatgttgcaatccagccatccaaccctcatggaggtctctgagttgggggaacctaccaacaactggtttactgagatctcacagcccacactatgatgctttgggtgccactaactaaaaggtccctctttttaattatctattgcaacggttatatttttgttctatggattctggccctcccacctgattcctgacacagagaaaatggccctctgaacatcagtcacgtagggtacttaaggactaagtgcttagcagtctgtttggcacacagtaggtgctcaataaatgttgattacctttcttcctttttccccaaatgaatgaaaaacctctcatctcagagatggcaacagattaaaaaaagaaacttcaaaaattggccaagcgcgatggcgcacgcctgtaatcccagcaatttgggaggctgaggcaggcagatcacttgaggtcaggagttcaagaccagcctgaccaacacggtgaaacccaatctctactaaaaatacaaaaattagtcgggcatggtggtgcacgcctgtacagctactcaggaggctggggcaggagaatcacctgaacccgggagatggacattacagtgacgtgagattgtgccattgcacyccagcctgggcaacagagtgagtgaggctccgtcccaaaataaataaattaataaatggaaatgaacaataacttggaatttcctttataaaattagatgtctgcatattaaatgaagtttgttactgcttgattacaatttaaattcaagattatcactaaaaatccctttataggtagaagttagggaaaaagatgtgtgaacgcaaagctttctggagttaaagggtaaaacagtatrratatatatatatatatataaatgtatttatacatatataatgtaatataaaatatttatgtacaataatatatttcttaattctacaaaatacagaaagaatattataagaaaatgtcccaccttccttaggaaccatgtgtaccaagactttttaggaatagcaccctgcctgaagattgtattcttgcccactgttctttcctaacaaaatttcccttcaagttctcctttcgttgtgaacttcagttattgcctttccactggctaaacacaaccacacatatctttcaaaagctaattgaagcataaagaagttaaacatgatttattccaggtcaaatttcaagtcagtggaaaagccataaatacagaccttcctcttgctgagtgttctgggtgccgggccatgctgcagggtgaaattttgacttttgattggtgttttcaaaattcctttgtgtatttaaaagtagctcatrttgacaagatagaaggaagaagcttgracaaatgtcattaacgttgcacaatttcacattcctggacctatcacaggtgccactggttattaacatatgcatgtaaaactccctgaaagacactgtataactggctcaaatgcctacaaatggaaggaggtttagtagcctaaaatatactctatttttccctttaagtgcaactgaatcacaatccacgagaagcagtttgtgcaaaaaaaaaatgctctgcatgtaagagctacactaaactgcactagaccccgttctaagataagacccgtattaacagagccagggaagaatgaaaagaagattctgggagtgcaagatgcattcaggggaaaaaaacatcacaagcactgagctgcaatgagaaatgagggcatcagagtcgtcataaaaaaaaatcacaagcatgtgcagattagacagataacgagagaggctttttttttcttttcttttttttttttttttttttttttttttaataaaaacggaggtcattcctcttgctttcaggagcttgaaaaataaaccagagcgaccaagggctgcaaggctttgaccttctggtgaagacagcctttagcaggaggaacctaatcccaggaagttgtctgtactttgctttctgctaccacactagaagattacttgatcaaacaaatgggcatttttccccatgatatctctgtatcatgaaaaagtacatttgtcatttaatttttatctaattgtattgccgtttccttctccgcctctttctcccacctacccccacccctcctacactggcattctctgtggtcaaagaatctgtttcagtattagtgttcaatatagcaaatgtcaagtaaacactctacacatttcctgtgctatttaaagcaccctaagcaattatttgctctaaagtattaaactgtaaattttcttagctggtgccaattcctatagtaatagctgtcacagaaaagtactttagagtactcaaacacggcttttaaaccggcaacactcatgctacatttgccaagacttttctagttgtcatatttttatrgcatgtttttgagacaatggactaactgcaacaaagtgtcatatgtagctcttttttcatatttgaagctttataggcacactgtagtctttcaacataatttttctccaagcaaaaagatgagatagaacataaaaataggcagacgcacatggtcacacttcaatctcatcgttatactgcttggtgttacaggccagaatcatgaccattggaaaatatcactccggccgggtgtggtggctcacgcctgtaatcccagcactttaggaggccgaggcaggtggatcacttgaggtcaggagtttgagaccagcctggccaacatggtgaaaccccgtctctactgaaaatacaaaaattaaccaggcgtgctaatgggtgcctgtaattccagctactttggaggctgaggcaggagaattgcttgaacycaggaggcagaggttgcaataagccgagatggcaccactccactcaagtctgggtaacagagtgagactccatctcacacacacacamaaaaaaatcactccatttgataaagctccaaatcataatagctgataaaagagtcccccaacactagttctataaagggtgcacactgtatttacacatacaaatgcatgcagcacttgaaaaatattaagcaaccaaaacatacatatgtaaatatgtgcaaagactaatatacttctacatgtatgcccttattaagtacttttatgtttgactagatgtgcttcttttgaaatctttttagcttcattacatgtttttgtaatttcatggaagtaaattaaaagtaacatagttctaaatcctaaacagctaagactgcattaaattgccacctccatctacagaattgtatggcccttgaaaaacttccatggatgagtgcaatttgcaaccaaaaccaaaagcctctttacctattttttaaatgtagtgaattattcaaacatattttccaaccgatgaaagaattctcttattcctgccatgccgggacccattctgagttttacacccaccataccaggtattactacttgctgaaagcctgcattaaagcattaagggacaacaacaaggttacattatcttaacatattccacttaatggtttttgattgtgttatgaagtgccctcacattggttcccaaaaatgtttgctattttaagagccacactrttaagaaccacaagtcagccaggcacggcagctcatgtctgtwatcccaacactttgggaggccgaggcgggaggatggcttgagsccaagagttcgagacaagctttggcaacatagcaagaccctgtctctacaaaaaawttttaaaaattagttgggtgtggtggtgcacagcggcagtcccagctaatcgggaggctgaggtaggaggatcacttgagcccaagggttcaaggctgcagtaaagctgtgatcatgccactgcactccagttcggacaacagactgagaactgacctcttggaaaaaaaaaagaaacaggccaggcatggtggttcacacctataatcccggtactttgggaggccgaggtcgggagttcaagaccagcttgaccaacatggagaaaccccatcttgactaaaaatacaaaattagctgggtgtggtggcatatgcctgtaatcccagctacttgggaggctgaggcaggagaatcacttgaatccgggagggagaggttacagtgagccaagatcgtgccattgcactccagcctgggcaacaagagcaaaactccatctcaaatgaaaaagaaccactggctgggtggagtggctcatgcctgtaatctcagcactttgggaggccaaggtaggtggatttcttgtggtcaggagttcaaaaccagcctggccaacatggtgaaaccccagcyactccggaggctgacgcaggagaatcgcttgaacccaagaggcggagattgcagtgagccaagatctcaccactgcactccagcctaggcaaccgacagagtgagaccccatataaaaaaaaaatgtctatagactatagagttaagatttgtgaattataacctgacaagcttgtgagagatctgttggcacagtcatatgaaatcatccttctcaggtgttctgtttgctacaaaacatagcatgctttacttggaagggcatgcctcatttgagtgaggcaaaaatattgtcatctcaccaagaattcccaacactagtcatgacactgggcatccccgcaaggaacgctcgccttcactttttaaaggtttgttctgacccagttcttctttgttctccatgatggtgcgagaaaagaaggaagaaggatgagagatgaaaaagtagggaaaaaagaagagaaaaaggagagaaaacaaacagtgatctggctggtgtgcatttttgtgtactttcgtgaaaaatatatgtatacttttttgagatggagtctcactctgtcgctcaggctggagtgtagtggtgcaatctcagctyactgcagcctcgacctcccaggttcaagcaattctcctgcctcagcctcctgagtagcggggaccacaggcgtgtgctaatttttgtattttagtaaagacaggattttaccatgttggtcaggctggtctcgaactatggacctcaaataatccacctgccttggcctctcaaagtgctgggattacagacgtgagccaccgtgcctagtcttaaaaatattttaaaacgtcatgtttctatagtggttccttctgaggtgggaagaatgtgacaagattggggaggtccacatagaggacatccagttgatggtaattttaaaatatgggtgtagagttaaaggagtgttcactgaacccttattttttataatttacatttattttgtgaatatacttttgtatttctattttactgtattttattttatatttagtaaaaacaatttttgaacataattttgcaagttctacaatgacacaggtggtaggcaatagagtataattagttaaaagcacagggtctaaggttaaaatggcatgcatgaagcccagtcccaccacttactagctctgtgaccttgggcaagctactaacccggttacctcatctgtaaggtggagataataatgacctatgtaggtttactgtgaggattaagtgattagtacagtgactgacacatcctaaatcctcaatatgccagccagccattattattgttagaagaacaggctccctgcattgtgggcttttytgagtgtgtacactccctccttgtgtttctgatcgcaaataaatatttattaacaatgatttattgaataaaactatcagcaatcaagttccrcttttttaagagccactccgtgtgtcactagaagatgcccaaatgaatggaggaaacaaatctaatggtttataagaaaagtgtgaagaatctgaatatccaggaaccctttcagggaagcctcattaatattaactgctatatataagagaagaccaaaattctgtctcggggtacagacaaaatccagcagtaatttaaagtatgaagatatctaccactcacctgtaggtgtactcagagttcacaaaatacattaagtcctaatatcttacattgacaaagaataatcattaggaagatccacttaactctttttaaaaggttgcagtgagctgagatcgtgccattgcactccagcccaggcaacagtgcgagactccatctcaaaaaagaaaaaaaaactgtccctcaaataatacaaaaaaagcatcaaagagtaatcaaagattaatctgtttgaaaccatgggccacaacttattccgcattatttttccctgctagcatagtactctgcatatagtaggctgagaaaaaayagaattaaattgaatgcaaaatgagattagacaaaaagatgtttaaagacccttctgatttaaatttcatgaattacaaactgcctaaatactcaaactgttattgattatagctgatattcatggctaaactccagaattcactgatacattaataatgaaatgtattcctctctccttaatttcacttaatgtgagcatgttcaatctacagctttgatttcagtgtttrattttattatcaaagtattaagaatatgcctacctggtaagtttttagaaacataaagraactgacaactttgggaaatatatacgttctgaaagaacgaaattaaggcatttgctttgtgttctttctttaacagttcctaatctcccttcagtgtatttattgggcattagttgttatctaacacaacagttctcctagtagaatgaaatcaaccttaaaataaagagcttttcaggagtaaaaagaggctgttacaaaagaaaaatgctagaggggaattatctttatatcacatagtaatttacatcttagaaacttaaagttgtatcatagctgtacaattagccaaaactgaatatattttatgagatactgattactcacaagaacaaagggaaatccaattgaaggattaaattcctgtcaaaaccagtcactcatgtgtctgcacgtatatcgcaaagtgtttgtgaatttgatgcatattccaggtataaatcccctttccagagagcagaaattcctaatctgccacacttcaaactgaaatagattcatcagcatttcggrtacatacgaacagctccccaaagccattagcaaargttatttgtaagtggaaaatcaagagacataaagatttcaaagtcaaaatgcaatgttattyagttttctgcagcacataacaaggcaaaaactttcagtcagagagaaaagcaaaagcaagatcattgctccttcacagagactggtaaataaagaatgtatgcacaaaacacctggatttgctttcctgtttccttgccagtaactttttttatatgattatctaacagtcaaacaaaccttcaaagcaatgaattacgcatagacacacagacacactctcacacaaaagagagcaaagctgatgctatttaaatatcgtgaaatattttcctaaccatgcacagatggaagtacagacgtttctgccaaccgcctggttcagaaactttgctctatttttaattatttggttcagaggacccatttgtgattaacttctgtgttgcatggcaaaggaagtaaagttcctgacccacagcaaagaacacagaaagaagcttaattatttttaaacagctagtgtaatattgtaaaccatgtgtagagacaactaatttgtcaaagaccagttgatgactgttgcagtttgaagctgtagggtgtatgaagaacagaaaaatccaagggaactttagtaagtgatgccaaaatgaatctcataatgacaaatagattttcatctctgagaaataacaatggagcaagaaatagagaggaagaaattaatagtgttgtaaggcctaatctcattagcaggagaagtttcagttttgactaggagcagtgaatggaatgccagcagccttaagcacaggaaatggactcagatgcaagaagttggtcaggaaactccagccataatattcagaataacacactagaattttagctgagcaagatgaaatcccagaagagaagtagaaagagaagcgatggttcagcaataagacagaaaagatggtcaaggtataaacaatgaacaggttggaactgtttggaactgttttatatttttaagtgctgtgcatttacaaaacaaaaaaaaaagtagtttctaagtaagaaaacaataaamccaagtagcaaattagttataaacacagaaagaaaacaaaatagacggcatccagttaagaattttgaaagcagaatagggctaaaacctaacagaactttattcctcgagaagctttctcttgatcaatagccctaaaattttaagacattctgtatttaagtccttaatgtacttggaaaacctcagagtctactgaatcatacaggccacgaagagccaaaatatttcaggagtaatagatgttgctaaaaattacatttgcagcgaatccaggaccaatgccagaatgatctgggaatttaaaaaacaaaacaaaacaataaacacctaatttctccttgaggagagtagaaatggagaataaaaacagaacttcctttgctgggggctctcaattctgaagctcagttccttaaaccgctaacactggctattagctttcagctgggctggttgacatggcaagacccttagaagggcacatccatatttgtgggtaattatggaatttcaacaattggaagcaaytcagggagccatcatgaggagaagaaaaaaggtaatctgtttcagaaagtccaaaataaagtgactttattatatacatattcatattcctcctctattatgcaaataggtgaagtatgtgtatgggtgtgtgtattggcaaaagactagaattttaaaaaaccaggattttaaaaaaagcacatctatgactgaattatttatagttgcaaatggcttcataataccaacctagtattattactgcaggcactggccctggcttagaaatgttatttcatttagaaatgtttctatttgttgtaacactagccactgtgatggggtttgacccgtgtctttgtccataaaacaaccctataagatatgtaaacatgaattcaattttctttaagtgaaagaaagcaaaaatatggttgtcagaacaagaactgctttctgtgggatattctagttaaatgaaagctattcaacttgaatcaattgctgtatccattctccaatacacagcagatttatatttcagaaggtttttgacagagaacaaaatgttactgaaatatctcttccattccttttgtcctacataacattccatgggctgaactcccaacgaggggcatatatttgtcagcttctgtttgcacttgttctattgtagtttgtctttgttgcaaattttccattttgaccctttcctgacaaaacattaatatatacattttggttgtgttacgacttgttaaaaaaaaaaaaaaaaaaaaccctgacatttttattctgtaccaccttgaagcacccataactttttaaaataagccctgctatttaaatcagtgatcaaattttttttgtatctgcttatgtaaacactagaaatccagggagaaaattcttccaatccaacaatccacacattcctacacaaaaccaatcacttgagtatttaaaagctagatctgtggcgagagacaggctagaactagcacaaacaagtctgtgcaagatgaatttatcctccactgcctctactccaggtcatcccaggactatgcctgtgagctaatgccaagatggaaaaaaaatggatgggtgccttttttctagtgtatttgtgtaaagactccccaagagctcaagagggagttgctgctctgcaaatgacaaaaggtgtgtagctgcaagccaatcaggcagaacatttaacatcgtcctggccattaatgactaagcctgcgccagctcaaaagcggtcggaaacagacgtcagactatgggacagctaaaacattgattctcagggatgtcgtccaagaggaggtctctgaagctgggtgtcatcctttagggtggcccagaataaaatggtgacacattatgcctcctggcgagttcataaacactttgaacggcaaagacaccaagtcccggggacttccaacgaagatcttggggcaagaagagatgtccaccagcactttctgttctgtgacctgttagagagaaacattcttagctactccatcaccaagcaaaagtccctgccaggctgtatctccttgactcctgggggaaaagctgtaaagagattgaggagggcacctaagagagagatagatggcctttgtcttgtttgcagtttcactaatgaggtttccagatataaaatctggcttctgtcaagtctaaatgtgaatcagattctgagtatttctgcaactaacaatatggtcaccagcaaactacttctgcaaagaaagaaaaggcttcataatagttattgcttctggcaccaagagatggacagtgtattttactaaaagattagccactagatgttgtaacagtagatacttaattattggggaagtaactcatggtttttgcagatacaaatgtccagcaccagctccttcttgcctagcagaataaagctgattcacaggtggctggaagagcttcttctaatctcttctgtaacatctagtagaaagacagcagatacctacacagagaaatgatctgattgtacaatcttcccatccacaaggacttstcagagcagatgacattaaatttcaagattccatataygagatcaatttgatttcctgatgttttcaaccttgctgtcatgggtgcattaaaggaaatacacctcaaaaagctcaactttaaaggtgcagtggctgcaaaatgaaaatcattctctgtttatccatcaagtttaggctccggcactataaaaacatctaacatataattttttatttatttatttattttttttagagacagggtctcactctgtggcccaggctggtcttgaactcctagcctcaggcgatcccaccgccttggcctcccaaagcactgggattcgaggcatgagccaccatgcccagcctctaacatctaaatttataatgaagcactgtttcaaggggtaactgggaattgcacatacccaagggattggactcttgcatttcttcaccattccagctccatctcaatattgttctagggggctaactcagttaagcaaagacatgtcttttcatcctacaacttcggaaacgcaaataatttctggggtatcttggctgtacaaggagatggagaagagagctgaactacaagtcagaaaatcaggtttacagcacaggctacatgtatttctaaccactggaatctagtaaatcagtcaacctcgtaggttctgttttctcccctagaaaatgagggtacttttctactcaagcagtcattatgactatccactgaaacaatttatctaaggcactctgaattctgtgatgtgctattatcagctgaggcagactcatgacacattaaccactgcacatggtctggataactgtggttttaaaggctgtagttactaaatcagaggctcagactgcagaataccatcaagagaaagggtacttttgactagtcctacaagagaaacaggaaacacaggactttcctcccagtatactctttgaagaccctggacatttaaaatgagaaagttttaagaacactttttttaaaggaagtctcatttcttgagacttcagggcaaaaagttaaattaagtgcacccttcagagacagaaactttgcgatttcaggtcaccgaatgttctctgtacagcaggacagccaacagctgtgtttggtcatttacacatattaaaaaaccctccctccaggacttmaagatgatatgaactgtgtcatggagtttagtctgaggaaggctcatatactactggtgagacccacatttcaaggtcctactcagaaagacgtttcttcattttaatgttgtttattactcacattctgctaatcactaggatgaytgaaacagctttgcagctcgctgggaggaaaattaaagaaagtagtcttcctccttttatatctgtttacacagattgttaaaatagtacggttcatttggacgatgttgagatggaaaaaaaatataacttgttccttctgaagagtagagaaaggttcaaggggttacagaggcttaaacagaacaggaaagccaaaataaaacaccgaaatttgggcttagatgccatcaccatatttccttcaaactcaatagaaagcaaagttgtatggaaagagatttttaaataaataaccatggcatttttttcttctgtcaatacaataataaacttgtcttatgggtctatgaccacttacaaaagaaaaaaaaaatccaaatcaaaccaaacaaaactgctatcttttgaaaagtatcagatcagacaccagaaaggcagcagctggggaacacattctttcccacttccttagatgaaggctgtctcccaataaaagccacaacttggggtcatacttctctctagtctgggttgcagtgacccaggcagctccagaggtgaactrgacacagagcctggaaaaggggaagaataatcaaaacaaaattcatccagagtcatttctgcctccccttggaacctgccagggcagggcaaggttaaaagggccttagggtactctcctctgggggtgctgcagcggtcaaaggacccagggcttcagtttcyaatgggaggcatttccatacctgtcagaatctcttaacaggttctgacatatggtccaacatatggtcgctcacaccatcaaccacaaatgcactccctccacctggagaaggygtcctcacctaccaccaacagtgcaacttcsagatgaagtcatttrcaacccagaggagatggatggtcaccyggccggccaactcaaaagggcacagataagattagatggacctcctaccccacyggtttcatacttgaygagcagggtttgcagaagaaggtttcatggtcaccctacccctttaagcagttctcctttccatgtggtaccttaacctaaatctaaccaaccaacctcacttagaacttcagaactactctcttccagataaaagtatctccttgggataactatctcactagaaactttcacctgagttgcagagtatgaccacgagagcacttaaaggagactgatcaaagtcagaaaacagatgttaagaacgtgaacctcaaattcatttattcattcgaygcaatagctgcatttctaaaaatcttcatataatcgraattcagtaggaattttttcaatgaggaggaagacagtcttagayrttcaaaaacaaaagcatttttcctgtattgaatttcaataataayagtgttttgtgtggttataagtgcagtactataaaacttaaatatgattgagcgaattcagcactctattacgtacagctttctttccagaaaattcatcattggacctttctttctccttagcacaggcttcttacacatttttgtcaccttttcactcactgtgtgatggacaaagcacaaagccagtggaacaaacaggtgccatagctttttccaccactgtggttcacaggaccccatgctggttcctgaccacaattatacacaccacaattatatacatcacagtccatattaatagatggaatcacatccaatttgtaacataagcatcacagggggaatgcycgtatgtattgcccattcactagatgccacatactggaaagagggcagtccctcctatcgctgggccaggaaaggggttgtgaagtattatacaaggggaagaatggggtgctatgggaacccagaaaaggtagcaaataacatagtccctagtccaagggcttcgtgaggaagagactctaagctgagatttcaagaatgagggaaaggtagccagacagtgcagagagaggagctgggttctaaggaggaagaacaacatgtctaaaggctggarcaaaaaacagagtatggcrcttgaaggaggaagtgcgatgggaccgacgtgggacgaatacagggcaacatgtgagtgatgaggctggagagataaggaaggtcctcaaaacctayggagccaggctaaggattctagactttatcctgaggaccatgagaacccagggagggagttaagaaaaacagagatgtcagcagatttcaaatackaacaaatgttcattttggcttcaaagaggaaaaacatgttggaccagaacaacaatacatctagacaggccatttaggaggtatatcatatgccaaaccaccccagctcagcagagccactcagctaaaactcacactttgagaccagccttcctcaaaaaattcaatccctaggaagttgttcccaaccttccactggaagagctatccccggagaagagctacaacaggaaasgaatcagggtagcatcgtgcctctctggttcctacatggatgaaaaccagcgccaaggagcccattccttagcagggcagcctgctacgtagcagaaatgtaagacagaagttgtraagaccccgaccccagagacttggataatggttagactttggccaggcctgagattcctgactgatctctytaggccctagtcagggaggctgccagacatgtttctacccactgctcccaggacagggctccctgagaaacacacaggtcagcaacggagggttgagaactgggcagagaggatgccacagccaggaaaccggcacagggtgggtgagaatcaaggagtgaggggcaggtgggagaaggggaaaggggcccttggaaatagaaagactgggacttcaacaggaaacagttcccaaggggaaaagtgagcagaagaaagaaagagctattcccagcaaagccatccagtggaccactcgccagcctggtgcagaatttgagctgcggtaatctcatttattcctgccaggttggccctgggtacaagtagaagaaaagagaggctgatcatataaaaacttgaaccgttgtacaacaaaaagcatcatcactgaaatgaaaggacactggactagggaagtagctgtagcaaataggactttttaaatggattaatatctagaacatataaagagctcatatacatagattagaaaacatcaagacttccatttgctaattgtaaaaagaacaattagtaaataaacacagatggaaatgttccatctctgagagggatcaaaggaatgaaaactttaaaaccaaagagcctattaaattagccaaaaaatagtaagtcccacaattattaagattgaagctagagacattcttatatcattagtaacaatgtaaattggtacagccttttagaaagcaattcagagcaagctccctctaacttagtattgagccttctgatgtgagtgtgtcctcggtaaatacttgtgtgcaaagacattcrctgcggctttacaacagtaaacaattagaaacaactcgaatgtccaaaaatgataggaaacttaaaaattaagataaaacaacctgatagaatgttatgtgatccttgcaaatgagaactgtatagctgaagttactaagaatgtttatgctaaatgggaaacacaaaactgaaaaaaagatataagttacatcatcaagaactaaaaaacaacacataaaaatgaacttgatttatggactggaatggtggaatcaaagggaacttttgcttttattggctttcctttattattgtaaggtttgggcaatacatgtttaaaaacatggtatttttatcagtcatgtgtagtaaacactcttttctgtagagcagagctacctgcggaaaacgtcactgccaggttagtggagggtgcttagtccttcccaagagctacctgcagaaaacgtcactgacaggttagtggagggtgcttagtccttcccaaatttcaaaggtccttttgagattcaaactctgcctactaaaactggctgctctgagaagctcctcctaccctgactatacctcaaatgcagcactttcctttgttcttgctttttttattcagctcttaaatgctatgccttccrtgtgtgtgtgtgtgtgtgtgtgtgtgtgtgtgtgtctgtttttattagttattgagatactaccataagcaacatctagagagtgagtgcacatttaatctttccagtgattctgtgagttaggtgatattatcatccccattcaacagatgaggaaattgaggatcacagatttaaggaatgtgacctggaccacaaagccaggagccagagccagaaggattcaagcctcaatctccctgactttaaagccttcattttcaccctccctctctgtctatgaaacaaataaattaaaacaacaaaccctctcaaatgtcaccttttctatttgcactagctgcctaaagaaactattaataattgcaatgaatcaagaggcatctgtatgaactgcttatgaattaaccaaaaagacaaggcaatgctgcacacactaattgggaaagttgacrcagaagagaaaaggaattacctagagactaaaacctgcacctgcaggtaaaaccaaatgacatcaaaacgatttctacttgcaaattaaaagcagaatatggcccttgatattactgcttagaaaagcagagcttctgcactcctcttgcaaaaaataatcccacaatcagctgaaagattctttccagttatactgcattccacctccagaaatggatgttgtttgggacatggtagcaagaacagtaaaaaggagcggaggaagtattcaggtatgaaactaatatagatggggtgataaatgaatttaggcaccgcttatgacttactctataaataatgacataataatagctaaaatataaattctaattaaatacaaaatctaacaaagtcaaacaacagcaaatgatgtttgacagaagcaaaggtcttgggggagccgggagcaagaattacaataaaatctattcatggaactgtacaatgtcagagatagaagagtcccgagagatcatttctttcaacctccttgtgttttggagacaggaaaactgagacccagcaaggtacagtgagtagcacaagtcatcctgttgcagggcaggcaacagaaactgagcctccaaactaccagtccaacagcacaccatactcactctgtagggtcctggaagactactccatttgaaaccatattttcaaaagatcattaaacattctatacatattaaattcctttttaataattttctaatgcacaggggcacattttaaaaagaagcctggttttgatttcttttggaaaactgcacgctgctcggtgtttaatctggtattgagtgaaatattaacaggccatataatggtttcactgttccttcagtaaagctaaacagaactcgaaaaacatatcccccaggcctacagtggagtttctggagcacacattaaactccacgctctgctcaacaagcccatcgctgttaagtaactcatcagaaaataaagagggaattaccaaaggggaattgccaagcaattagttctctgaagcagacgacatacaactgttacagggaggagcttcccggttagtcatatgtcagagtcagagcctactaatctgtaaataaaaatgcatcacatatgattacagctgtgatgtaggctgaagctgccaggctagggcacgaatagtaaatcttgcatcctcttctcgatttccgtgggtctgtaaaagcaagagatgttgccttgaagaccaaaaaaaaaaaaaacaaaagtcctcagtaatttttcactcagtgtaagaaagacaatctggccttccctaagccagctaagagaaagtgatctttcttctctatcatcttgacatgaatgagctcagattcattcactgttctagtgaaggagagaaaatgagactgggcgaggcaggggcagaggggatgtgagttctaagcttccttatggccaccctgactaaagcgtgacctccttttgctgcacgttttattcttagagcttgcgttcagcgccacaccaccacctatcacactggagagacaaatagttcatatctgccaaatcttgcaagctgagcaatgacccagtgaagttcttttaagagtcaaaagttcatcatctcgctgagactcttgatgctgaataacatttggatccaacttaagccaatcccctgaaacggataagcaaattgccactgtcatcattttcttcaattaataattattgaaagtgcataggaatctcaaggagatatgagtaagagtgaaagaaagggagaaaacaccacaaagcctgcatgggacagcctgtgtcagaaagctcatatgtgactgaacagacaggcaggcatcaaaagagaaggctccaaggaaggacccttccttgatcctgacttcctagactgtgttacctgtgtcatggctctttaaatattactccaagccatgccttgccttatgcactcgactgtaagcttcttaaggacagggcttaaggaacagggctgagagtgtagactgggatccaagcacgattctatcacttaacagctgggaaaccttggggaaattattcaccctctctgtgccacagtttcctcgcctgtgcaatggagaaaataatgatgcctacctcaaaggactgtaatgaggattcaataagttaatatgcagaatagtaaatgtgaactattgatcatctccatattccctagagggccttgttggcataatgcgtctcatacattagatgctcattaaataattgcagacaagaacgatctgcccctggagttgtttgctccatccctcttgttcctgtcttaaccttcttgtctttgatgaaagttaaataagtcactgcttttattctgagcccttttgggctacacagagagcccatcctaactaactcagcaccaaaaaaaaaaaccacaacttaatcctcaaattttctctcattacattaaatcagactgctcactaacatcatcgtaacatcatctccagccttctctttcactttacatcaggaagtcttagactaactttctccccagacccaagattcaccaattctatatctctttattttctataaagtataaatgggaagccaaattgttcaaagagctgtgtctagtagctaggtatatacagtatacacgcacgcacaaaaacacacacatctcacattttaaagagtctgcagaaagcctccagggaatcctctaaagttacaaaacacacccaaattaatgtggtttatcaaagtacagtaaatgaattgccacaaatgaacaattgctacagagtcaagtagatggcacattgtgatttacgcatatcatgtgagatgaataaatcaacggtagaaaagatcaaagaaatgctggaattgttgttaaracgtacagggcttcactgaaaatcttaataaaactgtttagaggaaaatagaaggatcatttgtttaacgagataccgcatacgctgaatttcaaacgcagcattcatttttatacacacacacattagatttagctaaaattagctcaagttcctatttttttaaaggtcttaaaggaagagaggttttgacaagatttcattgaactgtagttcagcactgagtttccaaggtgcctgagctgcagaagagtccttatggcccacgcatacatcacccaactcctccagccacccagcctccttcaccccagatcatgaaaagaaggcagacgaaggccatgccacatcaatgttgaagctactctccgctgcctcttaccttctctctacacattctacaccagctgacgtcatccctgaattcagtcatccccctcctgbgtgtcaaactttttgccaggcccaagaacccaatttcaaagatcacttttatgccaaggactcctccaaatttatcttcagacttgacctctcggcagttttattcccatactctctactgtctgctcgaatccagaaattcagatgtccaccagcacctaggcttcagtcaaaatgtcctggtcagttacataccgtgcattggcttgttatgtcccagacacacacatggccttcctcatgctccatccatctcttcccacagaaatgcaatctagtcagcagagctcaactcaagtgatccctcctcctcaaagtctttcctgatcactcctactcagcgtcactcttctgaattccttcactgttagaacactgttagaaccccattctattcgtattcattatttcagagagtttcttctttcccctgcctgaccaggaagaaaataactgccttccggtagctcttattcacttccattcccacagcaccatgcagtagttttaaaaaaattcacaatgaataaatgaatgaatcatttctttacataaatagtgactgtgaacaagttaggtcataacttgctatagctgtatcatatttataaaataactagaaccagaaagaactataatgtaggtttaagaaaaaaactgaatgaatataaaagagtacaacatgaatgatactatttttctgcctacgttgagccgtcaatcgtgaggactgtaatgaggccattattgatgcaaaatgtttagataatgcttataagctttctttaaatgcaatcatagaaaatgtcagcgcttaaaattcaaggtgactttgcgctacttcstcagtattttagtattcataagacacttaaacttgcctaacataytataaaaacctaggtctcttctcaataagctgcccatattgaccaagagatatgactttttgctgcctgttttttcacaataaaattcttgagatatttctgttatcacaaatgactccctttcaacaccacaggttaaaaaaaatgcacgtgtactcaacccatytgcaattaaactatttccccaaagatctaaatgtgaggattttcagcctagcacataaccgttaaaatgagtatcatccctaagagataaagtagcagtaagacactctacctttttcttttctttcctctcttttttttttttttttttgagatggagtctcactctgtcgcccaggctggagtgcagtggcgagacctgggctcactgcaacctctgcctccaggattcaagcgattctcctgcctcagtgtcccaagtagctgggattacaggaacctgccacaatgcctggctaatttttatatttttagtagagacaggatttcatcatgttggccaggctggtctcaaactcctgacctcaagtgattcacccacctcagcctcccaaagtgctgggattaaaggcatgagccactgtgcctggcccaccctacctttttcattcagctgacacttgtagatcttaagaggcttacctttgcatgtaactttaggttacatttccacttaaagaacacctctctaatccacagccaataaaatgtaaggaatccagttccatattttacaagagtatcgtgtctgtgatgactcttccctcctccaccttgtcccccactgggacttttttggctgtttttcctgaggcataatacttcagtcactcaggtttttgtttatttttactcagaccacaaataaccacatttatgcatgcaattcatcagttcattttacaacaatctaaaaaaaaaaaaccacacatgcatcccatcagtcagagagttgtgataaattcagaatttaaaattcagcaaaaacaaataaaaggctccttggctttgcagagccgtagatgtctacagggtgggtccaaagaccaaggtccaggtatatttacatatttctagtcatgtatggttcaggagcaaccatcataaaacatgaccataacaatcaacctgttgagggataagttacttgatagcatctgttaaaagatacaaaccatacaccaggtactattctacccacagtatatctactattttactccagtccatcctcacagcagccctataagaaagttctaatattacctccatcttatacatgaataaactgaggcattgaaaggacataggactactcaaggtcatagtggcagctccagatcttaagtccagatgggttgattacggagctccatgctcttatctaagatgccagagaatttatatgtaacttaaaaattggctcttacggtaaagaggcagctctttcttcaaagaaatctggtcaatyattgtttaaatgaacctgttataaagcaaatatccatctacctcttgaaaaatgagttttgaaaattcaaattttcaaatgggagatttgctaaaagtagaatgagcttctcaccaactaagtctacagaacataacttaggaagagttgctggaagaccggccgacccaggggttcccaaacctgtggagcatcagtgcctagacagatcaatgattccagcaggaaacattctgattcatcaagtctagggtggagctccaaattctatttttttaagctctccaggtgattctgttgcctagccaggcttgggaacctctaatctagtctgtcttcacagtttcaagcaggtccatttccaaggcaaatagaaattgatcccctattttctatttcacaatctcccttggytacatacactcaaacccttgtgttcccaagcccttactgccccaagttctagcaaacctctttttccttcctgatttaatttgaggcaatatcctctggccctttcttcaatagagaaccatgagtcatcaccattgcatacaccctatgtctgcatgactctccaggccagaaaaacttastgtacgtgggaaaatcaggaagttgtaaaatccaaacagacacaaagaaattcaagattcaacaaatactggttcccctaaacaaataggtctctgttttgctacgcacatattatactacaacagtaatctaaaatgcaaaaactgtgacttaagatatctggtagcatagcattcttaattgtattaaggaaaactgacaattaaaatgatgaggttcaagccccaattggcaattatcaatcatcgcaaagtcaaatgaaagtcttcatgaacatatagattaaaccaaatagatagatactttaatcgaagttttaaaaaacaatcttggcaatttctcaacttcccacactatgcccaaacagagtttgcamagaaaatgatattcaacagccaacaaagtaagggagcatggctaggaggcaattttccaggtcaggactttatcctcagatggaaaacagagagcatcgcaaaactctcacctgacatgtgatgcacttccctgtagtggcagtggaggaggagattgctgtacaaggatgacaaacaaatctgcagcttgaatggaccaccctggtgacttgatgcacgatgctcctgcaatggtcgagggagtgcaggagaggaaatccaaaatgaaaaacagaatagactgctttaaaaaataagtccaccttaagtgtctatgcaccgaaatacaaattttaagaacatcacattcggcattctgttgtatgagaattacacagatcccagccagctcaaaaggcaggtctggttttactcaacaaggctcagagggaggccaacatacaaaaaggtcatcccttccatcaaattaagaggatggtctccccatttgagccagccgctgtcattcttttctccaatgattctagccaatcatctgataaacacatgctggtaactacaaggagtatcaggtgaaaatgggcatggattgaatagtaattgagccaaagcctaattttaatgtggcatatattatctatcaacatgcaacttgaaacacaatgatgaaagtgcacagctattagcataccagtccaatggaatagaagaaaggaaaaaatgcagaaaaaaagtgtaaagtgtgcatttatattcactaaactttccactaaactttaaattatttaaatactgaatgtacatctcattttcattttgccacaattccttgcacatggttaagtaaaaattttccattgtatgatgaatgagtgaatgtgtgaatggatgaatgaaagaaagaatgaatgaatcttccatatacctttccatcagggagcttggtgcttgtagtagtttttgtgaggtaaaacctatgcatagaaacggaagaagttgaggactcgatctgctaacrtatttttttagccctatccattaaaattatattcttaaataccggtaattaccaattatccacattaaacagaaaaaaaaattttttwaaaatcagtagcagggttactataaaatcatccccaaactagtgaatgctggactgattttcagtctttgattactggarctgatctgcacatttgcttaggctgattttaaacttagtttgggtttcctaagctcacgccaggtaacagtaggaagaaggaggcccaggtttatattggatgtcagaaagaaactattctggagctatgaatatgatctccaatgtgaataatccgtaaacaggtaagtgagccaattatccttgggtacatggcaacacatctcggtactcatgattattttcatccatacacactcactatttttaagagcacagcccagctggaaaggaaaataacttccacttctttccagcacttttcaaagtaatgaacagtagccaaaatgttcttacttctaactaatccattcaccaagcatttatttaagcattgattgcctgccgaggactgatatgcaaaagaaggaattcttgtagtccttggtttccccacatgtgatctgtgcgtacagagaaggaaggtaagctgttatacactataaggtctttcagatctttagaaggcacagtccctccaccaagaagcctgttgagttacaaatataaataatggccaagttaagtagaagttgacaaaattctatttaatcttagtacttctttaaggatgaggaagcagggagggaggatcatgatgtcatctcaaattaagcatcaaaatacttgattctcaaatgaggtgcaggtaccataaatttacagacagtgctttttatgagctcaccagttgggagagtgtttgcctatatgacaatgtgtgtgcacacaatcctgtttacatatcacctggcagataaggttttatagagtccaagttacaacctcctcctagtttgctgaagtgcagaggagggtcaaacatgatgtaaatgccatagaagattactttactcttgcatgagtatgctttcttatttcaaaagtatttgtgttgctgcactagttaggataatacagagagtttacataacttgtattccatcagagggaagaaggcaagaatacaagcaaggcagcacrtattcactgcaaaaacttacaaaataatataccagaaaataatttataggacattttatacaataatatacaccaaaaatggaatactcaatatttttaaaacccagcagagcaacataatacaatactattaatattggaagattaacaagaaagacggcctaaacaaaactgaggtaatggtcagtaagtaccaggagataatgtgagaraggggaacaaaattaagggcacaagaaaataaagtttgccatacacagtgacagaaaaatatattttctttgaacgttagaaggatagatgctataggttagtagctacaataactgtcacgaraaacttctgctacctaactcattcaaaacttgtcatgttaaagggcacctaagtgtaaaaaaaaaaaaaaagagttcctcttagcccaaatcaaaacatcacaatcggggaaacctctgccctcttgagtctcaaattctgagtacactaccatgaattttctggaaagtaattttcaggtaggatacaatttttgcttacattgtggcaattatcattacattttcattactccacaaatgggatgcattaaaagttacagaaaaatcaatgaaacatttctgctaacatgaaatatgtcaaacaaaatataatgcttgttgcttttttgtccataattgttctctctaaacgtgttttggtacatttgggatggtagtaatgcgtaatacaaatatttatagtacattagcctgaaagttcaaattatgagcgttataaaatatattactacactaataaagacaaatatccataaatataattataaaagaataaaataaaaaactttccataagatttgtctaaaaccattctttttattacttctgtaattttaagcatttatatatttttaaaaatctcaatgtaattaccgttctttcagccaacatttaaaaaattctgtaaaactgacactgtatatcacttcttaaaaaaattttgaatgagtacatttattttattaaactaaattacatgaaaataaaatgtgaacataattgatgacttaaaattcttatcttagaaaaggaagttctatatgtaaggtcctaaaacagaaattattatttctattaccatttctacaatgtattgctttcaatgcttttatcaaaataaggagggcctgcttctgataaccttggaagtatgaccagaactaaatctgttatttgaagcaattaagctgcacagatctaaatctctcacagaaactaatcattcgaactattgaattactctgaaaatacagagcaaggaaagtcaaataatctatctctcccctaaaaataatagcctgtcttacttcactattgtcactttaccgatgcaagtatttaagctgttcagatcctaatctatgtgttattttcagataactacagtttraagaattaacattcactcccacatttacctacttacgtgagtttcagaattttagtaaaatatgtttattgcttaacttttaataggaaacaaaatgagtgttagtgttagtcatcagaaactgtcactcaaggtatgtgcaaaaaagtaaaatccacttgacatttcagaatgaaaaacaataaaggcacaacattattcaaagaaatgtgcgtccttggactccataatgacaacaaaaacaggagtcatagtaatgtttactaatatttcaataatctcagcactggcctttcccaggactcctaggcaactgacttaggtatgttgaaacttacaggcatttgacatgtaatcttgtggctaaagagtttctgtttaatcttcctctaagtgtaaaagacaattcagaagtcctgaagtctagtcgtaacatttttgacaaagtgtcacttctgtttaccaaaccctcttaaaacgaaatccgcaaggaaaaatattgcctttggcggttcccaccaggtacatttttttatacttattttcacatgaatttatttgtgcactgaaaaatatatgttcacattttactgcaagtaaagcatttttctatatgttgcaaaatagaatccaggacctccaaggcattgtgtaatattgacatccttgcttcccatctatttaccaccttataaaagttgagtagctagaagaaayaatagctcattttaactacagcagtgcttcatctgaccaggccacaatgaatttaccaaccacataaactcacaaaacggtaaaaactcataaaccccctgggaatagagttgagtagctctctcaatcctagccctgggggaaaaaatttaccagtttagctttgttggccataaaattgtaaactgactggcagtcacaactaaatcaagacataattctcaattatcttttctttcaaataccagggttatgaaaatactcccccccgcccgccccctgccccacttagttggattgcctgagcagcacagagcttcagcaactaaagcaacttttccttttttcctttttgccataatattatttctctttgcttagccagcttyatcagtggtgccctaatgcaaagactagaatactgctttctaactgctcactaaattacatcctaaaataaagtacatgtttattgtccaaaagcaccatgcactatcagtcctctagctataggcctctatcgtttctcgcttagctaaggaaaaaaaaatccttttaacttactaccaaagatcattcaaatcacagccaatagatccaaattaagaatgaatacattcasaatgtctgcctactgtcagtaccagtttttgttatgatggctgtcaagttttaaaatgtgacaatgggaatatattttcygaataagttattcccctgagtaaaccctttagaaatccagccatcgctatgggcaatggaggttccaaatgatgaacgctcttcacacttgaaagggttaagtgactgactgcaaggccaaaggcaccagactgcaaaagaaatgttgctttagtgagctctgaaaggtttctaacaagtaccaaatacttgttgatctgttcacaataaacaccagcaggattgtcaggctcctttcactgtctggggagatgcatttacatactgcacctaggaagaacagcttgttggtctcctttataaaagttgagtagctagaagcctcattcagtgtctcccatccaaatgactgaaagaagatgcaattgaaatagtggagtctctcgtctggcttgggcagcataaatgctgtgcataaaacacttggagtagttcaggcacaagacaaacccacctgaatggacgaggaacactgtctgttgccatggcagcctgatctaattacatgagtgatcaggactggagtaagtgcaccgaaaacctacaccactgacaggcagccaggaggttcaggggagcccttcaacctctgctttatgtagaagatggcattcaagtccatttatttgcggagctgctaaaatattgactgatgcatgcacagtgagagggcaatcagaggagattaaatgccacagcgctagccgttatggtgcaatccctttccaagagttcctgtgcaggattttctcttctctctggtggtttcctcagacataagcttcactccaaaaaaagctcaagtatcaaactacctttacccatcaaataaaccgaagggtgggcttaaggggggcttctaggaactgcagcctcctaaaaaacccaaacagaaatgtctcagctaacactgttgaaaaagtaactagctgtgcctaaaaataaccaagtaactacccactgctgtgtgcaatatataacaatgatgtttaaatattaaaaacagcctgcattataaaacacaaatgtcattgagatgtgactactagattgccaaaggagaacttatttgcatacacacattcccgtgcatgcacgacaggatgtgcagggagaaagccactgtaaggcattagtttttattctgtgggtgtaatagggtcttctaattttgctaattgtatcctgtggatctcgcagggaagctaagaatctcttcggggacagaaccagtttggaggagtccctactgcacagcatacggtaaacaaaataaaaatagcttgcctttcttgttagccacatcgcgcattatataaccagcttcttccgactgttttttttttttttttttttttttttttgcccttactactcttcagcaatttccctcttctcaaatatttatattacccttttatctgtaggattatataccaagaaagcaaaacaaaacagagcagccacgggctcgaaccgaatccccgccgtccttagaaacggatttttttttgttttgttttgttttctggcagagtctcgatcaccaccctacttccacccccactaaggttcttgctcaatctccctagaaaacctgaattgtttcatccctttcagtcagccccctacgtggtctgaaacaaaatgaaagcacaagccacggagtttaagaaggcagcctgaaggcggggggctgaagaggggtcggggcgctgcagagtcagccaagtagccaaggaagggccccctccgcgtcgcgacggccctcgccccccgcccggcgcgcgcgcgcacaaatacacacacacagtcactcacacactcactcacactcacgccgcgctccgacaccgcctcacctctcgctccgcccgtccggcccccttccctgccccctgcgggaccggcctgcgcgcagcactggaaccacgtaggaggaggcggcggcgcccccgggagtggcagagtctccggcccggcccagagtgaacgagcagtggggctccagggcgcatcccaatccccgcagcgcctcctccgcggcggccgccgcctcctcctycttycctcctcctggcttcattcaccctcccagcagccgcgcagccgttcactcccggctcagggcagcgcctgccgcggctcctcgtctcctgccgcgggtgctggcgggggcgccggcccggactggggcgctcgcgggctcccggctccgggcggcggctgccgctgcacatgatcaggaagcggccgcaccaacagggcggcggtggcggcggcggccagggccgtcaccgccactccagccgcgctccaggcacccgcacacccgctacccccgcgcggtccccgaggccacccctctgcgccccccgcccggcacccggccgcgcgcaaagtcccgtcccggctgcaggagcagtcccttccccgcccgcagccgcacacccggcgaggccggccctccgaggggagacccccgccccagggcgcsgaggccgggcgaccacccgcggagaagtccagccctccgtgagaccccctctctctcaccgccctctccggggaggaggaatgggaagagggcggccgggaaagggaccaccccccaaccccagccgcygcctcccccctgcgccacccggagggaggaggacatggctctccgcactygcgaccggaccagcagccgggggagcggggcgccgccgccgctctccccgcccgcgccccccgcccgggcgcgccccctagcccggcgggcgcccacccagcccctgacagcccccccgccggccgcccctgcgcccagagtgggggtgtcggcccgggagcctggagccggggacggttgtatgtacacacatacacacacacacacacacacacgcacacacacagaacacgacgcgtcgatttccttcgctcctcttccagctgttttccgtgcagccgattggggttttgggtttgtttgctggttgttgcttttgcccctctcgggagatcgggggaggagggattttaatctaaataaggggagaagggaatgggggaggggggaaagaatcggaggaggaaaaaaaaatagtcacttactgtaaagtgtaaatggatctggggttgcgtggggaagggggggcagagggagagaaacaatgtcttgcggctgctgttgctctggctgctgctccacggggcttgttttggatccccctgcagtgaaacaggtcctgtacggctccgccactgtagtagaaatgatgtctgcggtatactctgctctctcctcctcctcctcctcctcctcctccccctcctcccgctcccctcccctccctcctccctccgcccgcccgccctccctccctccctcgcgctctctcgcgctcgctcgctcgctcgctccagtatgtaaatgtgtaatagaagccaaatatggagcagttggctgccgccgccgcagctcaaggatccgacttcatgggggtggggggcaccctctggcgggcggcccggcgagccgcacagagcacggcgagcgcaccgcgcggcggccggcccgcgcccttaacccttcgctgcgcgccgcccggggaggcgggcacctttcccaaagagtggctcgggatggggtgcgggggaggggagacgcggaccggagggcaaggttccttccaggtttgggaagggggcggggagctgggcgatgaggtaatttgagcggtgacgggtcggtcctcgcgcgcctccctgggtccctgcacctagttggaggggactgaacgacaacggggcgctactcaggcaacctgggggactcccccaagggctgtcaggcttcagctgggagccgatgcaacaccccagcggggaggggaggtcggcccattctaatcccgacgtgtccttggtcccaggcgctcggagcagcatctgagagggctcactctgatcatcagctgcacgttaagccacaaaccggcgtcgcttcggcgttccggaacccaggcctgggggccgcggggattgcctctgcgtgcaactccggaaagtttcaaggggtcccccgactgcacaggtaccctcacctttcctgccggcgaacgctggcgaccgcccgaccctgccctctttctctcttcgcacgcaggtccggaaatcggctttgatatggaactactccgctctagcctggaaaggagacccgcgcactcctctcgcagctaatttcggatcattaatttaatcggaaatgaggtaaccagtgtaggagacagagaaagcaaccggagcatcaaatggcagttctcgagaatcgacgaggaacttaaatctggactcagggtttcagtgcggtctccgactcccaccaccccgcccctccgcctgtctcgccgccaggtgtgacctccacgcgaaggaatcttcttcggatgggtgcaccttgccaacaggtgtggcacctggaggactaggaggcgcctccagactaagggcgctcagtgcggcgttcttgttgcagatgattctggaaggccggtaggtgtcgggcgacatttgaccttcttcaggtgcttagaactaagtgtctggaaacatgatcctttcgcgtaagtttctttctgaaagccaccaatcttgactgtaagctgtatttgagagatcttttggctgagtttacttatgacctaacggttagtcaccaactgaggcagggcacaggatgaccaaaaaaaaagtgtcagtttttacacaactctggcctgcaagagcctacgtgcttcataaataaaaataaacatacgagcgaggaaggtgcagagccccggaaatatttttttctcacatttttgaaataccatgcacatatatgtggctatttaagtataactactagtgttcactcttactcatttctacaacttttttttttccatttaaaaatcgattattgttacggtttaaacctcgggttggtctaaagtgacattgttggtctcattacagcctctagtggacagttaacatcagtttcctgaaaaggctctgactggttttgttttcgttgacaagctttgtcaaggtgaaggttagtacgtaagagcataaccgggtaaaatgtcccctcacccctatcctcacccccgcccccaacaccctgcttggcaaagacgacttcagaaaggagcagaagcttgttggctttgtatagaaaagacgtatgctttgtgctgcaggtattattattactggactgtgaataaacagaaagcttctgctattcatttcagtttcagacagctttcataaaaactaaattcatctcaaatatttttataacagaaaatattggttgccatgtttttggcttaactgcgatgtttttattccaactcataatctgcaaactgtccaatccacctccactctatttttagacatcttacatttagataattttcagttaaaaaaaagctaatattgtaattttacgttggcacaagcagttaatttacgtgattttaacaaccttaaattaaaacacataattcagattacagttagtcaattaatttaaatgttctctcaaggaagctaaatatgtatattacccaaatggtaaaaacaattaataagaaatgtgtcatttactttcttagccattaagtttaaagccataaactgccaccaaaatctgtaactatttcttcctgcaagatccaacataaacaccatactcatgaaactgtctcattacctttagtactgaaatattttgttttcagatggcaaaatattaagtgtacaatcacaaataacaggcactgattctttagaaacaagactttctcgtgcaaataaaaactcaatgaaaaagggcagagcttccaagaagctagtagacaaatatatagtactatagtcctactcataaggctggtgttatgtttgtaaaagcataagtcaacctttgaaattacaggaaatcgataaataaggcctgatgagcttgactcgtatcctgtgtcatagattgcttaaataccatgaaaaataattgtaatcacatatctattttactgttttggtggtatctactcttgaaggtgttaaatgggccagcaagtatatattatataattacatattacacccttacttaaagtgtagttttcaaagtcgccacagcagcacttgggagctttttagacattcagagtcaagggttctaccccagacataccaaatcagaatctgcctttgaaccaggcccctgggtgatttctaaacacattatcatgtgaagaacactggtctataccacagggatcaacctaaataaatttgggcacaagtgcagaagttaattcctctatttatttcttttttgctcctttttagtaagtacagcccttattaatttgtgcttttcaatgaaaaattattatgttatatgctttggataaatactactgcactgtaagtgcacacatctgcatcattattgccaaaaaagaatgctctgctgaggaatgtactggggtcttgaacatgaacattttcttcatggcagcagagggagcacaagagtgcttaataaaaccagtgcacaggtctctccaaatcatgacagattttacattgtagtatatgttttcattggaagtagcctgttatgtagttcaaaatgaagcaaatcaactgagcaaacacagataggcttaccaggtcataacaactatgtaactgaacagattgaaagttgaataaaataaagataaacttctttagagttttaggcttgaattcttaaaagaaagtggacctcaaaagtgaaaaagatgccttagctttgctcaaaaacaaagataacacaacacagaatcaggcaaccctaagatgccttagctttactcaaaaacaaagataacacagaatcaggcaaccctaatagtagctcctgtttatctaaaaacagagtcagttcactggaccctacatcaggtaacttaatttcatttggtgtcatacatgttggttaaggtccatgcgccttttgctgtgtttacactcagaataattttaggggtttctccttaatgcttgcagtggtgaggatttaggtttcagttatacctacgtagtatttcatacttttcactactcttccatattgcatcctcaaaaactcccttgaagcagataacatacttggtaaaagccaagtatccaaaaagttatggaaccacatcgtgctttcataacattgagtcatttaattgtttcagtagtgctttgaggtattcataaatgagggaaattatacagactaaagatccagagcattttttacagttttaaaggtttttcaaagttattcttagataatatgtttatatatttattatttatttacaagcagtcacttactctgcatctacaataactaagacttgagaatataaaattgagtaagacatcttagtgtgcaaggagatcagagcagaacagatcttacctttggaaaactgttaatttttaccacgttgaaacacaaagattcatagttgatgcgatccagcacctgccagaatcatagcaatcagacttccaaatatgagaatcaaacattagaatcattaaaaatttgagaggcgggggggacagttgtacaactcttgagcaaaagttgacttataagctaatattaatatttcaaatttgtacgacaaacaaatgtgaagatataatgtgtattttatttgaatgtcttccctatcacaaaatcacatgagtaagttgagttggtaaacatttatttatttttatcttttctaaaatgctgaaaagaatttttctcccacactaaagagggtttgccaagtttctgcctggagcaatttgttatggctgtgtaataaatcccagaaagtttgaatttttaatggaaacactgacagaataaagagggtgtaatcctacatatgtcatttaaaaatctgagcaaaccatagtgtgcttgcaaaacaaatatactttccttagattgcactcacaaataaggctggggagaccacaaaagtaaaacaaactcaaaagtgaaaaacactcacacaatagactctgaggtcagctcaccacacccagactaaagtcactgggctctgtgcgtgtcaccaagactcttaaaagacatacttctgaatcatctttcttgaccctccaccaaactgtagcaagacaggcttcctgggaatgaaaatgacattagcattagtcaagagtgaaattaaagtcattgtactcaaacatctgccaacagtctgtgatttcatagtacccacctctgaaataagactctgtctacaattaaaaacaaagaaaaaaaggtactttaggtcttcactatccactatgtctactgagcacttgaaatgtgtgattagtccaaattaacatgtgctgtaagtgtgaaatattcctcagattttaaaaacttggtataaaaaatacatattttacatataatatatattattcattattcctatattattaattttatgtattatatatacacacatgtaatatctccatttttacattgattaaatgttgaaaatattgggttattttttaatagtgtacattgggttaaataaaatatattattaaacttcattttacctgtttctttttacttttttttttgagacagggtctaggtctgtcacccaggctgcagtgcagtgcagtagtgcagtctctgctcactgcaacctccacctcctgggctcaagtgatcctcctacctcagcccctgagtagctgggaccacaggcatgcgccactacacccagctaatttttgtgtcttttgcagagacggagtttcaccatgttacccaggctgctattgaactcctgggccttggcctccctaagtgctgggattatagatgtgaaccaccacgcccagcctctttttacttttcttaatgtggctactataaagtttcatatcacatgtgtggaagggttatatatttcatttctaatgaacaacactgatacagatattggggctgaggaggcacaggaattggttctaagaacccagtttaagatcttagactcccagcatggctccctgcagtggtgtggtaaataacttatttttctgccttccccatgttccccccttacactgtgtaacacagaacttatcctactctgttataatgatcactgagagtagactgtcggtgaatgcgtgatctcactggtagatctgttaca

SEQ ID NO: 98017 - DNA, 24038 bp, Homo sapiens
gctttaaatgcgttacctcccagaagagaaaagttgggactgggtgcagtgactcacacctgtaatcccagcactttgggaggccgaggtaggcggatcacctgaggtcaggagttcgagaccagcctgcccaacgtggtgaaacttcatctcgactaaaaatacaaaaattagccaggcatggtggcgagcacctgtagtcccagctactggggaaggtgaggcgggagaatcacttgaacccggtaggtggaggttacagtgagccgagatcacgccactgcactccatcctgggggacaaagtgagactgtctcagggaaaaagagagaaaagtttggctgcagggtggctgtcaggcgtggcaggatccagcagcttatgtgatggtccccatcctttctccctgtgcccctctttctcctctgttttcctctgctggctccttcttggccttcttggtaacagtgaccacccctagcaagtcagtttccagccttccagccctgcagtcccagggccaactcttgtcagttccagctccagggagggatcagcagagaggacatcaggcaggcaagccgtctgtcaaccctcatcctgcctcttttttttttttttttttttgagagtctcacgctgtcccccaggctggagtgcaatggcgcaatctcggctcactgcaacctctgtctcctgggttcaaacaattctcctgcctcagcctcctgagtagctgaggctacagtcatacaccatcatgcccggctaatttttgtgtttttagtacagatggggttttgccatgttgggcaggctggtcttgaactcctggcctcaagtgatccacccgcctcagtctcccaaagtgctgggattacaggcatgagccaccgtgcctggcctgctgcctctcctttctaagctgcatgaggccactgtgctaggtgtctcaggggcgggtgggggcaggaacaccttcccagaacctgagagctggaggggttgacaggcacatccttcccgccaggacctgccagattctgtgcatgatgctgcgcaaattcagcttccccaccgtggctctgcactccatgatgaagcaggtgaggccaccctggggcccgccagcctcaccctgggatacctccccgcctcagacattggccccgatccttccttctgccgggcgccttcttcctgccacctggtctcttctggtcccagaatatcgcagctcaagaggccctccctgaccgcatctcttttagccgtcattcatttgtcccggtctgacttctcatggccaccttcctcaatggacggctggggactgtcccggcctccaccctgtcccgaggcctcacacagaaaaccctgccttcatgcattcccaattttcttcccaaccctgtgcagaaagaacgctttgccgccctagccaagttcaagtccagcatctaccggatcctgatcgcaacagacgtggcctcccggtgagcagcccccagtctcctgccaagggcactccctcttttactacaaggccccacagatgagaaggctggcctcaggcatgtcaggcagccctagcatccctgctgagtgaccctgggtgagtccttgcctcggtttccccacatggacagtggagctgaccagccacctctgcctccaggggcctggacatccctacggtacaggtggtcatcaaccacaacacccccgggctccccaagatctacatccaccgagtcggccggacggcccgtgcaggtgagcagtggagggggaggccgagccttgggcctctgtccctccagcctgcccagcaaattcaggtggtaggacgtgggtagggtgcagcccacagatgagagctactcagggccatgtttgcaagttggggagttgtcctttctaaagcaaaggtgaatcccagctactcgggaggctgaggcaagaagatcacttgaacccgggaggttgcggcaagctgagaatgcaccattgcaccccagcctgggcaaaaagagcaaaactctgtctccaaaaaaataaaataaaataggccaggtgcggtggctcacgcctgtaatcttagcactttgggaggccgaggtgggtggatcacgaggtcaggagttcgagaccagcctggccaacatagtgaaacactgtcttactaaaaatacaaaaaaattagccaggcgtggtggagggtgcctgtaatcccagctactcgggaggctgaggcaggagaattgcttgaacccgggaagcggaggttgcaatgagtggagatcgcacaattgcactccagcctgagcaacagtgtaagactctgtctcaaaaaataataataaactaaaataagtaaataaaataaaattgtaaaataaagcaaatgcaagtcaggtgctgccttcacccaagccaggtgatgaactgagcagtgtggggctgccccctgggagggtgcacacacagctccggcccccactacttgctgctgcctcgtcagggaggggcatggtgtccatgagatgctgtcagttctgaagccaggaaagatgtggttgctggggtcggactgggcctggaccttctatcctgaccctgtggtgctgggcaggtcacttccactccctagacctcacatggtggataatgagaatggtgacgtcctcgtggggctgccatgagggtcacggaccttgtccaccatcagtgcagtttcggccctagtcaacgtcacagaaaacagcaagcagagatcttgggctgaggcccgtcagggctaatggctggcattacttagactgggttccctggcagccaagccaaaaagggaaatcgggcagtaactaactgctgtgtaaggccagactggcagacctgcctctccccagcgacccgtcctccacacagtggtcctgcttggggtcaagcccagacactctgggctgatccctcccaagcccaagcccttgttcagcatctccaggacccctgagctgtgtagctgtcaggatctacctttattcgccccatgtcctgacgcccagcacatagcagataaccggcacatccccacagggcggcagggtcaggccatcacgctggtgacacagtacgacatccacctggtgcacgccatcgaggagcagatcagtgagtggggttggggtgggtggtagagaaggaggggtggggtgggcagaggtgggcacctcggggtgagacccattttcccgtcagacaccagccggcctgctcccgtgagcagatttaggctggggcttccttccctaggcacccccaaaagaagttcttttgcccatttattgaaacaaactccccatagttgtcgccagcagctgaaagccacatcagtcaggaggggacttgggtttcttagactgagatgtatggaaggtccctgagatgtcagaggccccattgacagggcctggcctgctaaaaacccctgggaatggtttcatatgcagccaagacagagacacttcctaaggtatctctgatcactgcatagactgtcctgaaatttagaaacatctggacttggccaggcacagtggctcacacttgtaatcctagcactttgagaggccgaggtgggcggatcacttgagcccaggagttcaagaccaacctgggcaacatggtgaaaccccgtctctactaaaaatacaaaaattagccaggtgtggtggcgcacgcctgtaattgcagctacttgggagggtgaggcatgagaattacttgaacccgggaggcaaaggttgcagtgagccaaggtcgcgccattacgctccagcctgggtgacagtgagactctgtctcaaaaaaaaaaaaaaaaaaaaaaagagaaacatctggactttaaggccgggcacggtggctcacacctgtaatcccagcactttgggaggccaaggtgggtggatcacttgagcccaggagtttgagatcagcctgggcaatgtggagaaaccctgcctctccaaaaaatatagaaactagcagcacacgcccgtagttccaactactcaagaggctgaggttggaagattgcttgagcggaggctacagtgacctgattgagccaccacgctccagcatgggcgacagagtaagaccctgtcttcaaaaaaaaagaaagaaatatctggactttaaaggacactgtttgcaagaaattaatattcatggttaaactcataatgctgctaacaccgaaaaaaaatggcggggggaggctgaggcatgagaattacttgaacccgggaggcggatgttgcagtgagccgagatagtgccactgcactccagcttgggtgaccgtgagactctgaaagacagcggtccataccttccttacctcagaaatccctgatcttgctcagctgacccttacctgatatggccccagatggccttgcataccccacagcatggggaactcactacttggctgaactccctctccatgtcacgtctcctccccacccccacccccggctttgctgtccccacagagaagaagctggaggagttctccgtggaagaggccgaggtgctacagatcctcacacaggtcaacgtggtgcgaagagagtgtgagatcgtgagtgtcagaggcgggcaggaactaaagtgctctccagggccgggggtgctcccttccaggtggggcccccgtgaccagcatctccttaccccacttccctccaccagaaactggaggcggcccactttgacgaaaagaaggagatcaacaaacggaagcagctgatcctggaggggaaggtgagggccgagcccgcaggtagggggtgggtggccaggttccctggcgggggccgccagctcagccatcccctggtcctccctgtgccaggaccctgacctggaggccaagcgcaaggctgagctggccaagatcaagcagaagaaccggcgcttcaaggagaaggtggaggagacgctgaagcgacagaaggctggcagggctggccacaaggggcgtccacccaggacaccgtctgggtcccactcaggcccagtcccctcccagggcctggtctgagccccacacggccatctgcccagtccttgactcgtccatggagctgagggtcggaggaaccttccttgggggcagcagcccttcccgggggcctacccagtgccccacagcagaacccgtgggcgctcgtgttgtgcgggccctgctcctctgccccgaaaccactggctggtcccttccctgagccctggccaagattcaggctgcaggggaagaaagaacatgaccgggaggttgtgaccccaacccaaggtcaccccccaggggtgccgcatacaggaggtgcttaataaacgggtcttttgacttcctcagtctgactttcgaagagcagggggacaggagaggtggggtgcagccgctgttgtttctcaggtgtctgcccagaacaccatgtccatttccaccaggcaggcccaaagttttgcagacaccagctgctcgaatggccatgggattttgggccctgaagccccttctctgggcttccagtttcctcatctggagaatgggcatagcaactgccctgctctccagaggcagctgtgaggctttggtgaggtcagtcctgtgccgaatgggtgcagctataagcttccctggccacccacctggccacatctggggtttgtggccagagtgaaggggccatgaaagtccaaatttggccagacaatgtgggctaagcccaaggggacaggcagagagacaccagagccagcttcctggctgtgtggcctggacccccctcggactccaagcctcacccctcatctgcaagcggcttataactgctacatggattcaggggcacccaaaaagacgcagggaaaggcgccggcgacatgttaagtgcccagatacccacataccacacacacacagccacgcttagaaatgtaatcgggggatctagaaattctacacaatgagaagctcaaaaacagccccaaagctgccaacaaccagagccgactggggcccaccccagcccagcccggcccggcccacccagggctaagttgggaccccccagtccctttccaggacgaatgggcccaactatgccgcctgcagcctggcccgcatcccaggccggaatcgttcatagaaaaccagccccggctcagggcgcagcctcagccaggcgggccaggccctcacgcagctcactcagctcaaacagsctgacgtccagcagctgcgctgcccggcccacctcagcccgcgcccgctcccgctctgcccgtgcctcctccaggctgcgctccatcgcccgcagctggtgctccaactccgcattgcgggtctccaggtcctgccaggaaagggtgggcagggttgggggccccaacaaatcaccagtcctgcccgaggcatccagagtctgaccaccttcatgtccctcttctgcccagagccatcctagggcgcccaacacaccaggaataaaatgcacaccccacaggggcctagcttctgccctcatttcttttgtttgtttgtttgtttttgagaaggagtttcgctcttgtcgcccaggctggagtgcaatggcgtgatctcggctcactacaacctccgcctcccaggttcaagcaattctcctgcctcagcctcccaagtagctgggattacaggcatacaccaccacgcccagtgatggcttacacctgtaatcccagaactttgggaggcggaggcaggtggatcccctgaggtcaggagttcaagaccagcttggccaacatggtaaaactccatctctactaaaaatacaaaaattagctgggcatggtggtgcacacctgtagtcccagctactctggaggctgaggcaggagaatcgcttgagctcagaaggcggagcttgcagtgagccgagatcgcgccactgcactccagcctgggtgacagagtgagactccatctcaaaaaaaaaaaaaaaaggctgggcgcagtggtttacgcctataatcccagcactttgggaggccgaggcgagtggatcataaggtcaagagatcgagactatcctggctaacatggtgaaaccccgtctctaccaaaaaatacaaaaaattagccgggcatggtggcgagcacctgtagttccagctactcgggaggctgargcaggagaatggagtgaacctgggaggcggagcttgcgccactgcactccagcctgggcaacagagtgagactccgtctcaaaaaaaaaaaaaagtaccccctgaacatttctcagataaagcctttagcaaaagccaagccaaggccagtcgtggtgactcaagcctataatcccagcactttgggaggctgagggcagattgctcacggtcaggagttcgagaccagtctggccaacatgaggaaaccccatctctactaaaaacacaaaaaatgcccgggcacggtggygcatgtctgtaatcccagcactttgggaggccgaggcgggcaaatcatgagatcaggagttgagaccagcctggccaacatggtgaaaccctgtctctactaaaaatacaaaaaattagctgggtgtagtggcgggcgcctgtaatcccagctactcaggaggctgaggcaggagaattgcttcaacccgggaggtggaggttgcagtgagctgagatcgtgccattgcactccagcctgggcaacagagcgagactccatctcaaagaattaaaaaaaaataaagccaagccaagccagacctagttccaatgcaggctctgtgatctcaggctgagaacaggaggaattgacggggtctggcatgggaatacagcaggaactcaagcattgcttgttgaacccatagatggatatgaaactgtaccaacagccactgttcacgcggcacctgctgggcatcaggccttccacaggactgggcctcccaatactttatcatcttaggtagatattgtcctgagtgtctgttgaggtgactgtcacccaccgtcaccccacctccttgtgcccacacacacctgcaccttctgctgagtctcctcacgctcggcagcctccagggcctcgcggggccccccagtctgactcttcagggtctgaatctcctagaggagaagagttcccagggtctgttgcgggggtcctggctttcccacaggaggtgagggaaggcgaggcccaggaaccacacttggcactcacctggtccttggtttgcaccagagcttccagctgttccagcgactggccctggcccagcccctccttctcaccggtgggggtcacctctgaagctgcctgagcctccagctcagccacctgtagggcaggaatagcagcccctgacgcccccgcctgcactctcccttgctcgcccaacctctagggaatctgcctcctgtctggccacgcccaggaccgagcacccatctcccttggttggtgccaccacccccctctgcacagcttggactttagtgtctgatcaccctctgaggctggcattgtctcaaacccattttacagagcaagaaactgaggctgggtcagtgacctgctgaggtcacacagctagtccatgaacccagggcagatgggaactgccgaggcgcggtctccacagttgcccgggccaggtgggggtctctcggagggaggggtgccctcacccgctgccgcagccgctcggcctctgcacgctgagcctccagctgctgcctccactgggctgcggcggcgttggcctctcgcagggcgcctgccagcttgttgttgctgtcctgcagtgcgaaaaactcggcctcccactgtacctcgcccacggagctgcagagacacgagggtcggcagtgggtgacacggggctggggggcggagtcgggcgatgctgggctagggggcggggccaggggtgggatagctctgggcttaggtcagggcgaaggctggcgagggtgcggagtcgtgcgcgaagttggactagggggcggggcaggggtggagtggcactgggctgggggcggagtcagcggcaatgctcggttagggggcggggccagggtgggtggcgctgggctgaggcggagtcacgggcgatgctgggctagggggcggggccagaggaggggtggctytgggctagggcacggagtcagggccacgcagggctggggatgtggcgacactgattgctgagcttggggatggggcagtcccgcagaagcggggtcttgtcgaggaccgagtcaaagaagggggcacgtggagtccgcccagtgacactgtgggaatgttgagggagggatgggaggttggggagagtcagccgatgggggcgtggtcagggtggttatcctaagaccagagaggcatcgacggggcgaggttagcagcgagaagagacagggatggggtcaaaacagaggggcgtggccaacgcagggtaggggcggggtcggctctggatggggcagcattcagatcctcatccccttccccaggtcttgagtccacagttagatcccgccgtcctggcactcccttggcttccaagaaccgcctcctcgtcccccacccctacccccgcccctgccacgcccccaagtcccgcccctcacccctcagacaacatcttctttagccgctcgcgctctgtggggccgggggcatcagcgctctggctgcggaacagtttttcctcgccggggccgttggcactgacgagagggctcgggggcacctaggcacggggaaaagaataggtcacgaccccacatcagctgggatcaaggctgatgtgactggggtcgtcacatcgggggtgcaattgacctatgcaccctaagcaggtccttcacagcacaggatccaagtgtgtccctccccacctcacccaccctccatggctccctgtggcccctaagctgggagttccatgcccacgccctcgaccttgccttcctgggctttcaccacccccaggagcaagtctgatgcaggttagtctaaaccaagatacttagaacctgtaaggtaggggaggggtacaatcggacacctccctgctgttcccttccctgaggccgaacttcaacatcacgtttaggatttcagcaggaagccctgcccaggccgaattcgtgtttcgtgagcaaccccactgcctggaccactggctctgagggtagacaagctggcgggtgccctgcgagaggccagcgccaccgcagcccagtgcaggcagcagctggaggctcatgctttttttcatctctccaacccctgtgcacagccctcggcctggtacacagcaggtgctcaataaataatgctgaataaattaatgtgggaaaacacgcagggacagttcgttgttctgcctcacacttagccatttctttctttctttttttttttgagacagagtcacactctgtcacccaggctggagtgcagtggcacgatctcggctcactgcaacctccatctcctgggttcaagcgattctcctgcctcagcctcccgagtagctgggactacaggcgcatgccaccacgcctggctaatttttgtattttttagcagaggtggagtatcaccatgttggccaggctggtctcgaactcttggcctcaagtcatcctccctcctcagcctcccaaattgctgggattacaggcgtgagccaccgcacccggccacacttagccatttcaatttctagtcttccatcctgccatctgagctggttttgctactgggacctactgggtgtaccccaccggccccaggcaaggtccagaccctctatgacacactccacaccactcctctgtggtccctgctgtgggtctaaccttaggtcatctggaagcattgggtcttgacgaccagcagagtgccccggtctcccaatatcaaggtccccyaatatcagttgagcgcctggctgactcacaggtgcccaggcaggcataggggagtagggagtgctgacctggtgggaggcgagccccagggctggactggtgagctccccgccatcctgagatttctccctggccagcctggctgcttccttcacttcctggaacttctcggcaaactaagggagtggggaggaaaagacagtaaaaccccagcccatcctcccaaacaggtcaccatcactcagtgacagccccgccactttcgaaccgtacccatccccttatcacacaccttggaagaaggagagaaactttgaaaaatgatgtaccatggtgggtgggcaggtggcatcagatcacagaggtggcatttaaatacattgggccacattgagaaagggaaaggaattcccatgtcctctttttaggaaagggtctcactttgtcacccaggctgcagtacagtggcatgatctcggctcactgcagccttgacctccctggctcaagtgacccttccaccttacccctccaccaaggagctgggactacaggtgtgtgccatcatgcccggctaattttttctagagacggggtctagccatgttccccagaatggcccttttcctgttttttgttttttttttttttgagatggagtcttgctctgttgcccaggctggagtgcagtgacatgatcttggctcacggcagcctctgcttcagcctcatgagtagctgggattacaggcatgcaccagcatgcctggctaattttcatatttttagtagagatgtggttttaccatgttggccaggctgatcttaaattcccggcttgaagtgatccgcctgcctcagcctcccaaagtggtgggattacaggcacagcacccagccttttttttttttttttttggggggggacagaatctcgctttgtcaccctggctggagtgcagtggcaccatctcagctcactgcaacctctgcctcccaggttcaagcgagtcttctgcctcaacctcccgagtagctaggactacaggcccgtgccaccacgcccagctaatttttgtatttagtacagatggggtttcaccatattggccatgctggtctcgaactcctgaccccgtgatccacccacctcggcctcccaaagtgtgagaatgacaggtatgagccaacatgtggggtcccttttaatctttatcagggctatttcaacaaagagagcctcaggtgggtgctaatctgtctttaacacctgttattattcctttataacaaagagattaggtctcaggctctgagagacatcagaagtcaatgagaaagtaatcatctcattcttgtttttgttgtattaaatgtttacatgtttacatttaccacctatttatgacaaagcaataccagttttccagttaggataggatatgtttccccccaccaccccggttttaaaataaatttccttagtttaaaaataattttttaggccgggtgcggtggctcacacctgtaatcccagcactttgggagaccaaggcgggcggatcatttgaggtcaggagttcgaaaccagcctggccaacatggtgaaaccccatctctactaaaaacacaaaaattagccaggcatggtggtgggcgcctgtaatcctagtacttgggaggctgaggcaggagaattgcttgagcccaggaggtggaggttgcagtgagctgagattgtgccattgcactccagcctgggtgacagagcaaaactctgtctcaaaataaatagataaggccatgtgtggtggctcacgcttgtaatcccagcactttgggaggccgaggcaggtggatcatgaggtcaggagttcaagagcaggctgaccaacatggtgaaaccccatgtctactaaaaatacaaaatcagccaggcatggtggcacatgactgtaatcccagctacttgggaggctgaggaaggagaattgcttgaaccggggaggcggaagttgcggtgagccgagatcgcaccattgcactccagcctgggggacaagagtgaaactctgtctcaaaaaaataaataaataaataaataaataaatgattttttaggctgggtgcagtggctcacacctgtaatcccatcactttgggagcctgaggcaggcggattacctgaagtcaggagtttgagaccagcctggccaacatagtgaaaccctgtctctgctaagaatacaaaaattaaaaaaacaaaaattttgtaaaaatacaaaaattagccaggtgtggtgtgtctgtaatcccaactacttgggaagctgaggcaggagaattgcttgaacctggagagaagaggttgcagtgagccgagatcgggccactgcactccagcctggcaacagagctagactctgtctccaaaaaaaaaaaaaagacctaaattagaaaggtaaattgttggggccgggcgcggtggctcacacctgtaatcccagcactttgggaggccaaggtgggtggatcacgaggtcaggagatcgagaccatcctggctaacacggtgaaacccccgtctctattaaaaatacaaaaaaaattagcagggcgtggtggcaggcgcctgtagtcccagctactagggaggctgaggcagaagaatcagaagaatggtgtgaacctgggaggcagagcttgcagtgagccaagatcgcgccactgcactccagcctgkgcgacagagcgagactccgtctcaaaaaaaaaaaaaaaagtaaattgtctgggtgcagtggctcaagcctgtaatcccagcactttaggaggccaaagtgagaggctcgcttgaggccaggagtcaagaacagcctggacaacatagtgagatcctatctctaaaaaaaataagattaaagatattagctaggcatggtggcatacgcctatagtctcagctagtcaggaggctgaggtgggaggatcccttgtgcccaggagtttgaggctgcagtgagccatgattgcactgcttcactccagcctggacagcagagcaagatcttgttaaaaaaaaaaaaaaaaagaagggagggagggagggaaaaaaaaagaagaaaggtaaattctaaaccttctagaagaaaacaaagaaagcctggtgtggtagctcatgcctgtaatcccagcactttgggaggccgaggcaggtggatcatctgaggtcaggagttcaagaccaccctggccaacaaaatcccatctccactaaaaatacaaaaattagctgggcgaggtggtgggcacctgtaatcccagctactccagaggctgaggcaggagaatcgcttgaacccgggaggtggaggttgcagtgagccgagatcgtgccactgcactccagcctgggggacagagcaaggcattatctccaaaaaaaaaaaaaaaaaaaagaagaagatcttcgtgaaagcactcatcatcaacaaaaccacggataaagataataatggaagtatagagacggcacagggtgcagggaggtgaggatgaaggtattgctggggcatgtgggaaagtgcccagcccagcccagccacccatttgatgtcccaaagaggagcagggtgtgtccaaaattagagctacaggcagtagaactaggactcaagagcaggtacagtggctcatgcctgtaattgcagcactttgggaggccgaggcaggcagatcatttcaggtcaggagttcgagaccagcctggccaacatggtgaaaccctgtctctaataaaatacaaaaaattagctgggcgtggtggcggactcctgtagtcccagctactcaggaggctgaggcaggagaatcgcttgaacccgggaggcggaggttgcgtgagccaagatcactgcagcctatctcaaaaaaaaaacagaaaaatgaactaggaatcaaaccggggaagcttaaaggggcttcagtctcaactcatcctacaatcccatcctgcagatgggaagataggggacctgcccaagatcccagagtgagcccaggagaagacttgggcccagtctcatcggttccckccactctccccctcacccggcccacctgtgtcagatgctgttcagaggcaaagcccaggccrtagactgtgttggcgcgactgtcggcccactgcccgaacttctgggaagttttggtgaaggtcatgttgggagtgacagtgctgttgatgatggcctagggtcggggaacaaagttcaaggtagatgggacagatactaacaaacatgaaaccccccaggtattaccttgtattagggtcttgaaggtctttactctgaaccctttcaggagatagagactagggcctgggaaggcttagggtttcctgtcccttgggcacacagcaagccagccaccagacccaaggttgtcaccaggactcctggtgcctctgccccacccagaccccaccctgaccttggcgcctccratgctgatgatgcggtacacattgcgggtggcatcgtagaaataggagacagtgagtgcgtgcttgcccgctgggatccagtttcgcttggtggctgggtcaatttggaacacgtgcgcccgtgtgctgaagattggctgctccctgcgtggggagagggtgtttggtgggggccaggcacccccacttagaaagctcagggccaggctgggggaggtgggagctcacctggctgtggacattggtcaggctgggatgggcaggctctagggggcagccagagaggtggcaggagcactggtttggcccctagggagagaggagggactatgagtgtccctcaggccaggctgagggaggccaagcaggttccatctcaggacccatcaccaggtgtgcccgtcatggaactttcaatcaaaaaggcaggagaggcccaaagtacacctggtgctttgggaggctgagtcaggaggatcctttgagcccaggagttcgagaccatcctgagcaacatggcgagaccccatctctaccaaaaatttaaacaattagctgggtgtggtggcatgtgcctgccgtcccagctactggggaggctgaggtgggaggatcacttgagcccaggaggtcaaggctgcagtgcagtgagctatggtcaggccactgcactccagcctggacaagagagtgagaccctgtctcaaaaaagaaagaaattataaaaagaaacaaaaaggtaagataattattatagataactcagagcaagcagaccccatctttctttgtctaggggaagcccccacaacaccctgtacaggagatggccctctgagaggagcctggtggccgytgacatccagatgtaaatttctcattgtcctggttattgcacccccgtgaagtcccctccatcccaggctgagctgtggaggccaaatctctgctgagttctttccaccacattcacccatgactggccagagcggggctctccaccaaaaaatggggcgttgagaggtgtgtagtaccaggagaccagttccccactacaccctgcagagggaccccacccccagcagctcccaccctagggcagaagcacaccttgaagtccagagtccaaatccccagggagcccccagccaagttaaaaagacaagatgtagacaaacagccaatcccaatgcccaccatgagggcagagcagaatccacactgggagaccagggctccccaacctccccattgggccattcagcaaccccgaatctgcaggggaccaaggaggagtttggaggagggggaagacaggtgggggaggggaggccctggcccagcggcctctgtggtcaaaggggggatgccccccctatcctgtcctgggcagctgctgtcctggtcrcagggtctgaaaccggagcccctgagtgggggtggggcggcagctctggcctggactgggggcgggtcctgcgccgggtgggagttggggaacacaggggtccccggaacccaggcccttccggtccggcagctcctgctgcgacttgcagcgtttggggaaagttactcaccaactagtcatgcgcctcggatgccgccggccacggggctcccggaggggggtccgacaccgcccggtgcccgggatccccaatctggccggtggatgaggccccatcccatgcacccgagtgcgggggacgggggggttaatattaattcaggatcccatccccacccgaggcaggacacccagtgcacgccccaactccgggacgcgggctctgaccctggaacttccgagattcccgcgacgccccctgtctctgggtccagaacttcgggggacacctcttctgcctcctccaaccccaggtcggtaactccggggactcccttcgtgactcctcctctaactgggtccgggaccccggtcctccgcgttgtcctagactcctaaacttcgaggaccccctgccacccctccagtccctgggtccgggacgtccggacccctcccaccccagtaccccaccccaggtccgcagctttggggacctcttcgcagcctcctccaacgccgggtccagaactttgggaacctcccacgcagtcccctctcagaccctgaatccagaacttcgggacccccgcgctccctccagccctggaacttggggacccctcgcgccgctcccagtcccgggtccgaaacttctggggaacccccacgccctccccttggccctgggacttcgaggcccccgcgctcccagcgcaggctcggcaggccgggctcaccctgccaggtcggcgccccgcgagtgtccaggcgcgagtcgggtgcggcccccgcggcgctgactccgcgctgccgggcgccccgctcgctccctggctcccgggcccgcgccctccgcgccgccctccacgccgcccgtgcctttgtctgcgccgccgccgcccgcgccgcctccggtcccatcgcggccggtcccgacgcggccgccgcccgccccgcctccccgggccgccaaggccgccccgctgcgccccctgccggctttttgcactgggagagggtatgggggaggggataagggggaggggcgggggccgggactggggaagggacggaggattgagggagggggttaggggcggtggagggggagtgggggggggggttgcgtggggtcgggttgggagcagagggtggggacagagagacagacggagagggacatctgggatgagaaagagacccagaaacagagacacgggggagacaggcggagagataggaagcagatggagagagttgcacggacagcgatgtgacctcaccctcctgtcaccttctcaggagacagctgcctctgtccccactacctgaggtcataactttgggcctgtgagggaggtcaggtccctcccgggctgacatgggtggcccagtgaggttggggagggggcagtgggtctcagggtctgcatacagtaagtgctcaatgggtgttgccaggaaacggaagagatcaacttcgggagggaacgggaagcaagacaaagagagagaagcctctgttcccctgcccgtcccatccctaagcagggacgtctgtccacctctgtccctcccaagacgatggtaaaaatgcccacaatggttggattaaggttatctttgctgttgtttgagggttccaaaatccaaaggctgaggaaatgtctccaacgcatggttgcatcccctcagcctccactggcctgcgtttgtcacctctggtcacagggagcacccccttcccacacttgccaggagagcatccttccggagttgaactaggatccacctccccagccccaagcccatgtgtcccacttgtcaatcctggtgccgccccctctctggcaccgtctccaaaatcacacggtgcggcgccgttggttcgtttgtggacagaggtcctgcagctccctggaaccaaggcctgtggcgccctaaagctctgatcttacatttgagtttttcttttcttttcttttcttttttttgagacaaagtctcactctgttgcccaggctggagtgcagtggcacaatctcggcttactgcagcctctgcctcccagattcaagcaattctcctgcctcagcctcccgagtagttgggactacaggtgcatgccaccacacctggctgatttttgtatttttagtagagatggggtttcaccatgttggccagtctggtctcgaactcctgacctcaagtgatctgcccccctcggcttcccaaagtcctgggattacagacgtgagccaccacacctggccgacacttgagtgttttgacaacttcagagaggcttttgcttttcatctccaagacctctgctcctgtctcctttccctgttcctttatttctgtttccttctaagaagaatagtatatctgagctggcggttacattacattcaaattacctttaggtgaattccaggtcaggttgtttttggagattgactcctgcgccaagatctgagtcttcccccatccaggcctttgcccaaactgttccttccacctggaatgccctcgctgcaggcatctcttctgccttgtccttccaggctcagcgccaccaccctgtctcctcctccaggaagcctctctgactaccctggccttggaagggatcttgccctcccctgtcccaatccctgtgactcttttttttttcttttttaaagtttatttttagagacgaggtctcactatgttgcccaggctggtctcaaactcctaagctcaagtgatcctcccacctcggcctcccaaagtgctgggatgacaggtgtgagcccagaccctttctgtgactcttatgttacctgtttattacatgaccaggtctgggtgctcctctagggctggcccatccatcctgaagccccagtctgacccagcacaagagcgactgttcatcccacaggggaaactgaggcacagactcggtttccctggctgcttctaacttcacgaggcatctgcacaagggaaggatttggctctgttctcaggccggaagccacgaaatgcttgaacattgtggggagcaaagaaaataccgtctgttctgtgcaaaaaatgacttttccttattaccaacaaaataatggaaaaaataaaaaagtatctgggaaaggtgctggcatggccaaggcttctggaagctgcttagagtttgccaagtgcacaagtggggccctgtggctattttacaggggcggctgggcgaggggcccaggcagactttgccctttgtgtgggcagaaagcaacagtgaaagagacagtgaagggttgagttgctttcctgaacaccctctccggtctctgggaggggctgggacagggctggccttgagcagccccaacctgaagctggactagccaagtctacactgaggcactggcttcctcagtgtgggcctcagttttctcacctggaaaatgggccgatgcttgcagggcttctagtagagggagaaacatgaaggatttagtcaatatcagcagctgtcctctggggtgcctgccattaggttcgtgggcaaaggccctgccactctttgctgcagctgggaaaacagagtctgtgtctcagtttccctgctgggatgaatagtcactcttatgctgggtcagactgaggcttcaggatggatgggccagccctagaggagcacctagacctggtcatataataaacaggtaacataagagtcacagaaaggggctgggctcatgcctgtcatcccagcactttgagaggccgaggctggaggatcgcttgagctcaggagttcgagaccagcctgggcaacatagtgagacctcgtctctaacgagggctgccctgagctgctgcccccaccccagtctgggccctcttcttcctaggtctggaggcctctcttctaaagaactgggctgggtgcagtggctcatgcctgtaatcctagcactttgagaggctgaggcaggcagatcacctgaggtcaggagtttgggaccagcctggtcaaaacatggtgaaaccccgtctctactgaaaatacaaaaattagccggacgtgatggtgcacacctgtaatcccagctactcgggaggctgaggcaggagaattgcttgaactcaggaggcagaggttgcagtgaactgagatcaggtgactgtactccagcctgggtgacagaaggagactctgtctcaaaaacaaaaacaaaaaagggtgggggggagggaggaaggaaggaaggaacagacttgagatgtccttgcagggcaggcagaggccaccccaaggtgtctgactaggaaagcaactttcctttggggctgaaaaatggtgtgggagaatgagcttcccaccttaaaggggaaaccaagcgggagcctgaacagctcattcagcactaagaaaactgcatttgcagaatggcttttatggctcaggctctggtctctgcctagttagatctgacctagcctttggagtgaggctaaacagtctctcctctccagagactttctgtgccaccagagcagggacagtccacctgctcttcccgaaagctgggtgcccacctcccagtgaaggtcttggtgactacttcaggtctgtttattgtttatggcatgatttggttactgttcacctcttacatggatttgtccctgcacctagaacaagcctgacctgtgacagctttctttttttttggagatggagtctcactctgtcgccaggctggagtgcagtggcacaatctcggctcactgcaaccttcaattcctgggttcaagctattcttctgcctcagcctcccgagtagctgggattacaggcactcgccaccacacccagctaatttttgtatttttttttttagtagagacaggatttcaccatgttggccaggagggtctcaatctcctgacttcgtgatccgcccgccttggcctcccaaagtgctgggattacagacgtgagccaccgcccttggcccctgtgacagctttctatgagcactttcaggagtaggagatccccaggttccagctttcgacttggctttcggaatcacgtgagccagggagtgaatcccagccctgctgcttaccagcagtgccaccctgaagaagtcactttcccttctttgtgcctcaggttccccatccataaaatgggcatacgaatggtgttcacttctgaggtttactgtagggatccaatgagttctttctttttcttttctttttttcttttgagacagaatcttgctctgtcacccaggctggagtgcagtggcgcaatctcggcttgctgcaatctctgccttccaggttcaagcaattcttctgcctcggcctccctagtagctgggattacaggcgcacgccaccacagccggctaaatttttgtgtttttagtagagacaggggtttcaccatgttggccaggctggtctccaactcctggactcaagtgatccacccgccttggcctcccaaactattgggattacagatgtgagccaccacgcccaccctttttctttcttttcttttcttttcttttttttttttttttgagacagggcctcactctgttgcccaggctgtagtgcagtggctcaatcatggctcactgcagcctcaactttctgggttcaagcaatccttccacctcagactcctgagtggctgagactacaggtgcacaccactacgcctggctaatttttgtattttttgtagagatggggtgtcactatgttgcccaggctggtctccaactcctggactcaagagatctgcctgcctcagcctctcaaagggctgggataacagatgtaagccactgcatctggcctccaatgagttgttatgtgaagagaacgtgattgtaggtgcttaataaatgcttgctgttataaacatcatatttatttttggtatgtggttttgatcctgaaccaacctcttactcttttctttttcagaagttagaggactccaaccaggcctgaactctcaaggacagaaatgggtccaacctggcatgacatcctctaaatctttagctcctggcctctcaggtgccccctccagctacctccctcttccttctcttcattccccaagccatagctggttgggccaacctccagacattagcctctttgcaaactcctattcatccctcaaagcctcaccttcaatgctctcctccccaagaagctctctcctctacctctagaccttttccagccctcttccctctttctggcccagccctgactcctgggagtgtctgtgtgcagctttgactcccccagcctgagtgtctctcaagggctgagaccagggcccatgtttccctagagtttgtcatcttccagcatagtgtggacgcatgggggtcaggcaaagggggagtttgatgactcagtactattggtgattttgcatcacttgaaggagaccctgccttaaattcagaacttgacttctgcccacggctaaagttaattcattcaacaaccccccatgaagcaatggagccaggctccctcaggcccaggcaagaaagggtcgtggagttggggtcgccagcactggtttatggatttgaggacctaggaccagagtgagttggggatgggaggaggcagtgcttgaggcccctctgagcagcaaacctggacccgaggttcagttcccgcagacctaattaccctaatttgccacatgcactaattacctcctgggtgccaggtggctgggcggggctgccccaatttccggaggtaggtcggggcccgattatttttggctgtggcgtccttgaagcctccgccatcagcagcgcttgaagggcagaaagtggggcggagaaattgaggccacatcagggg

SEQ ID NO: 98018 - DNA, 227054 bp, Homo sapiens
  misc_feature (1)...(227054): n = A,T,C or G
gttttatagtcagtctggcagtcagacatgggtagcagatagtttgagtctcctgcctttatacgtctctttgctagatgcatttgatgaactcaggataagttgtaggacttcagactttcaaaatgttaaggaactgggtcacatagttgggcaaccctttgccagaacaatctgaggtacataataaaatgcctgcatccccctatttgagaatatatatcaaaaaattacttaaaagatcatttcagctggactaggtttctggggacactattctggtgggtgagtaggtgttactcttcctccaaagataatcatttgcatttgggactggaatgtcgaaggatagatttgggtgaggatccctggtgtcttcagagatcctttagggttgggggaagacttctgggagaaaaacaccccagatcttggctttacctcactgggtgtcaaaaatataaatcacgcctgatggggggagggcgagtgtacagtggcgctgtaggtagaggccactaaggagcccttccaaacaggacaaagctcacactcagagggaagttttagcttccaggatacagggagggctgacaccagaacttactccaagttgtgccatgatgtactctgggcaaactaggtgaatgtgaattgaaaaagctgcacagtaaagactgaagcagttagggcctaagcacctcttgttttgagactccactaaaggctagaactgtctccaagttatgcccctccccaggtaagttcagccccacttgtttccaaggcttcagcatgttgctctactttcctgacaaaatggcccctggaaactctgacagttgccatggtttaaagctcctgtcactcactgccacccttggcagggcagagggagggggataaggaaggggctatgggcagggactgaaccatgggttcctcttctgctatagcttcaggactcagttcctattctattggaaccagggaagctctgaattttccagtggggctgcctagaggcaccaggtgacatatcctagaaatgcaggagcatgagttataggacaaattttgatgaagaaagaaaaaattggaaagagttcacagacaatttctttcttccactcccacgccatgttgttccaagacacagtgattctgaatagcctctctggaaatatcccagagtactgagaaataagctaggttttgaagctgtaaccagttcgataacatgccaccctgtatttgctttctccttacctttccttagtttcccttttgcctgcattcctactcccttgcaattatagttcctgatgaaggatgtataataactaggcttgttttctagaaaagtcaggctaatacagaatgtaataaaaagtggacttcataaaagtttgcaatggatattttacttggctggcaagatggccgaataagaacagctccagcatgcagctcccagccagaccaatgcagaaagcgggtggtttctgcacttccaactgaggtacccggttcatctcattgggactggatagacagtgggtgcagcccacagaaggtgagcagaagcagggtgggacattgtctcacccgggaagtgcaaggggtcagggaactcccttccctagccaagtgaagccttgagggaaggtgccatccggcccagatactacgcttttcccagggtcttcacaacccgcagactaggagattccctcaggtgcctacaccaccagggccctgggtttcaagcacaaaactgggaggccgtttggaccgtgctagctgcaggagttttgtttgactccagtggtgcctggaatgccagcgagacagaactgtttactcccgtggaaagggggctgaagccatggagccaagtggtctagctcagtggatcccacccccatggagcccagcaagctaagatgcactggcttgaaattctcactaccagcatagcagtctgaagtcaacctgggacgcttgagcttggtgggcggaggggcgtctgccattactgaggcttgagcaggcggttttcccctcattgtaaacaaagccgctgggaagttccaactgggtgcaaacccactgcagctcggcaaagccactgtagccagacagcctctctagattcctccttcctgggcagggcatctccaaaagaaaggcagcagccccagtcaggggcttatagataaaacccccatctacctgggacagagcacctgggggaggggtggctgtgggtgcagtttcagctgacttaaacattcctgcctgctggctctgaagagagaagcggatctcccagcacagcacttgagctctgctaagggacagactgcctcctcaagtgggtccctgacccccatgcctcctgactgggagacacctcccagcagcggtggacagacacctcatacaggagagctccagctggcatctggtgggtaccctctgggacaaagcttccagaggaaggggcaggcagcaatctttgctgttatgcagcctctgctggtgatacccaggcaaacagcatctggagtggacctacagaaaactccagcagacctgcagaagaggggcctgactgttagaaggaaaactaacaaacaaaaaacaatagcatcaacatcaacaaaaaggacacccacataaaaatcccatccgaaggtcaccaacatcaaagaccaaaggtagataaatccacgaagataagaaaaaaccagcgcaaaaaggctgaaagttccaaaaaccagaatgcgtcttctcatccgaaggatcacaactcctcaccagcaagggaacaaaactggatggagaatgagtttgatgaattgacagaagtaggcttcagaaggtgggtaataacaaactcctctgagctaaaggagcatgttctacccaatgcaaggaagctaagaaccttgataaaaggttacaggaactgccaactagaataaccagtttatagaagaacataaatgacctgatggagctgaaaaacacagcatgagaactttgtgaagcatacacaagtatcaatagctgaatcaatcaagcgggagaaaggatatcagagattggagatcaacttaatgaaataaagcatgaagacaagattagagaaaaaagaatgaaaaggaacgaacaaagcctccaagaaatgtaggactatgtgaaaagaccaaacgtatgcttgattggtgtacctgaaagtgatggggagaatgtaaccaagctggaaaacactcttcaggatattatccaggagaacttccccaacctagcaaggcaggccaacattcaaattcaggaaatacagagaacacctcaaagatactcctcgagaagaacaaccccaagacacataatcgtcagattcaccaacgtggaaatgaaggaaaaaatgttaagggcagccagagagaaaggtcaggttacccacaaagggaagcccatcagactaacagcggatctctctgcagaaaccctacaaaccagaagagagtgggggccaatattcaacattcttaaagaaacgaattttcaatccagaatttcttatctagccacactaagcttcataagcgaaggagaaataaaatcctttacagacaaacaaatgctgagggattttgtcaccaccagcctgccttacaagagctcctgaaggaagcactaaatatggaaaggaaaaatcagtaccagccattgcaaaaacagaccaaaatgtaaagaccattgacactatgaagaaactacatcaactaatgggcaaaatagccagctagtatcatatgacaggatcaaattcacacataatattaaccttaaacgtaaatgggctaaatgcgccaattaaaatacacagactggcaaattggataaagaatcaagacccattggtgtgctgtattcaggagacccatcttgtgtgcaaagaaacacataggctcaaaataaagggatggagaaatatttaccaagcaaatgggaagcaaaaagaagccggggttgcaatcctagtttctagcaaaacagactttaaaccaacaaagatcaaaaaagacaaagaagggcattacataatggtaaagggatcaatgcaacaagaagagctaactatcctaaatatatatgcacccaatataggagcacccagattctaaagcaagttcttagagacctacgaagagacttaagactcccacacaataatagcagacaactaaaaggacttttcatggacatagatgtctatattccagagaatgcagaaatatcttgggtgaggttctcatttgaggtgtgaaactattcacagcatcacgcctttatagaaacatggtaataagaagtaatcagcccatcattgaaaatgaagagcattagagtgagtcgcctctgtgtccactggagacttgcttttgtgaacacctaagaggtctgggttttgttttctaaggagggtagaatgtttcttttacatacgtaccacattatttaaatctcattaagatccaagggagcagacattattctcatccccattacagattgggaatgagaaacttgttgaggttaagtactttgtccaaggttacatggatttgggatttgagccatcttgatgctcttttgctcaaaattctggctatatatttttaaggcaatcagagggtgaacttcattagggatttgaaacagttttagttggttagtggttctacttcaggtaaggaatcaagacaaaagggaaatgattcaaagaatgagggaactgggacccttttaagttgcagatgaggtcatctgtgtttggatcagagacctataatttatgtagattcacatacatctttttcagatatgcatacattggggactgtagagtgttgtggaactaaatgtatttgtatgtgttcaacacactgtataattgactcaattatccatgtggagattattcagatttaatgtgcaatatggtttctcctttcagttaggttgttcttgggctgctccaggaactccaactaatttaaataataatttaagtaaaacataattaggaaggaaaattaaattcaattttttggcagctcttgaatattctactgctgaaacgtaactaatccatccactatcttttaattcaccaatgcctttttagtaccacaggattttactgctttctatagattattgcagtagtttccaggtagctctcctgcttacctctttccatttcaatcatcattctgctgacagcaaccttcaaaaatccaactcccactgcaaaatttctttggttcaaaacatttaatggatagaaaaaacatttaatgcttacccatttctcaccagattaagtgcacatgccacaaccagtcattaaaggctttttctagtctaaattcctgttcttcaaacgtcaaaccgcccttctactctactgacctgaaacacacagcctcaccctccacatctctgcagacccaccgcatttgccacctgccctagggagcttttcctgatcttacctcggatgcctttcactgctcccacatctgaattcctttaactcactccatgtttttctcaaaggcagaccaaggtatttatgcaaacatggtgtctccctagtcttgggtgaggtctttgacatcactcactgcagcgattcatctcccctactctgcactgtcagactctaaagaagggtgcaacaaatacttgtccatttagactgccggcaaaccctgagagcaggaattttggccttttgtatctccagtgcctagaacagtgcttggtacacagtaggcactcattcattgaacgttgctgaaggaattgaacgtacatactacaagccctgcagatgcagatacaggaggggttgacggcacagtgcttagggtggaactggaggcaccacctctcctgaggggtgatgcgccgcttcctgggcaggctcgggggagctcgctcaaatgcctgcctctctgtagcccaaacgctggaaaaaaaaatactcacaaatcacctatccaagtatgtacacacaggctcacttaaacccgccctattaaaaaaatatacacacgcacacaccatttatccaagtatgtatacacgggcttgcttaaacctgccctattaaaaataataatgtatatatttatgcacgaacatacacacatatatctatmcaggtctgtacatagacttgcttaaacctgccctattaaatacagacacacacccctatccaggtatgtacatacatatataatatataaatataaagacatatatatgcacagacttaactccaacacgaytggagtgtcgggagggcaactgggctgccctctccgccctccaggactgcrggacaagtctcccggcgcccgggtcgcarragaccsggagccctaaaacggcccctgcgcggcttgggccttccggctttccgtccgccgcggccgccattggctgggttcggcgcagctaacagacggcggcagtgcgagaaagccgaagatggcggtccccgcggcgctgatcctacgggagagccccaggtagctgatccgttaagctcttgcggtagccgcgcccaggaaggcccagatcgggctcgcacaaggctgtccttgctgcctgccgcctgggcgccgcggcgggcccggttgagtggggtggggtggggtgggctgccgaggttgcgacgctgcgtctgcggagtgcgtggggccgtgtagcgcctctacagtcacggtggtccacctgtggggctcacagtgcgcctggcagctgaggtctgtacggaagcgtgtggtctgcaagcgtggggtctgcgtcactgttcgcggagtttggtatcagaagttcccgggtgctgccttcagtgctgccgaatcacgtggaacggtattccgtttccgatttcagttccggttcagacactctggtgggaaaggctcacgctgctgctggagggtctttaatagccaacatgtgttaataccccttttaaatcagtatcgaataggggaccgaatttttggttggtagaagaatctagcctggctttggtagcatttgcttttatttgcattttaaacagatttttagttaatttctacttatggtagataaagttggttgtccatggtagtgatataaagctcccctttaacattatttaagtaaaaaaagactcaatttgtgaaaaaataagcaatagtgcaggtagcgtgtggatacagaaaaagtactgaagtatataggcaaaatagtgttcggaagtaatttctttgtgcttggattgggtagaaatctttcagaagaaaagagttattttaaagtttttccttcttyctggattccttttgttaccagtggagggtgtccaggttcttggcgtcttgaacaaagaactggagaagacgcacaaagaaagcgaggaaagaatgaagaagacatttattgaaaatgaaactaccctccacagtgtgggagctgcttgagcataggggctgaagggcccctacagaatttttgggaatttaaataccctctagaggattccattggttacttggtgtactccctatgtaaatgaagaggatgaagtaaagttacaaagtcattttctccgcctatgccatatggagaggacatttcttgtcatagctgaagtgggaatcagctttatgttcccagcctcctgaccctattttcctgcctcactttggttctgatcgccagtttctttcctcataccagtgtcttggggaacaccgctacatcagtaaactgtatccaatatggtgcagtatagaattgttctcatcacatcatttaaagttgattattacaggaaaggtgctgtggctcatgcctgtaattccagcactttgggaggctgaggcgggctaatctctctctctttttttttccctgagagggcgtttccctcttgttgcgcaggctggagtgcaatggcgccatctcggctcactgcagcctccgcctcctgtgttcaagcgattctcctccctgagcctcctgagtagctgggattacaggcacccgccaccacgcccagctaattttttgtatttttagtaaagatggggtttcaccatgttggctaggctggtctggaactcctggcttcgggtgatctgtcctccctggccttgcaaagtgctgggattataggggtgagccactgcaggactgattgagctcaggagttcaagaccagcctgggcaacagggcaaaactctgtctctacaaaaaatacaaaaattagccagcgctgtggcccrcgcatgtagttctagctacttgggaggctgaggcacgaggattcttagaacccaggaggcagaggctgtagtgagctgagatcgtgccactgcactccagcctgggtgacagagtaagaccctatctcaaaattgattactgttgtaataataaatttggttttacagttgaaacagggttttaaaataactgtgtgcttagtgaccccagatgattttgtacatagtatttgaaaagttatttgccttgcagtattcttttatgtttttggtgtaattgccataattgctattcctctcctcccacccctttcagagttccatttttgggttaagtgtttatataaacgctctactaaattaaggctcttccctgcgcagtacaaggyttccctagtagtttggtttgcccaaaagaaagagaaaatttgccaaatggaccttttcagcagaagtaattttgggggcatctttttggaaatgtmcccgttgccctgccttttttgctggctgtcatctgtttttatttcactcagatttaccatatagcattcagagttgttggaatgaaaacttatagacaactatagaaastgcagttcaacttgsaaaactcatttcaaaactctgttttataattttgtttagcatgaagaaagcagtgtcactgataaatgcaatagatacaggaagatttccacggttgctcactcggattcttcaaaaacttcacctgaaggtttgtatttgtgtgtttccatgccttgtaatcttccttctgatttaattgaaagtctgattatttggagaactttttgcaaagcatagtgttctccaatatgttcttagagacactggttctgtggaagatttggtaatgtttcatggtcagaagtttgagaaactctgtcttcaataaagttaaatgttttaaattatggaacttttcagagtattttatatgctagtgtttgtggtatgtattygagggtgattatggcaggtaacattttccaaatgtgtttgacyttggatctgttttattatggtatatattttgggactaaagttctaaaaatatactttagggaaaaattctgatgtcttggttttatttttccgcttaaaaataattctgtggtattttctatcaactggtatttaatctttcacttaattttgtttctctttcacttttattttaaggatatggttgttttggacatgtggatgctttgtaattctctacctggcccaatccaagttaatttagttaatttctttatcaggttataaaaatttgattccatctcatatttatggagcacccactaactgctctgtgcagtgccatgtatcaccatccattgagaaccaagactcttactctgtcatcttgtttttcttggccaagagccagcctcaaaactgtgcctttcccctttgaagtgtctttcaaatccaagttctcacaattctaggtcaaatctttagtacctcttttttagatgacaatagttaccttcaagctggtttccctgcctatagtcttcttgctttctactgcttcataatactatgtaaattactttctaaattttttttcctgaaacaaagatgtattatattttttacagtgttcaaagccatcagtgactgtccattgccctatggagaaaagttagaaatccttaacattgcgtacaagtcccattgtagtatggctgcagtctacattctcctcattttgtaagtgctgcagttacactggatggtacccatttactacaacttgccatgaactttttcagcaatgtgtctatgcatatactctttcccttgcctataaatgtccttcttcccctttactgagtaacttgttcatccttcaaggatttcacaatctcagtctcagcagtttgttctttcttctgtgctcctagttcattctcacctgattttagtactgcatcataagtatttgtttcatgattagcaggcaaccaaatccccaaacctattaatgtgtcttcctctggttttaaatatcttgaggattatgtcttactcatctttatgtttcccattcctaatacattgctactagtatagttggcactcagtaaatgttcttgaagttaattattttccttgctgtggaaaacacaaaacaaacctaagtcttctataatatattcctttttctaaggaatttgtgaggtggatggagagaaaggagaaactgcaatgatagcggcaacattctgtggtatttgctgttcataaagttacattggcttgtttttgactgttgtggtgctaatggctttgtgttactaactcatctaatccgtatggcaacttgaaaacataggtactgtggtcatctctggtcatcttcattttatctatgaggtaaccaagatagagatagagatcagttaagtaactttcccaaggtaacacagctagctagttgggcagcttggctccgtaactctctcccttattacacgaaacctcaggaaagagtatggaacatttcataaattggcccaaaagtgaatgatgtgggtaatacagatattctgctttatttcttcagctggtgggtgcttgcttatgtataaaaatatgggacaagaaactcttatacacgtcttttgttcttcacactgagggagtggagaacttgcacagaaaattgtgatgtttagtttgtctttgacactctcagtcatgtatggagttgagaatagttagtatctatcttagagttaactgagtggctaaagcattccatggaggagcttgaatgctttgccatcagaggtaggggagtggagaggaaaagaggtgcttgttgaaaagtgaagttacccgtcctgctggcatttaatgtccagggacttttaaataaagaaacatatgtatgtgaatacttgcctgctaagaagacgtcaggaaaggtctaattgtttttttcctgtacagtttcaggggatcttcttttagaggggctcctattttgataagkgcttttcagtcaagtttgcagtgcatttcaggatctgcctactttcatttatgtatcccgactccatcgagttggcctttaccttgagacagaattcttagaatagtgaaactgaggcaggcagattggtgaagaggtttagggattttgttgcccctctactggtacttttattttattaagtttgacctgtttatgggcagaagagatgtatttgtccagactggttccttggaatcccaagggggaatcaatatgagggaactaagacaacttaggtatagaatgtgggcatgccagattatggatctgggagtcctctttggccatcttcttggctcatcctggcatatacaaatacatggagattttgtttctttgtttgttacaatgtgtggagggtgcttctggtatttaacgtccagggactttaaaaatattttacagtgtttagggcagtcctgcacaaagacttgtctcatccagcgtgccagcggtttgcattgggaaatgctgatggaagtcaggtgaacttgcatagctgggaacttagaaataaacatttgtggcctttgcacttcaaaaataactgtcacaactcatgcaataaaaaaactcatgtacttggctccataggagagattttgaggccctcacacaaagcctgttgagataacagtgctgtatatctagttttgagaggtcagctctctgggttcctgaccatggcagactaaaaatagcaaactgggggttgaaggtactgtcatggggcatgtaggcagcttcaagaaatgactgctgatcatgaaatgaaatgggagaattatgaaaatcasacccaagaaacataaaaggacagaagtctgagatttctgtttgctctrgttaaaaattatccatgtatctcagcagttctttaggatagatgagccccttagcacagggctctgatgcttgtaattatgacctgcgtcaccacaagatatttgtttaatctaatttattttgtttacaaaggtctagaratgagcatcatatgttttataaatttacatgcacatcagtttcttttcaccatgtatttttctttaaagttctcatctcatatacgaataaatgaatcttctgtcaagtatgaattttgaatgcctgaatatgtgcyaatataatmgattgctatttgtattataggctgagagcagtttcagtgaagaagaggaagaaaaacttcaagcggcattttctctrgagaaacaagakcttcacctagttcttgaaacaatatcatttattttagaacaggtatttttattgcatcarattttctagccatgatttgtttactacrtatttgtattgttatgatatctatgacattctgttttttttaattaaaaagtatgcaagatggaagctgtgaatgtattttagttaagaatttcagtgtaaaaatatttgaatattgtaaagtmtttaaatatgaattgagacttcattgatttgagacagttatacaagattttaattcattggtacttggtataatggaaaaatggacatattttacttaagatattaaatgatttgggggatatattgactaggatggtaagtaagacatttagaaaagaagtattgtcatattatgtgccactaagctgccttctgcatccctttttctcatctaaattcacttcctgatttaagctcctattcaaggctcatctcctttacttgagctgtgaccccttatacttcctttatttggatttttaaaaatccttggctcatcacagtagagcacattgttagtctttcagcagttcatatgygttagttatacctccttcaccagattctaatttgtggggagcaggatcatattttttgtgtatcttatataagcctaccacattggtgtgcttaaaatagatcctcataaattcctgttgattaaaaataatacttgtgaaataaaagtttaaatagttttgtaacttcatgagcattttaatgaacatattaggaggacaagctaccagttatctactacagccttacatacattatagatcacaaagataaatgtggttctaatttttggtgggtgttcagtagaagaaaaggatcattgagtaggacagcatagcatggtgttccagaataatgtaagaaacagaacaggtatcagtgttaaaattttttacaacttttaatcatatattatgtaggaaattggtagataaggtaattttgagaaagtgcttctgggaaaaaatttgttagttgggaaacaaaactattgtatacttatttgaaattattaagtgaaataaatgaaattttaattagggtaccatttacatagccaaagcaaagaagaagttttttggtttttaagtggatttaggattacttaaagcataggtaagagtgagaaaaaaattcatcttgaataatttaggccatttaatcctgaatcttccagcccttggtcgtgtattttattatktgtaaaataaccaaaaatgttggtaataggactatgaagttttcttttgacttaagtcatttaaaaatagttttgtatttrgtatagtttaaagtttcagtatgaagatgagggacatatgtaattttttgtttctttttaataggcagtgtatcacaatgtgaagccagcagctttgcagcagcaattagagaacattcatcttagacaagacaaagctgaagcatttgtcaatacktggtcttctatgggtcaagaaacagttgaaaagttccggcagagaaktctggctccctgtaaggtatagaacatactgtcttaaatatgtttttcaataacatawggcayaaattattatacctgaagagtttttaaagtgataatattttgttgagaggtagagtcaggcaaaagaaacacagatgctcctcaacttacaatggccttacatcctgatagacctgtcacaaattgaaaatatcgttaagtcaaaaacagagtacactctagagaatcagttgtttacccttgtgatcacatggctgactggaaactatcgctcgctgccattgcccagcatcatgagagaatatcatacatattgctagcccaggaaaatacagaattcaaaatatgaagtatagtttttgctgaatacatattggtttcatgccattataaagtaaaaaaattgtctggtatgggccctgacttaagtttagattttacagtagtgcaaaactatcgcaatttcgatatacttttacttttgatctcttcttcggctagtggtgtggtacataagatattcctgtttttggaggcttttcaagatggctgactagaggcacaggacacttctccacaaagaagaaccaaaatagtgagtaggtaatcacactgtaaataaaacatctaaaagagaatgctagagttcagtagagaagtgaccggaaacacctgaggagagggaggagaggtggacagccttgctgggatcaaccagaagcctggagaggctcctcagtgtggagttggggtaagtgagagatccctagctgtccacattcttgctgcagactcctgtaatcctaactgtgggagagttcttgaaccccatgggccccgagactggcatagggagctccctgargttcatgcaatggtattgctctagaaagggtgctcttgctgggttccatgctccccctgagtcttaggtagctggagcacggctccattttaagagtctaatccctgttagaaacagaataatcttaaaatttgtatgaaaccaaaagagaacccaaatagccaaagcaatcctaagcaaaaagaacaaagctggaggcatcatattccctgatttcaacttgtattacaaggctatagtaaccaaaacagcatggtgttggtagaaaagcagacatatataccaatggaacagcataaaatacccagaagtaaacccatgtatttatagccaactgatttattacaaagttgccaagagcatacaactggggaaagggcaccctctttaataaatggtgctaggaaaactggataactatgcagaagaatgtaatggcccttctctctcaccatgtaaaaaatcaactcaaaattgattaaagacttaaacataagacccacactgttaaaatactagaagaaaacaggagaaatactccaggacatttgtctaggcaaaattttatggctgaccttcattatacatggacaaaaaccccaaaatagacaaatggaactatattaaactaaaaatcttctgtacattagaggaaacaatcaacaaaatgaagacacaacctgacaaatgggataaaatatttacaaactattgacttagcaaatgattaatatccagaatatacaaggaactcaaacatctcaactgcaaagtaactaatcccatttaatgtggacaaaggatctaaacaaatgcttcttgaaagacgatatataaatggctaacaggtatatgaaaaaatgcttaaaatcactaattatcagagaaatgcaagtcaaaaccaaacatgccatatcatcttaccccagttagaatggctattattaaaaagagaaaaaaataatggatgcaggtgaggatgtggagaaaagggaactctcatatgcttttggtggcaatgtatattagtacagccattagggaaaagcagtgtggagatttctcaaaaaactaaaattagaactaccacacagtccagtaattccactacttggtatatattcaaaggaaaggaaatcggtatattaaagaaatatttgtacccctgtgtttgttgcaacactgttcacaatagcaaagataagaaatcaacctaagtgtccattagtggatggatgaataaagggaatttggtataattacacactggaataatattcaaccataaaagagagtgaaatgttgtttgcagcaacatggatagaactagaggtctttatgttacgtgaaataagctagacacagacaaatataacaggcactcactcctatgtgggagctaaacaagttgatgtcatggaggtagagagtagaatggtagtcaccagaggccgagaagaatgcatgggatgtggggtcggagggtggatgagtagaagttggttaatgggtacaaacatataatcagaagtaataagtttaatgtttgatagtttagtatggtgcttatagttgacatcaatatattggtcatttcaaaatagctagaattaaggaagtgaactgttctgaacacacacaaatgataaatgctcagggtggtgaatatcttaaataccctgacatgatcattacacagtctatgcatataagaaaatataacacatatctcataaatatgcaaaaatattatgtattgattaacaaataggctttgtgttagatgattttgctcaaccacaggctaatgtaagtatactgaacatgtctaaggttagctaagctaagctgtgatgtttggtagattaagtgtattaaatacatttgtgaattattgtattttaacttaacgatagattaattgaggcataagcccattgtaagtcaaggagcatctgtatattctctagaagtcctctgtgagatatatgatttgcacgtattttctcctaatctgtagctttccttttcattctcttaacagtatctttcccagaacagaaccattaactttgatgaaatctgttgtattttttttttctcttttcatgaacctacttctggttttctaggaatttgcagcctaatcatgacataaatatttactgttttcttctaaatgttttacatatttatattttatgtttagatctaaaatccatttactgttaattttgtatgatacataaagtgcaggtcaaagttcattttttctatgtatggatgttcatttgctccaatgtgatttgttgttaaaattatcattttgtcattgaattaccatgtgtttgtctaaaatcatttgatatttttgtgagtctttttctggaatctctctttgatttcattgacttatttgtctatgccaatatcacactgccttaattattatagcttaatagtaagtgttaaaatcaggtattgtgaacccactgacttttttcttcttttttataattgttttggcaatcctagtttctttgccttttcatatgtttgaaaatcagcttttgtatttctgtaaaaaatcctgcttggggtattgattggggttgtgtttaatttgtaaataactttattgagaaatgactccttaataagtattgagtatatctatttatttaggtcttctttgatttcttttatcagtgtcttttgttttcagcttatcaatcctgcccttattttgttaggtttgtaccttaagtactttttctttctttttttttttgttgttgaactattggtagtatttttcaaattttgttttccaatggcttattgatagtatatggaaatacaatagacttttctatactgatctctatcctgtaacttggtaaattcactaattagttttagcagctttcttataggttttttgtgatttcctttaaaggcagtcacgttgtctgtgaataaagacagttttatttcttccttttcaatctgtagagcttttatttttcttgctttattttactgacaaggacttccaacgtgatgctgaataggagtggtaagtctgaatatccttgccttgttcccaattttagggtgaaagcattcaggctcttatcattaagtaggatgttagaaaatgcccctttattgttttcacttctctacttccctttttaaaaattctgtattcttactgctctcaagtgtcttctatgtcattgcttcattttttatcattttaaagtctactttttcctatatcctctatagattttaagctttccatttgtttccctgcaattctttttttaagccattttcatttttaaaaaaaattcttggctttttaatagtagcctgttttctgtttatatttttcctatattttatacagtccgtttttttccttgcacgttagtagtcataacaattaaaaatatttttgttttctgcttctaatagtaaattactttttagtgtcttcatgatgaaagtttgtttttttaaaggtaatatttttcccatagttggattacagaagcttctctttaagaaattaattaatcatttgtcatataaaatatgcaaataaagaagttggaatgatctgattaattgtacattgtcccattgagaatgctggaaattatcttttggtaattctgggtatatcataggattgctaatatrctattttaaagtctgaaatgcttaaataatataatgataacaagcatttattgtgcttattgtgggtcagatgttataatgagttctttgtatcttacaaaacccattaatagttctagtttatacatgtacttataaaattgaggcttagagaggtttaaaaagttgcccatgattgtacagctaagtaagtggctgagttgggatttgacaagaatagtcacattcctaagctattatgctatcctaacacatagatgttagctgcggaatttttctgcgtcaggcattatgcagggtgatttatatagttgtttgtatgtacttcatattagtccattctcacattgctataaataacctgaaatagggtaattatataaagaaaagaggtgtaatttgcccacggttctgcaggctgtacgggaagcatgatgtgctggcatctgcttggcttctggggaggcctcaggaaacttacagtcatggtggaaggtgaatggggagcaggtgtctttcatggcaggagcaggaacaagagagagagggaggagggaggtgctacatacttttgaacaagcaggtcttgcgagaactcaactatcacaagaatagcactgaagggatggtgctaaaccattcatgagaagcctgcccccatgatccagtcacctcccaccgggcccacctccaacactggagattacaattgcacatgagatttgttgtggtcacagatccaaaccatgtcacataccttttaaaagtgaggaaataaaactttagaaaatattagtcactttatcatattatcccaagtggtccatgatgaaactgaaatgaggattggatctgtctgtctctaagtcttattccttttatatcatgctacctctggcagctgtaatgctatctttctttttcattctgagaactgtttaggatactgtggccaaaatagccagatgtgaaaacagatcatgccatttaaattgtaacaaaaatatattacactgacttatatgatgaaaaaaggtgtacatgcaatgactttaactgttttatggtaacttagggtcctacccacataaactgtggggtgcttgcagcagaacacatgttggtagtacagtcagccctctgtatccctggatttcgtattcatggattaaactcgcagcagatcaagaatatttgggaaacaaaaaattccaaaaagtgaaacttgaatttgccatgtgctgagtactatgttaaatccacagaaatgatgtgttgtcattgtattagttattataaataatctagagatgatttaaagtataaaggaggatatgtgtagrttatatttaaatactgtgtcattttatatgagggacttgagtatctgcagttttgggtgtctgtagggggtcctggaaccagccctcgctagatactgaggaawgactgtgattctgaattcaaagagggtaagatcaatgaaataatgttaaaaaatcaaaaggtgtttatttttattccattttaaaaacttcttttttaagctttatygaggtataattgataaacaaaaattatgcgtattcagggtgtgcaatgtgatgatttgatagctgtatacattgtgtaatgattaccataatcaaattaatcaacatatctgtcaccacacagttaccaccttttatgtgtgggtgagtgtgtgcgtgaggacatttaagatctactgtctttgaaaacttaaagtaaacaacgtggtattattaactgtagtcaccatgccatacattagattcccagaacttaatttgttttatagctaaaagttgtaccctctgaccagcatctcctcatttccctcataccccatccccaggcaactaccattctactctctgcttcagtgagttaaacttttagagtatgcgtataaattagctcatacagtgttttgtctttctgtgcctggcttatttcacttagcataacaccctccaggwtcatccattttgtcacaaatggcagtgttttctttttaaaggttgaataatattccattcattatctgttcatttgttgacagacacttaggttgtttccttatcttggccattgtgaataatactgcagtgaacatgagggtgcagatatctcttcaagatactgatttcatttcctttgcatatataccaggagtgggattgttggattgtatgatagttttatttttaatgttttaaggaacctccatactgtttttcataaaggctgtaccaatttacattcccaccaayactgtacaatggtttctttttctctgctgtyttcctaacacttgctgtctcttgtctttttgataataggtattttaacgatgtaacgtcatgttgtattatgcttttgatttgcatttctttgatgattaatgatattgaccactcttttatatacctgttgatcatttttatgcctttttttggtggggagaatgtctgttcagttcctttgtccagtttttaaatgggttattagttttcctgctattgagtttgtgagttccttatgtattttgtatgttaacctcttatacatggtttacaaatacaggttgggtatcacgtatctgaaatgcttgggaccagaagtgttttggattttggattttttgaattttggaatatttgcatatacataatgagatgtcttggggatggtaagcaagtctaaacactgaattcatttatgtttcaaatacaccttatatacatagcctgaaggtaatcttacacaatattttaaataattttgtgtatgaaacaaagttttgactgtgacctgtcatatgagatcaggtgggaaattttctgtttatggtatcatgttggagttcaaagagtttcagattttggagtattttagattttggatttttggattagggatgccgaacctctgttttctcacattctataggttgccttttcattttgttaagtttcctttgttgtgtagaagctttttagtttgatataatcacacttgtttgtttttgcttttgttatgtatttcatatccaaaaagtgatacgcttttggtgtcctatccaaaaaatcattgcaaaggccagtgctaaggagctatttttcctgtatttttttctagaaattttatagtctcagatctttcatttaagtctttaattcatttttagttaatttttgtgcatggtataagataaaggtccagttccttttttttttttttgcatgtagattttcagttttctcagtaccattagttgaaaaggctttttcccatggtgtatccttggtgcccttgtcaaagactggttgaaagacacttctttttatctcttattgtttagatttaataaatgagagggccaattgaaaaaaaaacttgacattaatagctttttgcggaatatgattgaagggattttaaaatttcatctcatctcactttaatacgtctgttttttgccatttatttatttttctttgtataaattcatggtgtacaactgaaattttgttacatgcatagatttcataatggtgaattcaggacttttaggtaatttctcattatccaccctcgcagcacctcctctcccttctgagtctccattgtctgtcattccactttttacatccatgtgtacacattatttagctcccacttatgagtaagaatatgcagtatttgtctttctgtgtctgacttgtttcacttaagataatggcctccagtttcatccaagttgctgcaaaagatatgattctgttcttttttatggctsaatagtgttccattgtctrtatatacacaccatattttctttatccagtcatccaatgatggacacttaggttgatcccatattgttgttattatgaatactgtgataaacaggagtgcaagtacctttttagtacactgatttcttttcctctgggtagatgccccattgagggattgctagattgaatgttagttctagttttagttatttgagcaatctctatactgttttccatagagttcccttttctatactattttccataagagttctcttttctccacatccttgttaacatctattattttttaacttttttattttttatttatttatttatttattattttgagacggagtcttgctctgtcacccaggctggattgcaatggtgtgacctcggctcactgcaacctccgcctcccaggttcaagagtttctcccacctcagcctcctgagtagctgggattacaggcgcacaccaccacgcccggctaatttttgtatttttagtagagatggggtttcaccatgttggtcaggctggtctcgaactcctgaccttgtgatccgcttgcctcagcctcccaaagtgtgggcttacaggcgtgagccactgcgcccggactttyttcactttttaatagccattctgactagggtaagatgatagctcaytgtggctttgatttgcatttctctgatcagtgatgttgagcatttttaaatgtatctgttggccatttttatgtcttcttttgaaaaatgtctattcatgtcctttgccctgtgcccactttttaatgggattatttttgttgttgttgttcagttgtttgggttttttgtacattctggatattggtcctctgtcaggtgcatartttgcaaatattttctcccattttgcaggttttctatgtactatgttgattatttcttttcctgggcaaatcttcttagtttaactaagttccatttgtctatttttatttttgttttctgtccttttaagatcttagtcatgaattctttgcttagaacaaggtccaaaagagttttcgctaggtttcttctagtattttaaatttcaagtattccattgaagtctctyaattcatcttgagattttttttatatgatcagagacaggggtctagtctcattcttctgcttttggcaatgcagttttctcagcaccatttattgaaaacgttgtcttttcctcaatttatgttcttgttgactttgtcaaagaacacttaaatgtaaatatgtagctttatttctgggttttctagtctgttctcttgatctatgtgtctatctttatactagtaccatgctgttttggttattatagccttgcagtttaatttgaagtcagagagtgtaaggcctccaggtttgttctttttgcttaggactgctttggccattcaggttcttcattgcttccatatgaattttaggattgtttttcctaatttagtgaaaaatgacaatggtattttgataaggattgcattgaatctgtagattgctttgggcagtatagtcattttaataataattctttttattattatgttttaagttctggggtacatgtgcagaatgtgcaggtttgttacataggtatacacgtgccatagtggtttgctgcatccatcaacccgtcatctacattaggtatttctcctaatgctatccctccaccagccccccacaccctgacaggccccagtgtgtgattcccccaccccttatgtccatgtgttctcattgttcagcacccccttatgagtgagaacatgcggtgtttggttttctgttcttgtgttagtttgctgagaatgatggtttccggcttcatccatgtccctgcaaaggacatgaactcatccttttttatgcctgcatagtattccatggtgtatatgtgccacatttttttttaatccagtctttcattgatgggcatttgggttggttccaagtctttgctgttgtgaacagtgctgcaataaacatacatgtgcatgtgtctttatagtagaatgatttataatcctttgggtatatacccagtaatgggatggctgggtcaaatggtatttatagttctagatccttgaggaattgccacactgtcttccacaatggttgaactaatttacactcccaccaacagtataaaagcattcctatttctccacatcctcttcagcatctgttgtttcctgactttttaatgatcacattctaactggcatgagatggtatctcattgtggttttgatttgcatttctctaatgaccagtgatgatgagctttttttcatgtgtttttggctgcataaatgtcttcttttgagaagtgtctgttcatatcctttgcccactttttgatgggtttttttcttgtaaatttgtttaagttccttgtagattctggatattagccctttgtcagatggatagattgcaaaaattttctcccattctgtaggttgcctattcactctgatggtagtttcttttgctgggcagaagcccttcagtttaattagatcccatttgtccattttggcttttgttaccattgcttttggtgttttagtcatgaagtctttgcccatgcctatgacctgaatggtattgcataggttttcttttagggtttttatgatttttaagtctttaatctatcttgacttaatttttgtataaggtgtaaggaaggggtccattttcacttttccacacagggctagctagttttcccagcaccatttattacatagggaatccyttccccatttcttgtttttgtcaggtttgtcaaaggtcagatggttgtagatgtgtggtgttatttctgaggcctctgttatgttccatkggtctatatgtctgtatggtaccagtactacactgttttggttactgtagcctcgtagtgtagtttgaagtcaggtagcatgatgcctccagctttgttcttttgcttaggattgtcttggctatgtgggctccttttggttccatgtgaaatttaaagtagtttttttccaatgctgtgaggaaagtcaatggtagcttgatggggatagcattgaatctataaattactttggacagtatagccattttcacgatattgattcttcctatccatgagcatggaatgttttttcatttgtttgtgtcctctcttattttcttgagcagtgatttgtagttctccttgaagaggaccttcaaatcccttgtaagttggattcctaggtattgtatcctttttgtagcaattgtgaatgggagttcactcatgatttgtctttctgtgtctgttattggtgtatagggatgcttgtgatttttgcacattgattttgtatcctgagactttgctgaagttgctcatcatcttaaggagatttttggttgagatgatggggttttctaaatatacaatcatgtcatctgtaaacacagacaatttgacttcctcttttcttttttttctttttttttttgagacggagtctcactctgtcacccaggctggagtgcagtggcgcgatgtcggctcactgtaagctcctcctcccgagttcatgccattctcctgcctcagcctccctagtagctgggactacaggtgcttgccaccaagcccagctaattttttgtatttttagtagagacggggtttcactgtcttagccaggatggtctagatcccctgacctcgtgatccgtccgccttggcctcccaaagtgctgggattacaggcgtgagccaccgcacccagcctcctcttttcctaattgaatatcctttctttctttctcttgcctgattgccgtggctagaacttccaatactgtgttgaataggagtggtgagagagggcatccttgtcttgtgctggttttcaaagggaattcttccagtttttgcccatacagtgtgatattggttgtgggttgtcatgaatagctcttattattttgagatatgttccatcaatgcctagtttattgagagttttttttagcacaaagggctgttgaattttatcaaaggtcttttctgcatctgttgagataatcttgttgttttttcaytggttctgtttatgtgatggattacttttattgacttgcatatcttgaaccagccttgcatcccagggatgaagccgacttgatcatggtggataagctatttgatgtgctgctggatttggtttgctggtattttattgaggatttttgcatygatgttcatcagggatactggcttgaaattttctttttttgttgtgtctctgccaggttttggtattaggatgatgttggcctcgtaaaatgaattaggaaggattccctctttttctgttgtttggaatagttttagaaggaatggtaycagcttctctttgtacctctggtagaatttggctgtcattctgtctagtctgggactttttttggttggtaggctattaactactgcctcagtttcagaacttcttattgctgtattcagggattcaaattcttcctggtttagtgttgggcaggtgtatgtgtccaggagtttatccatttcttctagattttctagtttatttgcgtagatgtgtttctagtattctctgatggtagtttgtatttctgtgggatcagtggtgaagtcccctttatcattttctattgtgtgtatttgattcttctctcttttcttctttattagtctggctaagggtctgtgtattttgttgagcttttcaaaaaaccagctcctggattcattgatttttttgaaggacttttcatgtctctatctccttcagttctgctctgatcttagttatttcttgtcttctggtagcttttgaatttgtttgctcttgcttctctagttcttttaattgtgatgttagggtgtcgattttagatctttcctgtttttgttgagttttgttttatttttttttttttgtgggcatttagtgctataaatttccctctgcacactgctttaaatgtgtcccacagattctggtaccttgtgtctttgttctcattggtttctaagaacaactttatttttgcttttatttcgttttctacccagtagtcattcagcggcaggttgttcagtttccatgtgttgtgaggttttgagtgagtttcttaatcttgagtctaatttgattgcagtgtggtccgacagagtgtttattaatgatttctgttcttttgcatttgctgaggagtgttttacttccaattatgtggtcaattttagtataagtgcgttatggtgctgagaataatgtatattctgttgatttggtgtggagagttctgtagatgtctattaagtccacttggtccagagctgagttcaagtcctggatatccttgttgattttctgtctttttgatctgtctaatattgatagtggggtgttaaagtctctcactattattgtgtggtagtctaagtctctttgtaggtctctaagaacttgctttatgaattggggtgctcctgtattgggtgcatatatacttagaatagatagctcttgttgcattgatccccttgccattatgtaatgcccttgtctcttttgatctttgttggtttaaagtctgttttatcagagactaggattgcaacccctccttttttttgctttccatttgctttgtagatcttcctccatccctttattttgagcctatgtgtgtctttgcatgtgagatgggtctcctgaatacagcacaccaatgagtcttgactctttatccaatttgccagtctgtgtcttttaattggggcatttagctcagtcacattaaagattaatattgtcatgtgtgagtttgatcctgtcattatgatggtagctggttattttgcccattagggtttctgctgagagatctgctgtgggtaacctgacctttccctctggctgcccttaacattttttcctttatttccaccttggtgaatctgacgattatgtgtctcggggttgctcttctcgaggagtatctttgcggtgttccctctatttcctgaatttgaatgttggcctgccttgctaggttggggaagttctcctggataataccctgaagagtgttttccaacttggttccattctccccatcactttgaggtacaccaatcaaacatagatttggtcttttcacatagtcccatatttcttggaggctttgttcatttcttttcactgtttcttctctgatcttgtcttctcactttatttcattgagttgatcttcaatatctgatatcctttgttttgctttatcgattcggctattgatacttgtgtatgcttcatgaagttctcgtgctgtgtttttcagctccaagaggtcatttatgttcttctctaatctggttattctagttagcagtttgttttacctttttttcaaggttcttagcttccttgcattgggttagaacatgcgcctttagcttgtaggagtttgttattacccaacttctgaagcctacttctgtcagttcgtcaaactcgttctccgtccagttttgttcccttgctggcgaggagttgtgatcctttggaggagaagagccgttctggtttttggaattttcagcctttttgtgctggtttctccctatctttgtggatttatctacctttgttctttgatgttggtgacctttggaagaggtctctgagtggccgtactttttgttgatgttgatactattcctttctgtttattagttttccttctaactgtcaggcccttctgctggagtttgctggatgtccactccagaccctgtttgcctgggtatcaccagtgcaggctgcagaacagcaaagattgctgcctcttgcttcttcctgaagcttctttccagaggggcacccacaagatgccagccccagctctcctgtatgaggtgtctttcggctccctctgtggggtttctcccagtcaggatacacaggggtcagggacccacttgaggaggcagtctgtcactggatcagagcttgaatgctatgctgggagatccactgctctctccagagctgccaggcaggggcgtttaagtctgctgaagctgcacccacagccacccctttccccaggtgctctgtcccagggagatgggggttttatctataagtccctgactgaggctactgcctttttttcagagatgccctgcccagagaggaggaatctagactggcagtctggctgcagtggctttttgagctgcagtggctttttgagctgcagtgggctctgcccagttcgaactctctggtggctttgttacactgtgagggtaaaaccgcctactcaagcctcagcaatggcggacgcctgtccctccaccaagctcgagcttctaggtcaactcagactgctgtgctagcagcgagaatttcacgtcggtggatcttagcttgctgtactctggggttgggacctgctgagccagaccactttgctccctggcttcagccccctttccaggagagtgaaacggtgattcactggcattccaggtgccattggggtatgaaaaaaacaaacaaacaaactcctgcagctagcctggtgtctgcccaaacggccacccagttttatgcttgaaacccagggcctaggtggcataggcacccgagggaatctcctggtctgcaggttgtgaagaccgtgggaaaagcacagtttctgggccggagtgcaccgttcctctcggtacagtctcttacggcttcccttggctggggaagggggatctcctgacccgttgtgcttcccgggtgaggcaatgccccaccctgcttctkctcaccatccgtgggctgcatccactgtcctatcagtcccaktgagatgaactgggtacctcagttggaagtgcagaaatcacctgccttctgcatcgattttgctgggagctacagaccggagctgtttctttttggccgtcttgccagcatatcatcataatagttcttttgacccatgagcatgggatgtttttccatttgtttgtgtcgtgttcagttttctttcgtcagtattttgtagttctccttgtgaagattgtgcatcttggttaaaaaaatattcctrtgtatttggctgagcactgtgggctcatgcctgtcatttcagcactttgagaggctgaggtgggtggatcaccactcctgggtgatccccaagagtttgagaccagcctggccaatatggtgaaacaccatctctactaaaaatacaaaaattagccaggcgtgctggtgcgtgcctgtaatcccagctacttgggaggctgaggcctgagaattgcttgaacctgggagggataggttgcagtgagccgagatagtgccactgcactccagcctgggcgacagagtgagactctgtctcaaaaacaaacaaacaaaaaattcctatgtattgtatttttcttgtagccattgtaaatgggattgttttcttgattttgttctcaactagattgttactggtgtaagaaatgctactgatttttcatgttgattttgtgttgtgcagctttactacattcatttattaaatctaagaatttttcatgaatctttaggttttcctagatataagttatatcttcagcaaacagtaataattttactttctcttttcccatttagaagccttttatctcttgcctgatggctgtggctaggacttccagtactatgttaaataggagtagtgaaaatgggcatccttgtcttgtccaacgttttygaggaaatgtttttaacttttccctgttcagtgtgatgttgtctgtgggcttgtcatatatggcatttaatattatgatgcatatttcttctatgcccagtttgttgagagtttgtatcatgaaggggtactgcattttatcaaatgctatttctcagwctattggtttgatcataaagtttttctccttcattctttttatgtgatgaatcacatttattgacttgtgtattttgaaccactcttagatcccttgactaaaacccacttgattgtggtgtattatctttttaatatgctgttggattctgtttcctagtattttgtttaggactgttgtgtctatgttcatcagggtattggtctttagttttctttattcgttgtgtccttgtctggttttggtattgggatgatactggagaatgagttagggagaattcctttcccctgttccaactttttggaacagttttacaagaattggtattakttctttgtatgtttggcagaattcagctgtgaatccgtctggtcctgcgtttttggggggaagattttattactgatttaatctcactacccattattggtctattcaggctttctgtttcttctttgttcaatcttgggaggttgtgtattagtctgttcttacattgctacacagaaatacctgtgactgggtaacttataaagaaaagaggtttaattggcttatggttctgcaggctgtactggaagcatgatgctagcacctggggaggccttgagaaacaaaacaatcatagcaaaaggtgaagggggagcaaacccatcacatggtcagagcaggaacaagagaggaaggggggaggtgctacacacttttaaaccaccagatctcaagagaattcactattgtgaggacaataccaagaggggtggtgctaaatcattcctgagaaacctgcctccatcatccaatcacctcccatcaggccccacctccaacattgggtattacatttcaatatgagatttggatgggaacatacatccaaactatatcaggttatatgtttccagaaatttacctattttctgcaagttttctagtttatgaacatgtagttgttcataatagtctctgatgatcttttgaatttttctcatatcatttgtaacgtctccattttgatttcttattatatttggatcttctttcctctggttagtcttgctagcacttgatcaattttgcttatctttttaaagaacgagctttttgtttcattaatttttwaatttttttttggtctctgttttatttagttttgctctgatccatgttacttctttacttctgctaattttgtgtttggttcgttcttgcttttctagttcctttagatgtattgttaggttgttaatttgcaatctttctacttttttgatgcaggtatttattgctgcaaaattccttcttagcactggttttgctgtgtcctacaggtttttgtattgctgtgtcctacaggtttttgtatgttgtatttccagtttcatttgtttcataaaattttttaattctccttaattttttcattgatccaaaggtcattcaggggcatattgtttaatttttctgtatttgtatagtttccagagtttttcttgatattgatttcttggtattggttttaatctactgtggtctgagaagwtacttggtatgatttgatttttaaaaatttgttgaggcttgttttgtggcataacatatggtctatattggagaatatcccatgtgttgatgagaagagtatttattctgyagttgttggatagaatgttctataaatgtgtgttaggtacattttgtctgaagtccaatttaagtctgatgtttgttgattttatgtctcagtgagctgtctaatgctgtgagtgagatggtgacgtcccctattattgtttttctgtctaactctctttaggtctagtaatatttgttttatgaatttgggtgctcaaatgttgggtgcatgtatgtttagaattgttatgtcctcttgtagaactgacacctttaatatcaggttttatacttttgtgttttcttgatggggttgccctgtctctttcaagtttaggactcctttgaacatttcttgtagagctggtctacttttgacaaattctcttagtattctgttaataatctgtctgggaaagaagattatttctacttcatttatggagcttgatatttctggatgtagaactcttgactgataatgacttcattattttttactatttttattttaaagtatgctttatctgataaaaatatagctacctctgcttgctttagattttcgttggcccataatatcaatcaatatctttttccacccctttacttttagtctatgtgtcttcacagataaggtgggtttcttgtaaatagcatatagttgattttttttctttttttttgagatggagtcgcgtgctgtcgccaagctggagtgcattggcgggatctcagctcactgcaacctccgtctcccgggttcaagcaattctcctgcctcagcctcctgagtagctgtgactgtatataggtgcgcgccaccatgcacagctaatttttgtactttaagtagagactgtcaccatgttgacagaatggtctctatctcttcacctcgttatccgcctgtgttggcctcccaaagtgctgggattacaggcatgagccaccgctatatggcctatagttgattttttttattcatttagccaacgtgtattttttagtaggacatttaatccatttatgtttgaggtggtatatgagattttgttcctgtcatattgtttttttcatcattttgtaaacttttgggttttttgtctgtctaaatttatggtttgttggaattctgtaatggtttcatttgattcttcttctttgtatgatatctttactagtgtattttatatttttgtgtgttttcacaatgataaatattgtcctgtctcttccaagtttaggacttctttgagcatttcctgtaggactggtctagttttcatgaattccctcagtatttgattgtctgggaaagactatttctcctttatttatgaagcttaatactacctggatatacaattcttggctgacagttgttttctttcacactttgattatgtcgtcacattttttcctgccttgtaaggtttctgctgggtagtctgctgttagtttgatggactttcctttatagatgacacttttctcttgattgtagaatttgttctttcactttgacattagacactcattataatatgttgtaytgaagtcccttttatgttgtatttgcctgcagatcatggagcctcctgtatctattatgtctgtatctcttgctagccttgggagtttttcartctattattttgttaaagatttttgatgtttctgtccctttgggaataccagtaattcataagttcaatgctgtatgcagtcctaaacacttggaaagctttgttcatttttttcttatttttaaaatttttatcagactgcactgtttgaaaagacctgtcttcatgttctgaaatcttttcttctgcttggcctagtctattattggagtttccatgtattttatatctccttcagtgaattttttagttccaggatttttttaaagacgtctatctccttggtaaatttctcattcatatcctgaattgattttctgattactttgtattagttttcagatttctcttgtatctcattgaacttaattgaaatcaaaatattgaattctttggggttgtaaggttttctttttggttctgctctattgttggagaattattgtgttcctttgatggtgtcatattgccatgcgttttcatgtttcttgtgtttttatgttcattctagcacatctggaacaattgctttttttttcaatttaacttttgtttggagtagactttgctcctttatatgtgacttcgatgttggttgagtagggccacttgtttttatttctgggtgtgcgcattggtgaatactttatgatattcttggctataaatattgttattggtatctgtggattcctttgtgtgttagggtgtgggttttgatggaggatgtggtgaaattatgctagggactggaatgcttgataggtccttcttcaggtttcagtggtagcagtggttgtctaagcaggtctatatctagggcagtgtgtgctggcacatgagttggcagttccatgcaggctgattattgggggctctgggtggctcttttggataccagttgtggtagcagtgtastgggcaagtgagtgggctcatgagctcttgggtagctgggtggcctcagtaatggtggcagcagtagtggtaagatgctctccccagtgcccttgtgttgggagtgattgcaattggctgtgtgggctgacctccaggctgggtggcacttgcagatagaaaccaaccgagagagtaatggcagggtttttatgcccaaactctgtcccctgggagaagtgcttgggtgtctcaggcagtgggctggactgtgggacctccagaagtccagatcctgcattgtgtctcagagagtagggcaaagctgrgtaaatctggattgggaaagcctgggcttgtcctatgaaatgcttgcatgaggggtgacaacacctttgctgaagtactgccatgatgggagagtggggctactggtcccagtggtttcagcattggctggcaagtgggraatctgtgtccctctcatgtctcagtcctggtggggcttcctcccttatcccgactcttgcagctgatcctgtagtttagtcggactgggtagttgtcacctatctcataactcagccctgcccaggtcaggaccagactgctttggcggctcttattctgctcacatcttgggggttgcctagctcccaagctgggggctggagtttatgtcacrcttgcttttcagtcctggttgcagaatcccatttcctacacaggccccagttcagcaaaccacagattgagttactctgatacttaggactggtgctataggttcccaggtcacasaatttgttaaaccctaggattgagaatggcatcttactgtagctgcttaggtctcagggaaggtgtggaacccagggtgtgttatttccctatagcagttcctttatacagtctcctggttgcttcccaagtcaaattcaaggtttgggagggtcaagatacactcccatggcctggattatacaattgattctcyagtaggaaagtgaaccacagaaagacactcagttaccttctcccacgttgcagactcccttttggttgccagcctgccctgtccacattagctgtttgttgtcctctctttttggagtttctgtttgcttttctgttaaatgcctgtgttctgtcttggaacacttacattataagtgtgactttaacactttatcttaacctctttggagacttgagactgaaatgtcactaccacttattagaatttgtattcttccctcttgaatctgtgttgactgttagcagtgttcttctaacagggttttctgtttgattttgttgttgtaatacctatgtgttcataacatttattaaatcatgaattcttttcagacagaaattgaatgctatgtttaattttattcctgaaattctatttggagctcttttacgtgtattcctgccatactaaatgtaaaaactgacatgtcaaatgtttttgacatcaatgtatcttttctgggagatacctaaaggaaacgacttgagttcttttatatatattttctaaaatatttttacaaataagattatgagacttgtaaataatattttaagcacttctgagtatcttgctctttaaagcatgcatttattgactccttaaaatgcacttatggttttgtcagggagttttaaaatataaattcaacagttctgtctagtttgaatgtttagaatgtgtttaatgtgattttctcctgctaagaatgttctttatttcgccaagtacatggcagattttccataatataaactattatatagtgaaactttgtattttcttacaggttcttgagaaatctacatgaaaaaatggatagacaatagtcctaagataataatgttcctataacattaaaaaaatcccctttaagccattgtaagatttactttattgttaacaactagttgtttcattaattattgaatacctatcttttatatggagtataagaaattataaattgttactttaaaaacttatgttctcttgttttattattttctttaatttgatttcatttcttttggcattctatggatggtcgaatggctttgtcctaaagaggacagaaaaagcatactttatgcagctaaagcttgaaacacaatatgtaactgtgaatacatatctgagagcttcttcaagatttaaatgcttctgaacattattgtctttgtttatagcaagggtattttgttgtaattatattcacatgcaattcaaatttctgccttttttgttactttagtttcggtatgttatgtaaaaggcataggttttctgtatgcttaaattcactgactatacgtggttgtgagctttaaatgctgctatgtattctctacctttactgaaatgtttatctgcagtaaaatgcagagatttttttttttttttttttttttttgagacggagtctcgctctgtcgcccaggccggactgcggactgcagtggcgcaatctcggctcactgcaagctccgcttcccgggttcacgccattctcctgcctcagcctcccaaaatgcagagattttaatttaattgttcagtctgatgggttttagaagttatatacacacatttaattatgatacctaacaaagtatagaaaattttcatcagcaggaaattactttcaacctcatcctcacttttttatttctgtcaccacagattagttttgtctgctcttggatttaacgtaatggactcatataatatgtatttgactgtcactcaaaataatttttttgattcattcatattattacatttattagtaattcttttattgctaagtgtcattccattatatgaaaatatcacaatttgtttatctgtatttctgttcatgtatgtttgggttttttacagtttctggctaatatgagtaagattgctatgaacatttgtgttcaagtcattttatggatattatatttttttcccttgcgtaaatatctagtaatggggattgctgatcccccaagccaaaaagtctgagactctctatttaagttttagtctctccatgctacatggattgggaaaagtcatatatgtgtgaatctcaccttgagtggtttcctttaagagtcaaatttcctttaacttttgcctgattttagtcattcttttttgtttgtttgtttttgaggtagggtctcgctctgtggcccaggctggagtgtgcagtggcacgatatcagctcactgcaacctctgcctcctgggttcaagagattcttgtgtctcagcctcccgagtagttgggattacaggcacgcaccaccactcctggctaatttttttgtatttttagtagaggtggggtttcaccatgttggccaggctggtcttgaacccctgaacttaagtgatctgcccgccttggcctcccaaaatactaggattacaggtgtgagccaccacacctggcctgattttagtcattcttaatgcattcaaattgttgttttaaaaaaacgttttgtatagagattatatatttttatattcaaggaggttggtgtgatataggctatttcccaaccattactagactaagaactccaaaagtgattttttaaaaatgtgtcttattttatccaccccactccatttccattttagggtttccatgttacttattgtagaagttggagttcttacaattgtctttaaggaactacatgccctgttgtctcctcagcccacaacctacattgttgaccatctccttttaacatcctctatctggcttattgaatacctctaatctctttacttcaaaagttctgctggatgttcatagggctggcttggttcctttttccagctgattgtttaaatgtcacatttgtcagtgaatctttccctgatagtgccacctcctctgtggcattttattatcttatttttctccataatatttattttttttgtggcccactatatattttacttatttacttttttgtctgtctctaccaccagaatataagctcctcaatggcaataatttttgtctgtttgtttactgctgttattttcactacttttggtctttgggagatagtagagtgtcagtaaatatttgttgaatgaatgcatgtgcaatattccatccttacaaactkctatttttaagttcactttattcggtttccttatgaagagggatatttttwtttattggcagagaaaggacaataaaaggaggaggctatgaactgcattttgtatttcctaatattcttttgtgttttcatttttggttgtacttcaagcctttttgtggttcatttattttatggctcttgaattttgctagagtactagattctagtcatttaaaaaattttctctttaaaagtgaaaatatggaaagaattgctttagcttgaaacagatggaaattctccaggaaaaaaaaaagtgatggacttagctgttgatgcagaaatcaatttaaaaatctttagatctaagagacccttaatcagtcttatttgaaacagaatgtatttctccactgcataagtaattggctgaaaccagaaccattaacaaattgaatgaagwtttcgttaatgccagggaactgtgctgttagcaaaatcactcttattatgtcacagtattcaaagatgtgcatttgttaaatagagttgatgtactttttcagagtgttgccaattgtgagaacatttgttgaatgacatttcagtgtcctcaaacttgtgctattatcttcatatattcttggtatgcagaggtgacaaacaatttgaaaaaaaaatacattgrtgattyccctcacttccctccaacttgaatatgaaggccagtcttatgatttggtactttggtcaagtctgtgggtcaagggatataattaagttccttgtcaccctaacagtgagactaggccgacttttgtggtgtctaaacttgagggtattggttagggaatatccctgaattgtgtttgtaataaggcatttgcacttcttattgtgatttgatgtagcagccaaattaaaagtacagagtgccaaaatgaatgtgttggcttagtcacttttggagttttgcagagggcaacagactcctgaggtcttctggaggctgcctaatgggtaaccctgttggagatttgtgcagtatgtcttatgaaagtaggcagtcacttggatatggtaatatattcacttctgtgttttataggttatatattgtataccagtcatctctgataccctggccctggcatcttattattttttttccagagacagggttttgctcagtcactcaggctgaagtgtgcagtggcttgtggtgtgatcatagctcactgcagccttaaactcctaggctcaagggatcctcctgcctcagcttcccaagtaactaggactacaggtgtatgctgtcatgcctagatactttttaaagaacattttcatagagacagtrtcttgccattttgcccaggctggtcttgaagtcttggcctcaagcaattggtccccctgcctcagcctcccaaagtgctaggattacgggtgtgagtcactgtgcctgccttgtatctttaaaaaataatgttttataattataatttgtatagtatacactgtattcttttgaattgtatggttccatgaattttgataggtgtatttccatgagatcaccatggtaatcaagatacagagcattatgtttatagcggcacgatttgcaattgcaacaatatggaaccaacctaagtgcccatcaaccaacaaatgaataaagaaaatatggtatatatacactatggagtactactcagccataaaaaggaatgaagtagcgttttttgcagcaacttgggtgrmactggaggccagttttctaaatgaagtaattcaggaatggaaaaccaaatatcttacgttctcccttattgggagctaagctatgaggttgtggtggcatgagaatgatataatggactttggggatttgtggggcaaggttgggaggaagatgagggataaaagactacacattgggtacagtgtacactgcttsggtgacggttgcactaaaatctcagaaatcactgctacagaacttacccatgtaagcaaataccacctgtacccyaaaaactattgaaataaaattaaaaaaaattttttttaaagatagagtattttcattaccctcaaaagtttcattttcctttgcagtcccttactgccctaacctagccccaagcaacccctgctctacattctgtcactatagatggcattctctagtattttatataaatggacttacagatatactttttgtatgtgtctggcttcatwcactgattataatgattttgagactgatcattttgttacttgtattagtacttttttttttttattacagagtagtattctaccatttggatatacctcagtttgcttatctgttcacctgtttgtggatatctgggctatttctaggttttggctattatgaataaacctaattaatgtttatctgtgattaacatttatgtatatgttttgtatgtttttgtatatgtttatgtatatgttttgtatgtgtatatgtatatgtttttgtataggcctatattttcttttttttaattatactttaagttctaggatacatatgcacaacgtgcaggtttgttacatagatatacatgtgccatgttgttatgccgcacccattaactcatcatttacattagatatttctcctaatgctctccttccccctgccccccaccacatgacaggccccgtgtgtgatgttccccttcctctgtccaagtgttctcattgttcagttcccacctatgagtgagaacatgcagtgtttggttttctgtccttgtgatagtttgctgagaatgatggtttctggcttcattcatgttcctgcaaaggacatgaactaatccttttttatggctgcatagtattccatggtgtatatgtgccacattttcaaaatccagtctatcattgctggacattcgggttggttccaagtatttgcttttgagaatagtgccgcagtaaacatacatgtgcatgtgtctttatagtagcatgatttataatcctttgggtatatacccagtaatgggatggctgggtcacatggtatttctagttctagatccttgaggaatcgccacactgtcttccacgatggttgaactagtttacactcccaccaacagtgtaaaagcattcctatttctccacatcctcttcagcatctgttgtttcctgactttttaatgatcgccattctaactggcatgagatggtatctcattgtggttttgatttgcattctctgatggccagtgatgatgagcattttttcatgtgtctgttggctgtgtagatgtcttcttttgagaagtgtctgttcatatcctttgcccactttttgaatggggttatttgtttttttcttgtaaatttgttggagttctttgtagattctggatgctagcccgttttcagatgggtagattgcacaaattttctcccattctgtaggttgcctgttcactctgatggtagtttcttttgtcatgcagaagctctttagtttaattagattccatttgactattttggcttttgttgccattgcttttggtgttttagacatgaagtccttgcccatgcctatgtcctgaatggtattgcctaggttttcttctagggtttttatgttttaggtctaacatgtaagtctgtaagccatcttgaattaatttttgtataaggtgtaaggaagggatccagttttagttttctacatatggctagcctgttttcccagcaccatttattaaatagggaatcctttccccatttcttgtttttgtcaggtttgtcaaagatcagatggttgtagatgtgtggtgttatttctgaggcctctgttctgttccattggtctgtatctctgttttggtaccagtaccatgctgttttggttactgtagccttgtagtatagtttgaagtccggtaacgtgatgcctccagctttgttctttttgctcaggattgacttggcaatgagggctcttttttggttccatatgaattttaaagtagtttttccaattctgtgaagaaagtcattggtagtttgatggggatggcattgaatctataaattaccttgggcagtatggccattttcatgatattgatttttcctatccatgagcatggaatgctcttccatttgtttgtgtcctcttttatttcattgagcagtggtttgtagttctccttgaagaggtccttcacatcccttgtaagctggattcctaggtattttattctctttgaagcaattgtgaatgggagttcactcatgatttggctctctgtctgttattggcatataggaatgcttgtggtttttgcatattgattttgtatcctgagactttgctgaaattgcttatcagcttaaggagattttgggctgagacgatggggttttctaaatatacagtcatgtcatctgcaaacggggacagtttgacttcctcttttcctaactgaataccctttatttctttctcttgcctgcttgccctggccagaacttccaacactatgttgaataggagtggtgagaragggcatccctgtcttgtgctagttttcaaagggaatgcttctagtttttgcccatttgatatgatattggctgtgggtttgtcataaatagctcttattattttgagataatcaatacttagtttattggaataccatcaatacctagtttattycaacaaaagccaatggaaactaatacaaatggaatctaatacctctaataccatcgatacctaatttattgagtgattttagcatgaagggctgttgaattttgtcgaaggcctttcctgcatctactgagataatcatgtggtttttgttgttgtttctatttatgtgatggattacgtttattgattggcgtatgttgaaccagccttgtatcccagggatgaagccgacttgattgtggtggataaactttttgacgtgctgctggattcggtttgccagtattttattgaggatttttgcatcaatgttcatcagggatattggtctaaagttctctttttttgtcgtgtctctgtcaggctttggtatcaagatgatgctggcctcataaaatgagttagggaggattccctctttttctgttgtttggaatagtttcagaaggaatggtaccagctcctccttgtacctctggtagatttcagctatgaatctgtctggtccttggctttttttggttggcaggctattaattatttccttaatttcagagcctgttattggtctattcagagattcaacttctttctggtgtagtcttgggagggtgtatgtgtccaggaatttatccatttcttctagattttctagtttatttgcatagaggtgtttatagtattctctgatggtagtttgcatttctgtgggattggtggtgatatcccctttatcattttttttttatctatttgattcttctcccttttcttctttattaatcttgctagcagtctatcaattttgttgatcttttcaaaaaactggtttctggattcattgatgttttgaagggtttttttctgtctctgtctccttcagttttgctctgatcttagttatttcttgccttctgctagcttttgaatttgtttgcttttgcttctctagttcctttaaatgtgatgttagggtgtcagttttagatctgtccatctttctcttgtgggcatttagtgctataaatttccttctacatactgctataattgtgtcccagagattctggtacattgtgtctttgttcttattggattcaaagaacatctttatttctgccttcatttcgttacttacccagtagtcattcaggagcagattgttcagtttccatgtacttatgcagttttaagtgagtttcttaatcctgagttctagtttgattgcactgtggtctgagagacagtttgttgtgatttctgttcttttacattggctgaggagtgctttacttccaactatgtggtcaattctggaataattgtgatgtggtgctgagaagaatgtatattctgttgatttggggtggagagttctgtagatgtctattaggtctgcttgatgcagagctgagttgaagtcctggatatgcttgttaaccttctgtctcattgatctgtctaattttaacagtggggtgttaaagtctcccattgttattgtatgggagtctaagtctctttgtaggtctataaggacttgctttatgaatctgggtgctcctgtattgggtacatatatatttaggatagttagctcttcttgttgaattgatccctttaccattatgcaatggccttctttgtctcttttgatctttgtttaaagtctgttttatcagagactaggattgcaacccctcctttatttttgctttccatttgcttggtagatcttcctctatccctttattttgaacctacgtgtgtctctgcacgtgaagtggttctcctgaatacagcacactgttgagtgtcttgtgtcagtctgtgtctcttaattggaacatttagcccatttacatttaacgttaatattgttatgtgtgaatttgatcctgtcgttatgatgttacctggttattttcctcgttagttgatgcagtttcttcctagcattgatggtctttacaatctggcatgtttttgcagtggctggtaccagttgttcctttccatgtttagtgcttccttcaggagctcttgtaaggcaggcctggtagtgacaaagtctgtcagcatttgtctgtaaatgattttatttctccttcacatatgaagtttattttggctggatatgaaattctgggttgaaaattcttttctttaagaatgttgaacattggcccccactctcttctggcttgtagagtttctactgagagatgcgctgttartctggtgggtttccctttgtgggtaacccgacctttgtctctggctgcccttaacattttttcctttgtttcaactctggtgaatctgacaattatgtgacttggagttgctcttctcyaggagtatctttgtggcgttctctgtattacctgaatttgaatgttggtctgccttgctagcttkgggaagttctcctggataatatcctrcagagtgttttccaacttggttccattctccctgtcactttcaggtgcaccaatcagatatagatttggtcttttcacatagtcccatattttttgaaggctttgttcgtttctttttattcttttttctctaaacttctcgcttcatttcattcatttgatcgtcagtcactgataccctttcatactgaatgggcaaaaactggaagcattctctttgaaaactggcacaagacagggatgccctctctcaccactcctgttcagcatagtgttggaagttctggccaggccaagcaggaaagagaaagaaataaagggtattcagttaggaaaagaagaagtcaaattttccctgtttgcagatgagatgattgtatatttagaaaaccccattgtctcagcccaaaatctccttaagctgataagcaacttcagcaaagtcttaggatacaaaatcagtgtgcaaaaatcacaggcattcctatacgctgataacaaacagagatccaaatgacgagtgaactctcattcacaattgcttcaaagagaataaaatacctaggaatccagcttacaagggatgtgaaggacctcttcaaggagaactacaaaccactgctcaacgaaatgaaagaggacacaaacaaatggaagaacattccatgctcatgaataggaagaatcgatatcatgaaaatggccatactgcccaaggtaatttatagattcaatgccatccccatcaaactaccaacgactttcttcacagaattggaaaaaactactttaaagttcatatggaaccaaaaaagagccctcattgccaagtcaatcctaagcaaaaagaacaaagctggaagcatcacgttaccggacttcaaactatactacaaggctacagtaaccaaaacagcatggtactggtaccaaaacagagatatagaccaatggaacagagtacagcccttggaaataataccacacatctacaaccatctgatctttgacaaacctgacaaaaacaagaaatggggaaaggattccctatttaataaatgttgctgggaaaacaggctagccatatgtagaaagctgaaactggatcccttccttacaccttatacaaaaattaattcaagatagtttaaagacttaaaaattagacctaaaaccataaaaaccctaagaggaaacctaggcaataccattcaggccataggcatgggcaaggacttcatgtctaaaacaccraaagcaatggcaacaaaagccaaaattgactgatgggatctaattaaactaaagagcttctgcacagcaaaagaaactaccatcagagtgaacaggcaacctacagaataggagaaaatttttacaatctacccaactgacaaagggctaatatccagaatctacaaagaacttgaacaaatttacaagagaaaatcaaacaaccccatcaaaaagtgggcaaaggatatgaacagacacytctcmaaagaagacatttatgcagccaacagacacatgaaaaaatgttcatcatcactggccatcagagaaatgcaaatcaaaaccacaatgagataccacctcacaccagttagaatggcgatcattaaaaagtcaggaaacaacaggtgctgaagaggatgtggagaaatagcaatgcttttacacctttggtgggagtgtaaactagttcaaccatcgtggaagacagtgtrgcgattcctcaaagatctagaactagaaataccatgtgacccagccatcccattactaggtatatacccaaaggattataaatcatgctgctataaagacacatgcacacgcatgtttatagtggcactattctcaatagcaaagacttggaagcaacccaaatttccgtcaatgatagactggattaagaaaatgtggcacatatacaccatggaatactatgcagccataaaaaaggatgagttcatgtcctttgtagagacatggatgaagctagaaaccatcattctgagcaaattatcgcaaggacagaaaaccaaacactgcatgttctcactcataggtgggagttgaacaatgagaacacttggacacagggtggagaacatcacacactggggcctgtcgtgtggtggggggaaggaggagggatagcagtaggagatatacctagtgtaaatgacatgttaacgggtgcagcacaccagcatggcacatgtatacatatgtcacaaacctgcacgttgtgcacatgtaccctagaacttaaagtataataataataataataaaaaaggtgggaaacataacagattatcagagaaaactgctctggataaaaattgttttgtgaaacctttgtgtatgtgtgtcagttcgcagcataaaaagtattcttgctgtgggacatagtccaaaaaactttaatgctgctgtttttagagagcttctagtaaaaatttagctggtaaatttacattttcttttcctattttgaggagttaatgtagtaattttgtctaatttgagatgtgcttagaattttggtttacagagtaattgtaagaatttaagattatattgaagttataatattttgaggtgacattttagtaacattctcaggtaaaaggtaatgtaagtgagatgcctaactactgtgttaacagttttggcatgggttgaaaaccattataaatattagtggcttattttcctgtgttttatattattttgatcatatttaaacctaggacattaaagtgtaaggaccctcagatttaaatttgaatatgaaataataaagaaattacattaatataattcattgatatgatgtacacaggatagttttattttaaatagaagcaaatataattagctaacaagkcaaaactctatactgggttttatttcacatgtaactaaaatattggtgattgtcttatttgcttagttatgagtctcaggaataattaaatggtatgagatttttcatctttgtatagtaactgtatcttgtttatgtcagcaatgcctactataggtctggcaaataatataagaatatattctaaacaatgtaaggaattatttattccctttgcttttaggacattgatatttctgaagtatacgtgccacttattttatggcgtatccctcaatttttatttttctgttgttaattcatgatcagatttagattgtgattttttggttagaatactgtgtaagtgacgttgtgacttttgcagaatatcacacctacaggtgcttgatgttcattagccactttttgataatgttaattttgatcccttgggtaaggtgaggttctccactgtatcactactcttttcttttataaataaagagcagtcgtgggtagatactttgtgactatgtaaacatacaattccacgtgagactttctccactttgattcagtatctactgatgattcttacttgattgaacttcttgtaacttttgattttgatataatttatataattttaaacttacagagaagttgccataatgatgtaaggaagccccatatattctttatcctgattcaccaattgtttacatttgttttacgtttttaatctgtaaaatgggggtaataagcrttacctgtctcacagggttgttagttttctttgtcttcttttttgtatrtatagtatagtatatatatgctatatactatagtattttatatatattagtatatatacactatatactatgtaatatacattagtatatatatactatatactatgtaatatacattagtatatatactatatactatgtaatatacattagtatatatatactatatactatgtgatatacagtatatatatactatatactatataatatacattagtatatactatatactatataatatatattagtatatatagtgtagtatatatactgtgctatgtagtatagtattatatagctattaagtattagtttgtaataatagttatcctttctatattttctattcatttaagctttctgaatactgattattctctgtgaagctgtgtgtgtgggtgtttgcatgcacaaacacatatgaggtcagcaattttatttactttttttattactctgtcatatggccatggaacaaatatttttcaatgacaaagtttaatagaaaaggctctggaaattaagaaagccaatccatgaatacttttagtcatgactcttttaaaaattactttccttgtgcatactctttaatttatttcaattcaattctacagatagatgtagaatgtgcctactgtatgctggacattattttaagtgcttcgggtatagcactgataaaaagggcaaaatcctttgttctcaaggagtttagaatcttaggtggtagtcagcaagcaaataaatactatatgttacgatagatggcaaaaagccctaagaaaataaagtgaggcaagtagtgacacagttcacttattagttttctgttatccggggactgagaatacagtttgttaatttattgaccctgcttctccgtcttctggacgtttgttatgtcagtcattcttactgttagttgaggccaaagaaactgtaatctagaagttatttagtcctctacttagggagtgggtagtgaatgagtctttcaaaatttgatgcaattatccaaaattagtgaatgtgtatgcgtttttctgagacaagtttctatacttttcattcagttatcaaatagtctgtgacccaaaatatttaagtggygactctaatttgtcytttcttctagccacatggctaaggagttttgtgaatgagtaacacagtcttgattaacatgaggtttgcaggctagcctttgtgtacctatctctagttagtaacttttaaaattagagttgtatccttttgtcagatggctttctaataattttctaaaatgaacataataagtataacattgtaaatatttaaaatatgcaattttgtttgtagttttaaaatcaaaatacttgatagtttcttgtgtgatgatatatattttgagtagtattttccaaagacaatttataatatcaacaaagaaggctaactcatggcaatattacaaatatacacgtatctagttggggaaagaatatactgattggacagaacacttaattggagaaattgggaaaggaggtgccactaactcaatatttgacaatgtatcatttaaccctttacaacttagtgaggcaggtcttattgtgtccattttgcagatgagaatatcgaggcccaaagaggtgaatagaatatgtaacttgcttaaggtcaattagtatggaacttcacagcccacactcagctgctactttagcaaaccaaatgaaagctagggtaatgtttactcattataaaaaggatttctggacatgctttggcctgcagataatattgtatgtgtgacaggtgggaggggtatgtgtgtgtgtgtgtatgtgtgtatgtatgtatgtatgtatgtatgtgtatgtgaagaaccaaccaaatattagctctataggttgcagtcctgcctcctaccaaagccatagccaagtggaaatacaactttttttcttcctctttcatacattcattttcatgtgaatacttctccttgaaagtttgtatatgttatgtgattgatcacttgtctgagaggaatctttagtgttgactctgtcagaggctgttgtaggtcacaaggatataaaggtgaataagactccagctgtctcctaatggagattgcactctactctgaggagatagacatgtagacaaattattgcaatacactgatctaaatgttaatagagaaagatgcagagtgctgagggaacagagtagcagactacagagggaagggaaaggaaaaaataacagaggaggtgacactggagtcaaagaagaggcatgtgaaacagcatagtatgttttgggaatcttatttgtttcactgtggctaaattatagataattagtaatatgttttagaacgtaggagtggaaaggttgttatcacatcctgaggggttttgtatatagagtttggattttattttgtaggtagtaaggagctattggagaattttaagaagggaagtgggatgatgggacgaggttctataggaggcaggtagcccagttagaagactattgtgatagtctgggaatatgtggatgatgagaatctgaaatgagtcatgaattttggaaaatatttgaaaaatatttagaagatactgtagaacaaattaggtgaccaaaatgccttatatttataatactttatagtttccaaaatcctttaggtgtgcatgttattggatattatcagtaacccagaaaagtaggtagttcagatggatttatttccattttatatgaggaaattgagatcttgaaagattgtggcttagccacggtcacatagctggtgatagtttaagcatgaaccaaatcataaacttcaaatatagggttctttttaatttgtctgcatcatctctatgcagtgcctaagcatacattagttaatatcaaggcctgatcacagtggggtgtgagttttaatttattcacttgatatctctcttcattagttatgttaagtgcctaatggagagggataggatcaattaaataaggtaaatgcaacattttacaggtctatataaatacctagaaagtgcttttcaattaagayggcatgtatgccagtgcttttttatatatgagaatggttatgacatttattcctattttattggagagtctattgcatgggacttgataatagtggcaggctggtatcagagactatgcttgctgtaatcagtgttaaagatcagtatgtaaagaatccttacttaacatgtaccatgaaattgattttttattagttattatagagatattatagattatatctctacaacatcttccttctttttacccataacctctaaaaggcttagtgccagaaggaacagaactgtatctttattttctcatcacatcctctctcaaatagataatacttccattgctgtctttccaacttggctttgagtcactgctgtgattctagctgttgaacagtctttcaaattaagtgattagtattctagtcaaggaaaaattgtgagcctgccattcttacccagtattgctaaggtagttttactaaatctattattagggtcatgttctcagaggcatatgacaattgcatttcacaaaacttccctaaatattgatacttgagatttacaggaaattaaatctaaaaccttacacttctgaagctggaggcaccatagagctgtgaagttcagtataaagtcacatctgtgctcaatactttataagaaaagttactctgccttagtcttcctttactatttttgtcttacttgattaaaattttgctgttgtattaactaataaattcaaaggaaatgttctgattagtttctgtcgtaactgggaacgatagtaagagtaccttggaaagtatgatagtctgttgcgtaacacttgctgggtagtagatatcaattctctgcctgtttcaatctcattgtgtctaaaggtgtgaacctcttaccatctggatactttagtttccctctaaattaaaaagaaaaaaagcaaatcttacctgtatagtacctacgcaaagattttggaagatagtgggaagtcattaaagtgcttttcaccaatttatgcaatttactagttgaaatttgtaactatttaaaaatcattagttttaaaaaatactattttaaaatagtaatttactatttaatatttaaaaaccattggctcttttaatatatttcattgcttggtattagaattttttatttttagaatagagtatatttaaagatgacttttgctgttaaatttgacaggcgtggcaggaggccaatctaataagcccaaagggagaattcgcagagtatgcaggttaaaagagccctggaactgactttctgtgaagcctaggcyatccatatacattcctgctgagtggagatttgcttaaagttgactgttttcttccttctgtaccatctgattccaatctgcacctgtcttttatagctagagacygttggatggcagcttaaccttcagatggctcactctgctcaagcaaaactaaaatctcctcaagctgtrttacaactcggagtgaacaatgaagattcaaaggtaagaaatggtatcccattaaaaggatgtattttgtttgttaggacttaaactttttattcttagcagtctttgctctctggatttagaatttaaacataattcagttaaacagttattaataagtggatcttttttgacrgaaatagcttatcttgcaaggtgcctttcttacaaaaacatttcataatgtcttcttttaaattctgcagtgaaaaaaaattgttgaagaccatataaaattatgattttaatgttttaggtatttgcagatattcctgagtgtttcatgttttaagctgaatatatgtggtagagagaatattgtttgttgtccagctagagcctggaacaataaatatgatggtgacctgaattgtgtttttgtgtgtgtagtagtatagtatgcctgcatgtgtttaaatcccagcttttgagaaatacaatttatttattttttttgagacggtgtcttgctgtcgcccaggttggagtgcagtggcgcgatctcggctcactgcaggctccgccccctggggttcacgccattctcctgcctcagcctcccgagtagctgggactacaggcgcctgccaccttgtccggctaattttttgtatttttagtagagatggggtttcaccgtgttagccaggatggtctcgatcccctgaccttgtgatccacccccctcagcctcccaaagtgctgggattacaggcgtgagccaccgcgcccggcctacaattttttttataccacaggattttactttattawtaatttcagaacaacttgaacgtgattattaaagatcaaagcattgctatgaaatactttttgttactgcggcatatagggaaatatatctttcagatatgataagagctttttatcatattttatactgtaatggattatcttttaagrtagaaaagggggagtgactttttcctcctaagtagataagactatctcatcttaagacaaaatagaattgagaatgaggtattagagaagatctgaggcaggagattacagtgactgaatgataatagaataatggaagaaatgttattatttataacaggaattgaaggatgggaatattattacttttttgttaaaactttcgctattcattctattatgcaggtttctggcttctttaagaagtatctagcccagattatatgactataaaattctgtggaattgacttgagtcttacatataatgtattagtttattacagtgtttcaaaagtatcattttatttcacacattttcactggaacgtaatatgaacttagtggttagagtcaagctattagagtatgtctggtggtttccctttatgtgcagtttcactttccatagtttcagttacccgcggtcaactgccgtttgaaataggtgagtgcagtacagtaagatgagagaaagagaccacgtccacataactttattacactatgttgttgtagttgttctattttattattattgttgttaatctcttacagtgcctaatttataaattaaacttcatcataggtttgtatatatgggaaaaaacagtatatattgggtttagtactatccatggtttcaggcctccactgggagttttggaatgcatccccccacagtgggcagggggactactgtgtgctctgcagtttagtgtagtgtaacctcaggcaaattacttaatctttgattctcagtttctttatctgtaaaatataggtaatagtatctatctacacaatttttatgaagactaaatacctagtatatgtaaagtgtttagtccagtgcccagtattacagcgtgtgctcaataaatgctggctactaccatcatcatcaataaaacttttttgtttttggctaaaataaagaaatcaatccatttgttttaattcagagctctcactaaatttatttcctgatgaaattattacctcttcccttgttccttgcattccctctcccttttttcttgattatatttttcacatgtatccttactggaaattaggaggggaaaaagagcctgaaaagtcccttttgtttcttctgtgaactgagtaagttattcctttaggtgtaggatgatgatctggaactcactagcatagactggagctattccatgagtgaaaatacatacatacatgcacattccaagtagttatatacttcctttgttttatttttcgtgactacctaatgttaagtctgcgtagctaaaagcattttgtatgttggaagtgtactattttgaccacatacattggatatgctttaagcatcatgagttcagcaatgcttgtctttgggattctcaagtccttctagcttctttgttacatcttcaaagtatgcctatgtgtctgttatatttttaggcagtaggaataaaagagtaatgcttctagtaagacagccatgttaataagacattcagattattcaggaagatgtgaatatctagatgtgaaatctaactcatttgaaatatgagcttgagtacatttatgtttttctgtgtttgtattttgagattttggatagatgcatatatgcacattgattaatcttataacttgcagagctagagcaccattttcattaacaaatatgctgaggaagaagaggakaagcacacatacataaaagatatttctctttcatcttgtatgtagacttaagtgacttctttgtattgtctttctcttctatggcattgtacacattttgtgcctgtgtcttatatctcctaaacaatagacagacacataatgaggtatagagctaccatcacctaggcagaagcatgccatctccaagtgttatggtgtgccctagctgtaaaggaacagttaactactatacctcttttcctcaatgaactgctgcctggaattactgctctttctcttgtttaccttctccttgattttatgatttggtattctattctttgtactcttcatcttattccttatgttaatttttatgtgactcctgttattaaggaccacaaactacttttctytcaaatatttacaaatatgaaatgagaattcttcacaggttggaatattaagtaaaaaggaatgagggtatagagcatgttttaaaaaacaagtttattaaaggaaaggaaagcttttacaaaaagggagattaaaagttaccactgcttagtttatgatataaagtatcttaaagtacaaaactgtcatacttatgaagttggtgttggtttaaaacaggaagcattgggtacagttctcataaatgtgtattttatagggtagttatcctgaaaatatacatatattaaactactgggaggattagaatcactgtaaattgtgagggattattttggttgtatttacttttgagctgttgtactgaaaacttactgtaattcactgaagagtacggtttataaggagctccttatcttctttttcacttctaacatacacatgaaaaatgcagcctgcagtgaagttttaattgctatcacactggataacactgtttgactgtggtctcctttcttagaacacttctgtctcgaggctttcctgttttgctattaattttatcacaaaaactaggtgattgtagctttcctgcagtattttgatatgtattctagttgtttttggttaattgtcttagtgtttgtctactgtgtttagcaaagtgagattattttcctgttccacagatacctcaaatcgagttttctgacttaaagtttttttcgttagggggcagtagagtgctttgcttacctagccttttctggcattcacagtgttatttgaaataacattcaaaataatttgtgaagtcagtagttgaaggaaatgctaagtgtttacatttcaaatctttatagaacaatagagttctcttatttatttccataaacaaaattaatgcttattaatcatatacatatagaacaaataaatgaaatcatcatgatttggcttttgaaatttgtatatgatcatttgccaaaatgaaatatattaaaagctttctacattattgacttttttgttacattctgtcacttgtattaatttcttcatgagaaaaaagaataaaatagtccataagataattgaatggctctattaggttatgatgtaactagttcgaggcccattgtagtcagctgaaaattctttatttctagagagtaatgtcatttgtaacaaatgttgataattttgactgacaccaacactttaactttgaatatcttaaaatacttaaattttgctattaatcttagtatatttttttccccagtaaatttcctgttaaagacaaacctgttttgttaatacagggattccaaattttatttgtgcatcttttgaggaaggatccttgtgtttcatttttttttcttttacagtaactgtggtaaaatcaccctgacagtagaatttttatttatcttaatgttaaattagattataatcagattgcagaaagtactttatgtagaagtaattatgattttgaatgaatttggggcttctaatactagttttctgacttagagctcttcattcttatttccaaaatatatgacaaattctgtttagtgtgagaaaatgggcaaaagttcttttttaaagtgtttactctgtgctacacatagtatcacttctttttgtggttaaaacctctcttccaggcatgatttcttattattcttattttattgataaatggagacacggaagcacagagaagttaaataatattcccatgttatacagatagtaaacagtagacctaggatttgaatmcaggcaattttatttgagttccagtttatcagtaggatgctgtatcaccttgttaatttaataacttagcagttgaaattgtaatatgtgtwtatgtttcaagktgttgaaagctgttgtaaaatgtaaggttgttcataggattatcgttacatggactctagatttaatttttctttcccctttatttgactaagttgaaacaattttacatttttagtcaattagaaacaccatttattcttatgtagtaagtaaagtataaatgatgtcagttcaacagaggctgccttttattaacaaatattattgtaagggctacatgacatcaatgatgttgatgtcttgtgagcaaataactgcatcagttaaaaagaaaagatgtcctcagatctatttaggatagatttctcagagaaaaatatgtatgctattcaaatcatgaattcttgttrtagaaatttaaatcttttcatcttaaaggtggtgttagtattgactgatttggaatgaccttcacattttttagctacttatgtgagttcgtctgcattttccttttttttttcattgaagtatcacgtatcatatctttattagaataaatcacactaaagcatactttctcacccttaattacacatacaaatgagataattcaactgataggacataattcaaatataaataaaatcattctctcacatatttaacattgttgagtggattttaaattgtatatatttaaggtatacggcatgctgttttgrtataaatatacatagtaaaatgattgctactattaagaaaattaacccacccatcacctgccattattaccttttttgtgtttgtggttaaagcacgtaaaatctattttcctagcaaaatttcagtttacgatacaatatcattaattatagtcctgatgctgtacatcagatctccagacttatttatcctacataactgcaagtttatatgctttaacctgcttctccccattttttccctttccttgtctctgataatctctgttctaataggcatttttaaaaawttccacatataagtgagatcatgcagtatttttctttctacgtctggcttatttcacttaccataatgtcctccagattcatccatgttgttgcaaatggcactatatcctttttcaaggctgactcatactcctdgtgtgtgtgtgtgtgtgtgtgtgtatgtgtctgtctgtatatatgtctatgcrtatatatatgtacacatatggacacatacacataccacaatttatccattgatagatagttacgttgtttccatatcttggctgttatgaataatgctgcaacaaacatgggggtgcagatatctctttaacatactggattcatcttctttgaatatataccaagcaggagattcctggtagttctaatttgaatttttggaggaaccttcaaactgttgtccttaatggctataccaatttacatttccaccatcagtgtacggggttcccttttctccacattctcaccagcgtttgttgtctcttgtctttttgataatagtcattctaacagttgtgagataatatttcattttggttttgtttgcatttccctaatggttagtgatatggaacatcttttcatgtatctgttggccatttttatgtcttctttggagaaatttctatttaggttctttgccccttttaaaatcaattaatcttagtacattattattattttgctattgaattgtgtgagttccttatacatgttgtatattaaccccttatcagatatgtggtttgcaaatttttcttccagtctgtaggctgtgttttttgttgatggtttccttttctgtacaggagcttttagtttgatgtagttctacttgtttattttttgcttttgttcctcaagcttttggtgtgataattcaaaatatcagactaggatgaacatcaaggagctttttctctgtgctttcttctaggagttttatggtttcagatcttatgtttaggtcttttatctcttttgagtttgatttttgtgtatggtgtaaaggtccaatttcattgttttcacatggatattcagttttcccagcaccatttattaaagagacaattctttcgttattgcatcttctcggtagccttgasaaaaattaattgaacatgtatgcttgggttatttctgggctctctatagtattccttttgtctgtgtatctggctttatgccagtaccatactattttggttactataactttataatgtaatttaaaattaggaagtgtgatacatctaactttgttttactttctcaagattattttggttattccatgcgaattttagaattttttttctctatttctgtgaaaaaatgccattggaattttgatggaattgcmttgaatccatatattgctatgggtagtatggacattttaacaatgttaattcttccaattcatgaacgtgggatatcttgctatttaattatgtcatcttcaatttctttaatcagygtgttatagttttcagagctttcacttctttagctatatttatttataggcattttattctttttgctctcctagcaatggtatagtagcggggggctgggaagaggggtggtggctgggaaagtgggagcacataaataagattgttttcttgatttctttttaagctaggtcattatttttgtgaagaaatgcatctgatttttgtatggtgattttgtaaggtgtatgctactttactgaatttatttgttcatttaacttttttgtggcgttttaagggttctttttctttaaatgtaggataatgtcatctgcaaacaggaataattttattgtcctctctmaagtgaaatgattttttaatattgcctgccttttttwaaaaatcatgattcatttttctgttaccaaagctgtatgtgcttactgtagaaaacttagaaattatagaaacgtgaaaggaaaaactgttaaacttaccacaaagatgcaggcaatccatttgttttattttatttagtgtttattcaacataaactttttctccagtctgattataggacttgtttaattttatattctaccttttttcacttaatgctgtaacaaatcattttttatatcatttcaaactcatcattaatatattctaaatgactgcattatgttatggctatgacagacatattaggatttcttaataattcttaccctgtcaaatactgggtttgtttctagtattttcctgttacattgtaataaacatctttgtgaatatatacttagatgctcagtaaacctttatgcattatgaatgaattagagaagccttcttaggatttagggttattcctcaagaggatgattactaggtgaaagggtataaaccaaaataaaacaaaacatcttatttagtttgataaatggctttctgaaatcattttggggaatatacacagaaacgcaaacgttgcattcagaagatttcttagcttctagagaaagatataacactatttcaaaaataggttctttaataactaggtaattaattactttggattttaggaggccagtaaaaagcccagatatttttgtaatattatagcgccccctcttttaaacttttgtattactttagtgcacaaattaaacaagcttttgttatgtgtattttgttttattatagaacatgtagaaggaatctgatcaaatactcaagcagttagagaaaatagaaataactcttatgtgttagataattgccaagatactttgaaaacaaagcctgcttctttggaatcaaatttatttaaatatttttaaggctttgtgactctggtttcctgattctttgttttgtatcctttttcattgtgatcaatttctcaatgaaattatccttcaaggttttacgttttctaaataacagcaatacagaaatgttttccctcaatttaatgtgtttttggttttttttttttttttttggttttgtggtcaacatgactttttaaaagacaatattatgtagtcaggtatattgatacaaatcatatgtatataatttctgcataacgcaatgcaaacttcctccatatatgtgggtgtgtgtgtaagattttttcatatttcaggctgtcaagtggaaagtctacatttatccataataagattttataagctaacaaaaatactgtttcagatgctacttacctttgaagagtgaaaatacacaatattaatacaccattagaggttagtatttatgtggagaaaatgataatagagacttggaggagaaaatctctgttaaaaatactccaaacattttaggcaatttagaattaaaatattgttttactaaaattcttttaaaaattttgtgggattccatagtaaagaaacaaatactgtcttcacttgtcttttctagcttctgaatcgtgtagtctctgaaacccagaggcagttgataaatacagaatttttaaaacagaatatgtttagaagtacctttaaatttcattagataccttttcatgtattagaaatgacagtaatgtaaatgaataatataaatattttgacataaaagtattaacaatgaattagacatctggacaagtaaaatgctcaattcaataaagtaaatatgcactaactttttaaacatcttgaattcagttccagaaatagtttttaagcatttactacatgtgagttactaggcaaggtattcgtgatataggcaggttttattttctgtcatggagcttatgggctagcaggaaatacatatgttaagccagtaaatataagtttgatgactagtacaaaggaggaagtacatggaaaccaatagcaaggaattagaaactgtgacaggcagagaagttttcagatggaggaaaaagcacctgaaagacgacaggtttattttttgagcatttcaaatatggaggtacctgagatatccaggtggagattgtcaggtttgtagtctgagacatgggagcaaattgtaaactagaaattgaggtttggaaatcattgagtttataatttcagtcatgagaatggaagagatcacttagaggatatattagaactaacatttaaatgacaagtagaattgaaggagcttatgacagtgattgggaaggaacagccaaataccaaaggaagagagcatttcttaggggtgaatcatgtcacatgttgctactaagtaaagwtagagggaagcagggtcagagagagaagataataattctcacagccatgaagtaggtgctagtattttcctattaactagatgaagaaacccagactcagtggttaagtatctttctctaaattggatactagaaagtgatggtgctataatttgaacccaggtctgtctgactccatagtctgagcttataatcactacatagtgttaaaaartgaatttagtgacatggagatcattggtgatcagtttgtgggacaggagaaggaaatatttcaagatggagggcagtattggatgctatttgagaggtcagaaaagagaagaatggacatgtgactgttggattttgtaaaatggacttctctgataacctagacaattatgatttcaataacaattgagaggagaagaaagaaacctaattgggataaactgacgaaagaatatgaggtgagagtggaagtagtgatacaggtaactttcggaaataggacagtttatgtaggggaatgtggattcagtaaatggagatactagaggaggtttgtatgcagatgccacagatccattgggggagaaaatgatgcagaatggagagggatatattaatacatttcttgagaaagtgagatgtgagattcagagcacaaacggaaaggtaggattcaatcagagtgggaacatttcacttgtcttcatagagaagagtatgggtcaggtgagtggttttgatggtggaaagagaaagttgcaatgatctgattgcttctgttttctcaatgctgctgtcatgaggttgggagaatggggcggttctagtaggtttgagaacagaggacaaagtgtgaaatggttattttggatattggacaattgaacaaactgggtattttagggtatttttactattactacacagtgctgattgcccaattgtgatttgtgatcacgamtttgagaggagaactgttggcaggttgtgtagttttcttcatctatttttaattgctcaggtgcacatgtggagtaggtggataattgggtttaatcatgcttttatctttgccgggtgttgtcagtggagggtgaaaaggacaaagggtttgtctgtgtctatgaaagagtaaattttagtaactgaccctggagtctaaattgggccaggtggaaagtgaggatattgtgtatgtgtgttcggggcagggtggtaagtgatgagagggagaaactatctagaaatatgctggaacctagccatactctctgatgtggttaggctttgtgtctgcacccagatctcatcttgaattgcaatcctcacaatccccacaatccccacgtgtcaagggagagaccaggtggaggtagttgaatcatgagggtggttcccccatgctgttctcctgatagtgagtgagttctcacgagatgtgattgttttataaggggctcttacccctttgctcagcacttctccttcctgccaacttaagaagaaggtgtcttgcttcctcttcgccttctgccatgattgtaagtttcttgaggccttcccagccatgctgaactaaactgtgagtcaattaaacctctttcttttataaattaccctttcttgggcagttcttcatagcagtatgaaaatgcagtaatacagctttcctagaggtttatagaggagcctcaaatagatgcattattttccaggatcactcagtgacttttaatttgagtcttgagatgtctgtggcttgacctggtgtacagtttatctgttaagacaaagaagtggatacatgtaaaacttgaaagctggtcttttgcgaacctttaccctgcatcaccttggaaacaagtggtctaattatatgaagatttattctgtatcctaggagttcccaatgtgtgtccagtggctactcgttgatctcttgcttccttggttgataatatacccagcatctgctggagatagtagagtattaatttcataatgagcccattaccccagtgatactatatccagaaatcaattaaaatgtgagaattttgtatgttgtttgaattatattagcttttgaacatcagtggtgatttttggaattgcttttctgaatctggtattcttattttgagggtattattgtaaattttacttcaagacagagtaaagatgtctagattaagttttcttatgagtaatttgcattattggatactgaatccagtcccaattattttggcaataaaaggagttgacaaacacttctttcctggcatagtttaaataagattttaagcatgtttacagtgttagttactatgtgaatacttaaatatgtctttaatggattgtggggattttagtcttttcagattttttctttcctttatatgagaattatttagaggaagttaaacttatatgaagaggaagaatacttgtaactatatatttctcagaagaaattattgggcacttttggctgttttgatggtattgggaaaagggaagattattctattaagttttcatataaaatctctttatttttgtttttcaaagtttctcagctgtccttaatacttatgatccaaagctgcaacctttcagaaatgccatgtccatattttaaaaaactaaaatgctttraggatttaatcagatcctcgagtcttatatcacaggacttatttggaaatgtggccatcccgagatagctaatgatgatgagtctggtttgggtgttttctttttgcgtatttagcatcaacccagcaccatcggttctgtgtttttggtrtgtatctggatgatgtatttgagratctgctgaagacagctgttcggttagtgcacaaggaacagtcaattttagttactttatcatatgctggagattgatattcataaagcagtgggaatataccgtaactagggtcattgatgaacaaagggatagaaatggggttgatgaagcagtattattctttatctcacgaattatcctaacctttgctaccagcacaaagaagagacagataggattaatataatcgaatttttacaaactcattttaacttgcttgtttcgtaaatgtttgattcctaagtataatcaatgaatagcaaattatacagtattttaaaaaatatatcatattttaagcttttaaaaattggttgactatctgaaattgacataaattttgcttatagtcagtaactgctattatgacatcagtgaaactgtatgttgtgattgttgcggctggttaaccaaaacatgtatttcacaaatgacatgtaatgggtgaagatgaaatgtaatggaaaatgaatgtgtagaaagaaattcttgtttatttcatgtttaaagaaccttgattttgtcttttaaaaaattattttatactttttaaaaattacacaagtaatttacattgaggaaaaataaaaaaatgtaagaaaataaaattcacctagaatcctacctagaggtaatcactttgagtgacgtatttaattggcatatatctttccaagtctgtccattgtaaactagttgtctttccccataaagcattatattgtaaacaacatcttttattgtcagtaaatgagcttctactcagcaacatcattttaaatgactacataggattctgttgtttgtatgttccatttcttatttctttttttggtaaatataatttatttattcaaatagtccttcagcagtacatttgcctttaaagccatatttaaaatactatatactaacatgttgactaaagtgatcaagaagattttagaaattctattcatgtaaattctgttggaattctagtaattgctaaaatattagatttttattgctgagagacttcctttttcagggattaacatgtttagacatatagtttagaatgtcttttaaaactatatgtgtgtttgttaattcatgaggtttctaaaccatgagattttgctccttccctttcttcctctctttctctttccccctcttggcttcttctttatgatagagtagatacgaagtttctttcagacataaagaagttctaccctatccattataaaggggtaattttacccatatttaatgtgctgctacctccttggtgagagcagtaccataaatatcccaggataacacctttgttgttgtcaacagtaaaatgaccagaattgtctaggtacaacttcatttatggaatcagcaaaggctggtggaattttctagccgaaagggatcttaagtggatttgtcaatggattcttttttttttcttttctgacaatggattcttaatatgacaccaaaagcatgagcaatcaaagagaaaagataaattgaacttcattaaaattgaaaacttttgtgtatcaaagaacattgtcaagaaattgaaaggacaacctgaagaatgggagaacacattttaaaattacatatattatgggatttgtatttgtttttttgtattttattattattatactttaagttttaagttttagggtacatgtgcacaatgcgcaggttagttacatatgtatacatgtgccatgctgatgtgttgcacccaataactcatcatgtagcattaggtatatctcctaaagctatccctcccccctccccccaccccacagcagtccccagagtgtgatattccccttcctgtgtccatgtgttctcattgttcaattcccacctatgacatagtgagaatatgcggtgtttggttttttgttcttgcgatagtttactgagaatgatgatttccaatttcatccatgtccctacaaaggacatgaactcatcattttttatggctgcgtagtattccatggtatatatgtgacacattttcttaatccagtctatcattgttggacatttgggttggttccaagtctttgctattgtgaatagtgccgcaataaacatacgtgtgtgtgtgtctttatagcagcatgatttatagtcctttgggtatatacccagtagtgggatggctgggtcaaatggtatttctagttctagatccctgaggaatcgccacacagacttccacaatggttgaactagtttacagtcccaccaacagtgtaaaagtgttcctatttctccacatgctctccagcacctgttgtttcctgactttttaatgattgccattctaactggtgtgagatggtatctcattgtggttttgatttgcatttgtctgatggccagtgatggtgagcattttttcatgtgtgttttggctgcataaatgtcttcttttgagaagtgtctgttcatgtcctttgcccactttttgatggggttgtttgtttttttcttgtaaatttgtttgagttcattgtagattctggatattagccctttgtcagatgagtaggttgtgaaaattttctcccattttgtaggttgcctgttcactctgatggtagtttcttttgctgtgcagaagctctttagtttaattagatcccatttgtcaattttgtcttttgttgccattgcttttggtgttttagacatgaagtcgttgcccgtgcctatgtcctgaatggtattgcctaggttttcttctaaggtttttatggttttaggtctaacgtttaagtctttaatccatcttgaattaatttttgtataaggtgtaaggaagggatccattttcagctttctacatatggctagccagtttccccagcaccatttattaaatagggaatcctttccccatttcttgtttttgtcaggtttgtcaaagatcagatagttgtagctatgcagtgttacttctgagggctctgttctgttccattgatctatatctctgttttggtaccagtaccatgctgttttggttactgtagccttgtagtatagtttgaagtcaggtagtgtgatgcctccagcttttttctttttgcttaggattgacttggcagtgcgggctcttttttggttccatatgaactttaaagtagttttttccaattctgtgaagaaagtcactggtagcttgatggggatggcattgaatgtataaattaccttgggaagtatggctattttcatgatattgattcttcctacccatgagcatggaatgttcttccatttgtttgtatcctcttttatttcgttgagcagtggtttgtagttctccttgaagaggtccttcacatcccttgtaagttgsattcctaggtattttattctctttgaagcaattgtgaatgggagttcactcatgatttggctctctgtttgtctgttattggtgtataagaatgcttgtgatttttgtacattgattttgtatcctgagactttgctgaagttgcttatcagcttaaggagattttgggctgagacaatggggttttctagatatacaatcatgtcatctgcaaacagggacaatttgacttcctcttttcctaattgaataccctttatttccttctcctgcctaattgccctggccagaacttccaacactatgttgaataggagtggtgagagagggcatccctgtcttgtgctagtgttcaaagtgaaagcttccagtttttgcccattcaggtatgatattggctgtgggtttgtcatagatagctcttattattttgaaatatgtcccatcaatacctaatttattgagagtttttagcatgaagcgttgttgaattttgtcaaaggccttttctgcatctattgagataatcatgtggtttttgtttttgcttctgtttatatgctggattacatttattgatttgcgtatattgaaccagccttgcatcccagggatgaagcccacttgatcatggtggataagctttttgatgtgctgctggatttggtttgccagtattttattgaggatttttgcatcaatgttcatcaagcatattggtctaaaattctcttttttggttgtgtctctgcccagctttggtatcaggatgatgctggcctcataaaatgagttagggaggattccctctttttctattgattggaatagtttcagaaggagtggtaccagttcctcctcgtacttctggtagaattcggctgtgaatccatctggtcctggactctttggttggtaagctattgattattgccacaatttcagagcctgttattggtctattcagagagtcaacttcttcctggtttaatcttgggagggtatatgtgtcgaggaatttatccatttcttttacattttctagtttatttgcatagaggtgttcstagtattctctgatggtastttgtatttctgtgggatcggtggtgatatcccctttatcatttttgttgtgtctatttgattcttctctcttttcttctttattagtcttgctaatggtctatcaattttrttgatcctttcaaaaaaccagttcctggattcattaattttttgaagggttttttgtgtctgtatttccttcagttctgctctgattttagttatttcttgccttctgctagctttggaatatgtttgctcttgcttttctagttsttttaattgtgatgttagggtgtcagtttttgatctttcctgctttctcttgtgggtatttagtgctataaatttccctctacacactgctttgaatgtgtcccagagattctggtatgttgtgtctttgttctcattggttccaaagaacatctttatttctgccttcattttgttatgtacccagtagtcattcaggagcaagttgttcagtttccatgtagttgagtggttttgagtgagtttcttaatcctgagttctagtttgattgcactgtggtctgagagacagtttgttataattygtgttcttttacatttgctgaggagagctttacttaaatgaatatagaagaagaataccacttccttaattactaatattctattgtaggctacttgmactccctccctgtgggattttttttcacagtgacctttcagagagtatgagctgtgaaagaagaaatccacagggatagtatggcagtgtgccaactgtaaatgtagataaaaaatctggctactatatcatcatcctcaattttaatactttgtatttacttagtagctttcagctataggactcaaaagtctacaaatagcctcaaaacaccccattgaggcaagcatagagtaatcattattttttgttaaaagaggaagtgaatggtgttatttaattgtcagttttagaataagagaataaaacatcttttaaaaatatgctgctagttacagcatggtctttttttaaaatgagaaaccagaagtttttctccttcatgttaagggatggtccaattttcatccccattttcctttggttatttttgccacttttttactgattgtaattatgtgttgacttcatttgattctaaagtataagaaaatatgagaattataagcataaactttaagtagtttcattgacctgttttaatttgtgaaatctttttttgctataaacagatgagtacaataatttataggtagctttgtgagtgggtattttgtttccagctatacagaagttgcataatagctacccactcaggtattttasattggcatggtagtaactgtttaataataagactgctactacataatagcatatttgtgcatcttttcgacactacacatgaatgacctttatgaataaaatagtgctacctaattctatatattttggctatatgtttcctaaaagtgataatctttggagatggacagatcttacataggttaagatacaggataagtttaaaaatacaaattaaaatggagtctaattaatagtcgttcctgaaaaaatataagcctttcccatgaggacattttctgtcaagaggtaagtgtgggtcagggctcatttggaggctgagggggcatctgrtttcttcataatattatataaaatttgtgagtggctaagctacctcattgtttcttctgtggataagggcctgctgccttgaattctagtcagcctggatgggtggggctgatctaagctgagggtcttgatagctgcagagcacacagtaatcatcatacctgataacaccatattgaaatgatcaagacaataatgataatagatagcatttattgaccaattaatatgtgccaggtattgttctgtgggcttttatgtttttttctcattggagctttgcaattaataagcagtgagttacttcttttattggcccagagggctgaaaataatttgcagcttaataaagtagctactttgcttctatagtgattggtttgccacctgttttaagtgtgggccatggcttctctaataaaccctattctttatcttgctcttaaacattttgttttgatagccatraaaccctcctcagggtaggtgatttatttccatttgccaaatgtgaagagtgagagaatgaccttgataaagggttgggttgagaattgttcctgtttttttcctggtggggctttacgggtgatggagcacttagaatactagagaattagagaatttaggggcataaaatagaatccatactggattttattagagcttagccactcaaccacaataaaagtaggcaagaggtcagctgagatactgattgacttcatatgcccttggarcagacaggcagtgtctgaggggacctgagttcccagccacccagcctcaagctgcgttattacttaactgctttgtagagtgtaaacattatcattttctgtcagtgccagaatgtgagttaggcttgggaagcataatttcactcagaaatggaaagaagaagaaatgttattttgttacttttatttttaaactagttctctctcctattgtttaattgatgatgagatatataaatattcatattggatttaaaacttgaaatttgtactgggtagtttattgttagtgatctcaaaagttatagcataaaagttacttgcataaaagtgtaaacatttcctgagcaatgcaatatgtggccaccagtcagttgtgttagttgacaaagggcaaacatgacctgttttctgagagtgctgttcacctgggttcttttcattttcagtactccttttggagaagtttggtttactagtagtttcaggtaatctttggagctctgatataaaaattctttcagatagtttaggtaagacttatacattaagtgatttatatggcaagttggcccaaagtcgtatacataggccacctttattcatcacacagttttccttaatcctcatctctgccagccttgaccacagaacttacttttctttttctttttctttttgcacatacattttaaagtgagtgatagcccttcatttttttttttaatatacagtgggacctcgtttagggagggatggaatttagggtctcactttagtgcaaaaggtaataatctcagagacaaggctgttcttgagagggagcgggagtgctttgggaaagtaccacattggatcccagtataacatttctaaataagtccatgatagctatgytatttttctttagcagttttgttggaactgttgctgtttytttagttaagcactcagaatacatttatgtatcttttaacattggtatcatctttagcacacatgagatcctggaaacacatgagaccttggcatacaytgactgagtaaacagcagattcaccttttccatctcacagtcactctagggcttacactttttcaggggaattgtggacttaattgtctgcattatttagttattctatttctggttgcagagtttatagttgaattaatacaagtgaatcatagttaaattcacataaatatgaagtttctattaactgatgacttgggttgtttgtgcattgtccttatgttttatttatatatgccatcagaatcttcagattctcatttctttgaatttaaaaacgctactattttcattaagaaagtctcctgtctgtttccattttctactgattttagcatcagaggctgttaggggagataaaagattcttaaatatatattctatatttgttagataaatgtatttttgtaaaaattttgtagataaacagacatcctgtgtattctggtaagaaaaagagaggatagtatagatgattgctgctaatttttaaattgacaaagtgaggaatgtgactatattggtttaatgagtgcctaatttgaagaattctaacatagttgttttttcccctccatatgtgttgattgtgattctattgctttcagccaaattattttaattagatttagattcaggaatgactgcctcccacagtttctactcttgtaggctttacttacactgctttaaacaataggggtttacctttatattaggagcattaattatctattaattttcctcatttagaaccattaaatttaatatatcacatttattaatataagagaaaattatagaagtcaattatcttaacaaattgaggtcctacaatttttgagaagtgttaagtttattatatttaaaaaagtctagctgaggattactatttgtggtttcttttttcttcatgttaataataatgtagagagtgcttagactttgttactaaatagctgtgtgccctgagaccaaaacatttcacctccctggccttcctgcatttatgtacaaaataaagggttaagctgtcctactatccagttccaaaataactctgtattatatttttgacaaataatagagaataaggtgaaggaccagtggtggcactggtatgtagtaaaaacagtacagggtttgttatcacactgtcttgacacttaggaagttgctagaggatgtcaagcagattacttaactgattgaggctcaaattctgatctgaaaattggaacaatagtaggtgcctcacaaggtttttctggaaattaaatatgacagcaaatataaaagcatctattacagtacagtttcattcattgatatcttcatttccttgaagaggtctttccagattggggctggagaattaaaatgctcaggttcttacaacaccattatttgagctggaaaatatgccctttaagcaacattttcgttctacttcatatctatagaaagttggtggcctgaaggccttttgaattttgaatactttccatctcttttagtctaggtggtatcactttggccagtacaactcttagaatttttgtaggcattctttaatctaattccataaccccctcaagttagaagaagttctttataattcttttagagacattaacaaagggttttgtagttactcttctgctttgatctgtcccagactatattgtatttggagactattttgccagcttatacactggagatgagaagagttgtattttccaaccctgcacagtccttgccccctttattttttctaaattctccttgtaactgatcagttgtttgtttagctcatctctttgttgccatattgccttatggtgtacagttaggaacaaccagttgattttcagttttctgcctagagatctcaggcaaatccaaatgtttattaagtaaatatttcatcctctgagttttatagggaacacaattttgccgattttttgttgctacatatcagaagttcctattttttcagccaccaataacaattttttaatgaatttctagtttttcctaatagattgctcactgtttttcaagctgaaggccactgtttaactccaaaaccaatactacatattttatttttatttttttaaattgtggcaggaccttacctttggtaacatcagttagctattgctaataacataccatttcaaaatgtagtggtttaaaacaataaccatttattattgttcacaagtctgtaggtgggcaaggcagttggctggctrggcttggctgatccaaggctgacttgctcatgtttcagcagtttgccgggtctagtttgggatgattttaatcagwrggatgagtggactttatgtcggttatcatttagcaggttaccctgggctgttcacttggttcagagacagcagaaaagatgtaggataggtctttggagatctggtacagaacaggcacaccgttattttcatcatattctgttggccaaaggaatttgaaagaataggccagatttaaggaatagggaagtagattctaattgttgatggaacatgctgcaaagtcacacttcaaaggttatgtttatagtgagaggtgaagaattggagtcatttttgcaatttaccaaaatatatgtgtttaattttaaagtagttgtacagtttatactcccaccagcagtgtatataagttgtgattgttctacatcatgtcyagaactgctagtaacagtctttttagttttagctattttggtgggtgtctagtggtattttattgtggttttaatagtctcarttgctaagatggctttcctttacyttttttttttttttagtcaaccatttgaatatctacttttgtgaaagggaaggggaggtgtgcctccaaagtctgtgttaccttttgggctgccatttyttctagatcctggcctgtaaatcatgacttgttaactctccaaggccttcaagcagatgcctgcctgcctgcagattccttcctccctccctcccttgccctccgttccttccttacctttccttatcttcctttgtgtctgcattcttactcccttgcaattatagctcctgatgaaggatgtataataactaggcttgttttctagaaaagtcaggctaatacagaatgtaataaaaagtggacttcataaaagtttgcaatggatattttacttggctggcaagatggccgaataagaacagctccagcatgcagctcccagccagaccaacgcagaaagcgggtggtttctgcacttccaactgaggtacccggttcatctcattgggactggatagacagtgggtgcaacccacagaaggtgagcagaagcacggtgggacattgtctcacccgggaagtgcaacgggtcaaggaactccctttccttaacaagtgaagccttgaaggaaagtgccatccggaccacaaactacgctattaccagggatcaaacaaaccgcaagactaggaaaattaccctcaggtgccttccacccaccagggaccctggggtattcaagcaaaaagacttgggaaggactgatatgggaccgcacgctaacctgaagagagatattagtatagacttccaaccgggtgacctctgaaatcgtacaacctgataccaataacatgtgcaagcttctccttggataaaggggggcgtctgcacttcaccacggcgacgcccgtacttgggcactcataacctcaaacggggttcaccccgaaatcaagaccatgagaaagcagcccaacgaagaacnnnnnnnnnnnnnnnnnnnntcgagatggggagtggtaatccccctctccttgtccctctctcgacctcctcccccgtctctttctcgccttcccgccctccgtcccctctcccgtttctctctcgtcttctcccgctcatcctcccctgccctccccccgtccctccatccgagtcttcttcctcgtcctcctcctcctccgcctctcctctcctcgatctctctcctcgatctctcctccgcctctcttcgacttctctatctcgctccctcgctgcctcgccctgcttcctctcctgccctccttcgtcttcccctccgcgctcctctctctcgctcctgctctaggttggcttcctcccctctctctggctcccttcctacgccttcctcgctctctggctctgccctcctcccctccttctctactccctacttcaaagccttctctctgcttactgtagccccgctcctctcgggttgtccctctccgtctccttttttttgttttatttttttttggaattttattgtttctttttttcttctttttctctttgtctccatttttctcccttcttcttcccggcttctacactcttttggattttctacctatctctccctcttttcgctccatctctcaccgtcatccaacatcatcagtccactcatcctcactcttctcacaaagctccccgtcgtcgtccaatctcccactcatgatccactcttcccactctctcacacgttcccctcttaccttcccctctctcctctcccctctctcaccttcccctctctccctctcccctctctcccatctcccctctctccaatctcccctctctccctctcccctctctccctctcactctctccccactcccaacaccctttctccctcaggctgaagtgcaatggcgtgatcatagctaacggcagccttgatctcttaggttcaagcgatcctctggcttaagcctctcaaagtgctgggattataggaatgggccgccatgcttggacagcaaaacttttaaaattttcattttaaattatgttttcttaagtgtttttacttaatccttagtgtgaaagtctcctattactgaaagactaattcattcctgtctttgtagttttgactttcattaatctaatggatttgaggatccacatctaaaactttaagaattaatgtacattatgtaatgtcatttgccttgcaaacagttgtttttttttttycccccctgaggtcagactaatttattgacagttttgttgtgcttgacaagtaacaggtgctaacatytttttcagtcttgtcacagggactagagggtctaggtcaccatgttcattaatgtagtccaggaaattttatttctcctgtggctaatcatttacatttgacatgaatctgtcatctgtgcctctagtctctctgcttccacctttgtcttctatagtgtgttgttctcataatagtcatacttttaaaatataattcagattatttctttgctctgtatattttacaggctttccttataactcaaagtgaaacccaaaggcctgtaagaacccacatgatctaaactcakgctgcctatttgatttcacctcttaccttgtttcccagcccctccactctgttatgaccatagaagttgccttgtttttcctgacactccaaaatgctcttgcctcatggcatttgcacttttcatttcctcctctagaatgcttcttccctagatakacacatggattgctgtttcccttctgttaggtctctactcaagtatcattggagagaggcctttcctgaacatacattgcaaatacttgcagtgtccctcctgtcactctttatccaagttctgagctaggtgctgagcagataaaaaggatattaaggttcctgctctggacaaagtcagtgatgtgagagaaaaaggcttgtatgcagtgcagttaattgggaaatgtgttaagcccctaaagtggtgccccaaacactagatgcttgtacatgataatgaactgtggaggtttattccaagtacaggctgagtgcagagatgcatggggttgatattgtctagatccatagagaagactccacagaggaaaacatctttgaattaggccttaaaaagtaagtgaaaaaaggaatgcatggtctgggtaaaaggaagagtatacacaatgactaaatttattaagattgaaacttaaatgtattgcctggaaaaatgcttaattctcctccctagtggcttaaaaaaatagttagaaaacatgtcatttacaatatgaatagattgttccaataacattgtattatgacttttcaggatggaatagttatggaccaggaattggaggcagtaaattacctaatgtgatgttgatatgcgagacacttataaatggtagtgaattatagaggtccatttcaagtgcagtgggatagcaaacaagaggttgttttctgcccatttgcctcctttactagacccttgaacctattttctgcctaaagagtaaatgaaactagaaatagagatatgggagagactgtaatgagtatttagatatacgtgttacagaattgttacaacttttgctgcaggttactgttttgaggacaaactatgagtttttaaaaaatataaatttactctgaaaatttagctcaaattcatttgttaatgaatttgttcctgcatttggcaatgagctaaatccattgtattctgaccttctcatagtaacttagcatcctaatatcagrtgctgtattaaaatgtgaagaagacaagatgctctttttaattaaatgtgattgataaagctagaaagacaggaatgcaactgaagttggatgagtctcttaggtacaaggtaatagatttatactctttaacagctggtttgattgcatcagatctaaagattttatttgaagaaaaagcctaaggaagaactgctatctgtgaaagtacaaagtaatgcctgtattgaaaatgaacaatctgctgatactagaaacttctttatttttaaagcctgtataattttcttggtcatcagaaccttggcatataaaaatttcagaaatctcatggctttaattaaggcaacatgcrttctctgtaatgaaagtaggaagaggatgtaggagaatgtttcaggttctgttttctgcctctctgttacgggaagcagtgtgattcagtacaattgttctcccttgccagttggtgaacctgtgctattctgtgttgaaaatattggtatgaggcttttttccccagaaggcttttttcttaatttcaggtatttttttcatgttaatatcatttttaaaaaaataatactgatggtaaatagtagggctttgaaaaaatatctcatttcttgggaaataaaatatttatgggcccatgaagcctgccggttggttggtttgtttttggtatatgtgtatgtgcatgtgtatctgtgtatcgtactgatctgtgaaatctaaatgtctgaaaactrctgattatgtagaaggatcatgggctttggattcagcaaacctggtttaaattctttctctgctttgttcttatcttcgtcatctttaaaatggggatgtgaatgcttatctcctagggtggttgtgagaattgactaagataatggatatatamwggtttagtgccggctgtataatagaagctgaataaatgtatttcttcctttttcttataagttgttggggatagagagaatttcaggtgaagttacaagtgcagttgacccttgaacaataccgggtctaggggtaccagcccctgtgcagtgacaaatcagcatatgacttttgactccccgagacctttattactagttgcctactgttacccagaagccttaccaataacagtcaacacatattttatatattatatgcattatgtactatattttagcaatagagtaagttagagaaaagaaaatgttattaagaaaatcataaggaagagaaaatatattatttcttcataaagtgaaagtagaagcagatcttcataaagatcttcatcctcatcatcttcatgttgaataggaggaagaagagaaagggttgctcttgccatctcaggggtggcagagggagaatagacggaggaggtggaaggagaggcaggtgcacttcatataacttttatggaaaaaataaactcatgtataaatggacccctgcagtgcacacctatgttctgtgggcttttaaatcatcttctgaaaatatgctgctagttacagcatggtcttttttaaaatgagaaaccagaagtttttctccctcatgttaatgatggtccaattttcatcccatttaaattggttattttcgccactttttgactgattgtaatatatgttgacctcatttgattttaaagtacaagaaaatatgaaaattataagcatgccccttaagtagattcattgacctatttaaatttgtgaaatcttttttgctataaatagataagtacaataatttatagatagctttatgagtgtgggtattttgtttccagttatacagaagttgcataatagctacccactcaggtattttggattggcatggtaatgactgtttaataagactgcagtacaagaaaatatgaaaattacaagcatgcaccttaagtagtttcattgacctatttaaatttatgaaatcttttttgctataaacagatgagtacaataatttatagatagctttgtgagtgtgggtattttgtttccagttacacagaagttgcataatagctgcccactcaggtattttagattggcatggcagtgactgtttaataagactgctactacatagtagcacatatagataagtgatatatctatatatgtacataaatagattttctctttttatcatttatcattctctataactgagcttaccaatttagaaataatttggttgaaaacgttaaattgtagaaaacactataattagcaacaaaggtgtgtacttttctatccagagggacagtttgtatactgtttggtcaattttgtgagattaagttgagaaacctaagtgttttagagacatagtggtaaatgtctccatcagtgttgggttatcgcacagaacaccttctagggtctacttcagagtagtagttttggaactattttagatacaacacctttttaaaaaatgtatcagatattcagagccctaatatgtatctgacaaaaatggagcaactcttgttgggtgaatgggagtgaaggagccaggcattgttaagaatttgtcctgcttatactcctctctcagtttctagaaacctctctgccacctgtggggctccttaccacttctttagaggttcagataagaagagtcttgacttaaagactaagctaaaggaaatactaattattttaccagagtgagtaatttttagataattcagcattagatatatacaaataacttttaatatcaaaagatagaatgtatttcttagtgtctagtagctggatcttagatttttaaaagcatctttgtaattaaaaaaagtattggcgttttcttcttgaaaatgtcttataatttaaaaaaagataaaccagggccaggcatggtagctcactcctgtacttccagcactttgggaggccgaggcaggcggatcacccgaggtcaggagttggagactagcctggccaacatggtgaaaccccacctctacttaaaaaaaaaaaaaaaaaaaagccaggcttggtggcggatgcctgtaatcccagctactcaggaggctgaggcagggaatcacttgcacccgggaagtagaggtttcggtgagccaagattgcaccatcgcgctccagcctgggcaacaatagcaacactctgtctccaaaaaaataaaaataaaataaaataaaccaaaaactcaacacaaggaaactatcttgatgattttgtgaatagtttatagtatatagggttaattttatggtatggcattattgaattagtcagagattattcttttattataaagcactaagttatgtcttcttaaaccactttttgtttagaatactttctatgcttttgagtaaagatgaaattatatgtcttttttaattttttaaattgaatgatgttcaagggaaaagctacccagtttccatttgtgtgaaatttatgtatatttttggttttgtcttgtatatgagtaaataaacgtagtttctaccctttttctaccctttcccattgaagttacaggtttatctacaaaggggtgatggaaatactttgtgtaactattttccttagtcaatataacactctgaggccaggcctggtggctcacgtctgtaatcccagcattttgggaagctaaggagggcggatcacctgaygtcaggagttctggactagctctgcaaacatggtaaaaccctgcctctactaagaatacaaaagaaaattagctgggtatggtggcgcacgcctataatcccagctacccaggaggctgaggcaggagaactgcttgaacccaggaggaggagtttgcagtgagccgagattgggccactgcactccagcctgggcaacacagtgaaactcggtctcaaaaaaaataaaaataaaataaaaaaccactctggattaatttctattttgtatttctggttaatttttcccctacctccaaataagtgggggtaattgacagttgttcacacaaaggttaggtaatwctataattaatttttcattggtttagagaagtcttctcagtgagcatgcctttgttgtcaamtgttcatgccattactgctaatgaaataaaaatgttaagcaagaacagtaactgtctattttagtaactgtctattttcagttactttttaaaaccctaattataaaagccaacttgtagtttacaaatgaccacatgtatctttatttcaaggaaattctggattacttcatgtatttactcataataatatctgaaatagtaaaaagagtgtggatctgggtatcaccacttaactaagagttagttgcaaaattttgggggaaaaatttataatgttcttaggggggttgtgttgcacagctcaaatatgatattttatgtactgccacttaataagctataatgtgcccttggcaaggaggatgaagaggaggtatagcctgagccctggaatttgtctgaagtccttgcagactaaagtacccatgaagacttggatttacacagaatgaatcatggccaagacatgaaaagtcagtgataaagtcagtattgatctcagtctgtagcttacagcttttctaattttttaaacttatttaagtaaagtgtatatccctctcaagtttctgacatatccttatgctgttgaggcctgaagagaatctctgagactaagatgagaattgtcattgagcaatgaaaaggaattaaaatgagaaaagtctgaattatctggttccattgatgagggagtgcctatggtgaaaagcatacctcaggctatttaaaatatccccttaatcgagttctcctggctttcatgctttgcttgaaacacagctctgataatgcatatttttggtaattgtatttaaggagtatttttggtaattgtaatttcttattacaaattaatagccactcacatacatcttatgtacttggtgtattagtctgctagggctgccaaaacaaaatatcacagggtgggtagtttgaaaaacagacatttatttctcacagttctggaagaaagtttaaaatcaaggtcttggcaaatttggtttctggtgagggctgtctttctagcttgtagatgcctgtctgccttgtcttcacatgatctttcctaagggtgtgtgtgtgtgtgggtgtatctgtgtgtgtgtttgtgcgcacacacacgcgtgtgcacagggctggtagagagtgagctctctggtgtctcttattgtttctttttcttttttcttaccttgttattttctaatctagtcttcagagagatggtgtctcttcttataaaggcactcatcctaacasatcagtgctgtacccttgtgacmtaatttaaccttaaatacttccttagaggccccatctccaaatgcaacyacactgctgtttagggctataacatgaattttgggrtatacaagaattcagttaataatacttgattaccctttatctgcccctgagagggtggttcatcttacccttttttagtcaaatcacatttggtaacatgaattgaggtgggtcarctatggtggcagactcactaagagtgtcatcctcaactatcctgtattgcttgtggcatacctagacattctatggccgaaagagcttgcaygtttaaatatttctatagttttagtccttggcacatggacttgagtccatttctctgtcaaatggcgatartaatagttgttcctcagagttgttactggtcataatttaagggaaaatatattttgaaccataagatgcaaagatdgttttttataaaaatgtamaatgttcctttttctattatttgtagagcttaaggacttgaatccagatcttctaattacaagtataagactctaagtagccagacatacccatttttttcaggataattggaattctccatagacaagcactctaggggaagttctggcaagttttatttgcaccatgtaatgcattgaaataaattgtaccatctaataaattgaaatgctgtgcgtttagccctcaagctctgttaagggacagactgcctcctcaagtgggtccccggcccccgtgcctcctgatggggtgtcacctcccagcaggggttgacaggcatctcatacaggagagctccagctgacatctggcgggtgctcctctgagacgaaacttccagaggaaggaacaggcagcaatctttgctgttttgcagcctcctctggtgatacccaggcaaacagggtctggagtggacctccagcaaactccagcagacttgcagcagaggggcctgactgttagaaagaaaactaacaaacagagaaaggaatagaatcaacatcaacaaaacggacatccacacaaaaaccccatccgaaggtcaccaacatcaaagaccaaaggtagataaatccatgaagatgaggaaaaaaaccaatgcagaaaggctgaaaattccctaaaccagaatgcccattctcctccaaaggatcacagctcctcaccagcaagggaacataactggttggagaatgagtttgacgaattgacrgaagtgggcttcagaaaatgggttataacaaacttctccgagctaaaggagcatgttctaatccaatgcagggaagctaagaaccttgaaaaaaggttgcaggaattgctaattaaaataaccagtttagagaagaacataaatgagctgatggagctgaaaaacacagcacaagaacttcatgcagcctacacaagtgtcaatagctgaatcaagcagaagtaaggatatcagattgaatatcaacttaatgaagtaaagcatgaaggcaagaatagagaaaaaagaatgaaaaggaatgaacaaagcctccaggaaatatgggactatgtgaaaagaccaaacctgtgtttgattggtgtacctgaaagtgatggggagaatggaaccaagttggaaaacactcttcaggatgttatccagaaggacttccccaacctagcaagacaggacaacattcaaattcaggaaatacagagaacaccacaaagatactcctcgagaagagcaaccccaagacacataatcatcagattcaccaaggtggacatgacggaaaaaatgttaagggcagccagagagacaggtcagggaagcccatcagactaacagcggatctctcggcagaaaccctacaagccagaagagagtgggggccaatattcaacactcttaaagaaaagaattttcaacccagaatttcctatccaacctagctaaattccataagtgaaggagaaataaaatcctttacagacaaccagatactaagggattttgttaccaccagggctgccttacaagagctcctgaaggaaacactaaatatggaaaggaaaaactggtaccagccactgcaaaaacatacaaaattgtaaagaccatcgacactatgaagaaactgcatcaactaacaggcaaaataaccagctactgtcataataacaggatcaaattcacatgaaacaataattaaacttaaatgtaaatggactaaatgccccaattaaaagacacacactggtaaattggatagagtcaagacccattggtgtgctgtattcaggagacccatctcgtgtgcaaagacacacataggctcaaaacaaatggatggaggaatatttacaaagaaaatggaaagcaaaaaaaaaaaaaaagggattgcagtcctagtgtcagataaaacagactttaaagcaacaaagatcaaaaaagacaaagaagggcattacataatgataaagggatcagtgcaacaagaagagctaactttcttaaatatatatgcaygcaatacaggagcacccagattcataaagcaagttcttagagacctatgaagagacttagactcacacacaataatagtgggagactttaacaccacactttcgatattagatcaatgggacaaaaaattaataaggatacttaggacttgaactcagcgctggaccaagcagacctaatagacatctacagaactctccaccccaatcaacagagtatatatkcttctcagcacygcatcccgcacttattctaaaattgaccacataattggaagtaaaacagtcctcagcaaatgcaaaagaatggaaatcataacagactctcagaccacagtgcaatcaaattagaactcaagattaagaaactcactcaaaaccacacaaatacatggaaactgaacaacctgctgctgaatgactactgggtaaataacgaaatgaaggcagaaataaaaagttctttgaaaccaatgagaacaaagacacaaygtaccagaatctctgggacacagctaaagcagtgtgtagagggaaatttatagcactaactgcccacaggagaaagcgggaaagatctaaaattgacaccttaccatcacagttaaaagaaccagagaagcaggagcaaacaaattcaaaagctagcagaagacaagaaataactaagatcagagcagaacgaaaggagatagagacatgaaaaaccaattcaaaaaataaattcattcaaaaaaaaatcaatgaatccaggagctgtttttctgaaaagaattaacaaaatagacctctagccacactaataaagaagaaaagagagaagaattaaatagacacaataaaaaatgataaaggggatatcaccactgatcccacagaaatacaaactaccatcagagaatactataaacacctctatacaaataaactagaaaatctggaagaaatggatacattcctgtacacatacacctcccaagactaaaccaggaataagatgaatctctgaatagaccaataacaagttctgaaattgagtcaataattaatgggctaccaaccaaaaaaaagcccaggaccacacagattcatagctgaattctaccagagatacaaagaggagtttccttcggaaactattctgaacaatagaaaaagagggactcctccctaattcatttaagaggccagcattatcctgataccaaaacctggcagagacacaacaaaaaaagaaaatgtcaggccaacatccctgatgaacattgatgcgaaaatcccaataaaatactggcaaactgaatccagcagcatatcaaatagcttatccaccatgatcaagtcggcttcatccctgggatgcaaggctggttcaacatatgcaaatgaataaacgtgatccattgcgtaaacagaaccaatgacaaaaaccacattattatctcaatagatgtagaaaaggccttcgataaaattcagcacctcttcatgctaaaaacactcaataaactaggtactgatgggacgtatctcaaaataataagagctatttatgacatacccacagccaatatcatactgaatgggcaaaagctggaagtattttctttgaaaaccggcagaagacagcgatgccctctctcaccacccctattcatcatagtatgggaagccctggccagggcaatcagggaagagaaaaaaataaagggtattcaaataggaagagaggaagtaaaattgtctctttttgcagatgacatgattgtatatttagaaaccacattgtctcagcccaaaatctccttaagctgataagcaacttcagcaaagtctcaggatacaaaatcagtgtgcacaaatcacaagcattcctatacaccaataatagacaaactgagagccaaatcatgagcaaactcccattcacaattgctacagagagaacaaaatatctagaaatacaacttacaagggatgtgaaagacctcttcaaggggaactgcaaacaacttctcaaggaaatgagaggacagaaacaaatgaaaaacattctatgctcatgcataggaagaatcaatatcgtgaaaatgaaaatactgcccaaagtaatttgtagattcagtgccatccccatcaagctaccattgaacttcttcacagaattagaggaaactactttaaatttcatgtggaaccaaaaaagaacccgtatagccaagacaatcctaagcaaaaagaacaaagctggaggcatcacactacctaacttmaaactatactacaaggctacagtaaccaaaacagcatggtactggtaccaaaacagatatatataccagtggaacagaacagaggcctcagaaataatgccacacatctacaaccatctgatctttgacaaacctgacaaaaacaaggaatggggaaagggtattctatttaataaattatgttaggaaaactggctagccatgtgcagaaaactgaaactggaccccttccttacaccttatataaaaattaactcaagatggattaaagacttaaacataagacctaaaaccataaaaaccctaggaaaaaatcttggcaatgccattcaagacataggcatgggcmaagatttcatggstaaaacaccaaaagcaatggcaacaaaggccaaaattgacaaatgggatctaattaaactaaagagcttctgcacagcaaaagaaactatcatcagagtgaaaagactasctacagaatgagaaaaattttgcaatctgtccatctgagaaaggtctaatatccagaatctacaaataacttaaataaatttacatgaagavaactgyatcaaaaaatgggcaaaggataggaacagacacttcttaaaagaagacatttatgcagccagcagacatacgaaaaaaagctcatcatcagtggtcattagagaaatgcaaatcaacatcacaatgagataccatctcacgccagttggaatggygatcattaaaaagtcaggaaacaccagatgctggagagggtgtggagaaatagaaatgcttttacactgttggtgggagtgtaaattagttcaaccattgtggaagacagtgtggcgattcctcagggatctagaaccagaaataccatttgatacagcaatccccttactgggtatatacccagatgattataaatcattctactataaagacacatgcacgtgtatgtttattgcagcacaatttacaatagcaaagacttggaaccatcccaaatgcccatcaatgatatactggataaagaaaatgtggcacatatacaccatggaatactattcagccataaaaaagggtgagtttatgtcctttgcagcatcatggatgaagctggaaaccatcattctgagcaaagtaacacaggaacagaaaaccaaagactgcatgctctcactcataagggggagttgaacagtgagaacacatggacacagggaggggaacatcacacactggggcctgtcacgggtgtggggctaggggagggataacattaggagaaatacctaatgtagatgacgggttgatggtgcaacaaaccaccatggcacgtgtatacctatgtaacaaatctgcatgttctgcacatgtatcctagaacttaaattataataaaaaaatctgtccgttgttttgtgaattatcatatttaaactcagtttctggtggttggtgtccaaaataagattttgcttagtggtatgtccagagcttacagaagaataaccaaaggctggaaaaatatatctttcagcccagcaactttattatagtacatatggtaaactgtgtagaatgttaaggaaacatcccatattggcttaccagctgctgtttttatggcaagattttatttaatatgtaaggctggagggaggtgtgagaggaaagtaaagaaaagctttggattattaaaggtgtgggaaagctatttacactgcttcagggataaataggagggaaggagtactcagacagagggagcgagtgatyatatraagaaaaatactatgatgatactaattgtgttttgtaggaatatggatgctgcctctttgtctctaaatgtgctaccctgaattacaagttacctttggctttttgattctrcaaaatcataggagctccctgaaatctggagcatttgctcagactattgctttctgttatctaccctaggtcggaaatatttaagtgttttttcttcagtcctacagagttttagtctgatactttagaaaacagaactgagttcctattcgaaaagatttactcacagtgttttgtgttatraagtcatactccagggtatcttttagagcaacagccctgaaccaggctaagaggcatggagaagagcagcacagggcttctgaatcctggctgtgcatagatgtgggttaaaattaaaatattactaacctttcctcatctgagatagtaagattttggagcttgaattcttcatgctttttaattacaaaaaatacgatgaaatttcagtgttcttgcaaaaatttgagtaatacaagaattgacaatatgagaggatgtctttaataattttatgtaacacaatcagatctttaacttttgctcatgtaaagtttataaaatttaaactgcttaaaataatggcagtattagaatactgagattcataataatgtaaattaacacatataacccttttttctgtttgtatattatcttttaatatataatgaaaatgtttaggtagtaaatactaaggttaaggtaaagtcatataatcttaattcatctaacagctgcctgttgtttcatatttattccatttttgaagtagtttacaaatgaaaaaaattgtatgaatgccttggcattaaacagcagttcttggaaatcaggaaattcctaagttatacttcctctagcagtgatatatcagcgttatttctatgagtttagttatattcaattttccagttatatatacacctttaaagtgttatataagccaatttaagcaagttagtattagagtagaagtgtaaactttggaatttcctgatttttaacattttactttctatgttattttggtgaactggatcatgcaacttaatttatacagttagtatgaatatacttacaaagagctagattttattttcagccatcacattatgaatagctttttttaaaaaagactatttcatcctctataatgaagtacttagtgtttgccattcacttttggtagcttttaatttttacctcttcagctatgatctgaagtcattccaaaagttatggtctgttctatgtcttcagtagagagttatagtttcataaattatccacctgctctagatgcgttgtagagatacaaatagaattgcacatactaactgcagaagccaaagcattgggtatcaccttccttgttaatccattttttttccaactgtttttgggtttttgttttgttttgttttgtttttgtttttktttttttggaacaaggacagtcataatatagtaatatgaattcattccttaattctttattcaacaaacatctattgaaaatatgccatgtgccatatacttccaggtattgaagatacagcagtaaccaaagcaaagtccttctctcttagagcattyattctaataagtggaaaaagaacatagattgaataagtgtatactctatcaggttgtgattaacactatgaagaaaaattaagtaggatatggagatggagagcaataacggtactattttagggaaggcttttcttcctgataatacctaactggatacctgaaaaagatgtgcatgtcttaaggaaaaacaatccagtaagtaagaacaccaattgcaaaggccctgagatggaagtgtgcttgctaaattcccagaaggaggccagtgtggcaggagtagagtatgtgggaagagaggttcagatgataaggtgagagtaataatgggtatgggaggacatggaattctgtattgccttataggacttggtaaagactttgaattttcctcaaaatggaggatgttgagcagaaacatacatgttctgaattatagtctacaaggatcactatagctactgcacagaaaacagattgcaagggagcaatgatataactgatggataatcaattagtagaataaccattcagtcacgagatggtagtggtttagaccagaatgatgatggtggaggtagtgaaaggggaattccaaaatactttgaagggaatatggtaggatttgttggttagatacaaagtgtgagataaagtgagtcattaaagataaccccaaaatttacctggataacttgtgtctctcttacttgcctatagttgtctttacagaaatcctttcctaaccatgttggatcttctctaggtagtagccactcttactcaatttttaatcaaagctaacagttgtccttgaagtctattaatgtgtcctattttaacttctctataaagaaatggtcagtttctaaatgtttaccaaagtttgaaactcctttaagcaatttaaaacataagattaacttttcgtttttttaaataattgtaccttatggcagatataatatagcttgctgactaagagatgtggagaaccagtttgctggggaacagagctctttgtgatctttcataactatttcctttacttcctgaatgtctttctaaatgccacattcagagtggacttttctcaccaccacatttaaaacactcccgcattactttctatctccttaccttgttttatttgtctcagttgtatttaatatatgatatatatatttgttttttatttttgtgtctgtatcacctcactaaaatacaaatttcttaagggcrgtggctttaaaaaaaaattgctgcagctcagtgggctaggtagttagtaacttactataaatgaattgaatgaatagatggttttaagtagatgtccttatgtcacataatgggtgtttattaaatggcagcatgaaaagaataatgggtatccttgtacattaccggtggcaatgaatgtaaaattgtatagccactctggaaaacaatatggcagttcataaaaaattatacatagaattaccatatgacctagcattgctacttctgagtgtatattcaaaagaatagcaaggactcagatatttatccacccatgtttgtagcagcagaattcacaatagccaaaaggtggaggcaacccaagtatttattggcagatgcatggataagcaaaatatggtatatatatgcaacgggatattattcggtcataaaaaggaatgaaattctgccatacgttgcaacatggatgaaacttgaagacattcagctaagtaaaataagccagtcacagaaggacaaatgtggtatgattttattttatgaggtacatagagcggtcaaattcatagagacagaaagtagaatggtagttgctagaggccagggggaatgaggagtagggagttattgtttaatgggtacagagcttcagttaaagaagatgaaaaagtctggagatggatggtggtgatggttgcacaacaatatgaatgtacttgttgccacagaactgtactcaaaatggttaatttggcaaattttatgttatgtatattttaccacaatttagaaaaaaaaatgttctgagcttgaatgtcacattcaccttgttggctttttggacttattcactgtttgtttatttgttgagatagattgtctttgtctcccaggctggagtgcagtggcacgatcttggttctctgcaacctccacctacaagattcaagcaattctcatgcctcagcctcctgagtagctgagattacaggcatgtgccaccacrcctagctgattgkttttctatttttagtagagacagcgtttgccaggctgactaggctggactggaattcctggcatcaagtgatccactctcgtsggcctcccaaagtgttgggattacaggtgtgagccaccgtgctcagcctggacttattcactsttctgctttaggcttttacaaatagaatctaaaacatttaacctaacatctgagatgtgggtttaccactrttattccaagtcctttaattttgtatgtcttcattttaaagtccctaagttcatgttattaatggttattttcctatatgttttactttctcatgtatataaaattcatattttaaagtcttaaattctgttttctgatgttgagggtcctataargttgtactcttaatggrtggcttactttcattttctcatttaattattatttttaaaaaatttcctagttattgattctcatgttatttcttatgattgttgtcagtatctccctaaatctaataaggagacagaaaccacaaagtaattttaaacaggggaagtttaatataaagaattagaaagctrtgatacgtgagtaactataaaagtgtaaagagaactgtaacaaacatactaggcctgaaggaggagagtatttaaggaaaagaacaacttggaagagggtccttccccaaagttagagttcagaccttgttagagaaggtacaatctgctaaggccagagttggtctgtagttgctgggcaagcaggaaacaatcttttgggggtgcagtcaagctgaggctcctggatgggcttgcaaaggtagtcacagtgccactgataggtagcatgttctagatcacgtactattgtgttggaagagcctcagagtggtgattaagacagggatccagtggacaaagtgtcttaatggagatgggaaacttgggaggggttgattgtattgggtggaccagaaataagctgggacatttggaatgggttttgagaaaggaaagaaagagacagctttctctctcatcttcatatgtttaaaatacatgtaaatgtaaatgctctttgcattaatatcttttcatcttcattgcttcaactgaagcttttattatctccatcctaagggactgcattattctcctaatttatcttcctgccttcagaatcttcctcttccaacctagtgtcatttttctaaaacaaagttctgatatgatactttcctgcttaaaatgtctaagtgaccccccccaccccactgcagaataatgtgactttgtaggatcagatctctgcctactctgttagtttcttttcatcccactttcccatagtcatcctaggaactttctgtattcaatttttcaaagattttcaagcatcattttcttctcctttgcatattttgtcccttctcttctcccttacctttgcgtctggaaaaatctatcaatcctttaaaacttatatgctaccttgtttgcccaaacctttctcagtactaagtggccatttcactttgaacatgctttcatttgtatatgtatctctcatcccacttcatactgagttttgtttccttattcatatttttccttttggaatttacacagcacatagtgggtgcttaataaacgtttattatctgaacaaataaacctgcatacttggctttaatattcttttactcagataatatgagcatgtaccttaacttaaaaagatagggttcagaatggtacacactatacttgagagttatttgggctcttttgtgttttctgcctgtaaaagaaataaatacttcattttcctaatgtttaggtatttagctgtatgatagataaagcaagttagagataaggaaagtaaggtgaaaatgagccaactgcttaaatgaatgatggagttgagatagaaaccacttcattttggattgtcttcttttattctcattagtattataagattgcttagataagtatttatttattgagcctctactatgtaacaaacattgtgttagacctgtgattctaggttctttcccacttcttaagattctgcgattaattagtaagattaaagccttaaacaaaacttactttataaaattgttctaaagtatatgattacattacatatttggagttattataaagttactatcaaattaacggataataaagtacaataaaatccctgaaggcaccaaaaatgtatcttgggtatgcaaatgtaaatgtgtaaatatttataattttaaaaatgtgtgcataactataataacggggatgatgccccctatttgagttcctgtccctaaaaacattcactattctaattcctaagaagcacttaatattatagcatcaggagatatatcatctcaggccaagtttactttctagcctagatgggccttttgcagttagttgactctgcttttcttagcagcattaaggaaagttggtttataataaggttttagcacaaaagttaatgccctgatttattctcagaagtggttagctgtagttgatgcagatggccactagaatgtattcatataaacatcttccattccaaaatgttaagaaaatataacattgtataccttaattattcaattacattagatacatgttatttaataatatacctgaaccagaggcttagggatttcagacgctctgtgttaaaggaatacaaaataagcttgttttaaaatgtaatacatcatgcttctgtccccatgtttacctatgtaattttatgattccataggtaaaatagctgaaagagaaccattatgttatcaaacactgtgtcatgcttgctgagtttgcaaraatrtaaaacgtacaatgtgtaacttttatcttcaggaagtttataacctaataaataagattcaatacacataaaacctttaatgtacgattaagtgataaagtattaagactataagtgttstgggagttaaataattttaaaacagattttaggaataatctaatatctcattttattgaygaggaaacaaaagtctggactagctgtttaactcaaaaatctgcccagagttacactactggataatgtcagaaccagactaagaacgcaggtttcctgactttggcctggtactctttccattcgtaaatacccacgagcctgtgtggaatgggcttgattcaaagcatgtagaagaaatgagacattgaaggttatgggtaggtggtggggagaagagctgttccacaatggaaggaacaagaaggaagcttaaaagacctggcacagagcataaggaatggcctaatgagagtagaaggtatacaataggaattaatttcagttagtaacctgggcctggattgaagcagtccttgcaaaccaggtagtttttatgggataggcaccagaatgcttttatagatttcttgagcaggatgacttgataaaaattatatcagttttatcaactggaaggtcagtgtgatggtaaccatgaaagattgaagtaatattgaggcaggaaaaggtagtagtagtaggaatgaagtagaaaactcaaatctacaagacatttcttgggggaaaatgattggacgagatggcagttttctatagaaaataaaggtaagaagagtgtagcaagcagaatgctatttccatggacagaaataaaataacttggaaggagggctgggatgaattgaggttttttgttgttactcttgatattaaaaagattattactcagtattaaagcttactgtaaaatataggattttaggtttttgagagctttccatatctttggacagtcaatactgaaatttttgaatttagggttaattgattatatctgttgtatacacttagagacgcttgggttacctctgtacattttcagttatatgtataaaacatttttgaatggaataatacgtacattcaggtttatagaaaccttgatggatatgatttaatacaaattagcaatagtatatctaaatttgtaattgtcactgatccattgcttaggatatattttaaaatatgttcactaaattctgttttcagttaagttattcatttatcttttgtttaggtcctaggccactgaaatggagtacaagagaagtgggtattttttctaatttgatttttttcctgtattagtgttgggataatggatttgtatttcatacataattttaagtgcctcatatttttaataatagttgcctagacaatacaatttattgtgaaattttctattagcagttcattctaaatgtttaagaaattatacgtttttctctttttgtgaccttcaatcttaaaagtttatttgaaaaacgaatttagtgaaaccaaaattaaaaaaaaataaactccctaactaaaaaaatatattcttaaaactatttttataaaatcaatttttttgacttgggatcatttagggggatcgcatatattgtagtatatcagctattgacgacattttaattcttatcattttaatgagttttttgttgtaatttttaggagaaaatgatgaaatgcttatttaaaaagtctttattaggctcatgtctctcatcccagcactttgggaggctgaggcgggcagattgcctgagcttagtagttcgagaccagcctggacaacatggtgaaaccctgtttctacaaaaattacctgggcatgatgacacacacctgtagttccagctacttggtgggctaaggtgggaggatcacttgagcctgggaggttgaagctgcagtgagctgagattgtgccactgtacttcagcctgggcgacagagtgagaccctgtctccaaaaattataaaataaaaaagtctttattattattgctgtactttcattttaattagaaatctgtttctgtagtgtacttctctattggattacattgagatctctggaagtagtatgtgaatgtatggtcagttgataatatgtgaattctaaatgctgaaatttatgcttttggggtgtttgtttatcagtgttcttattattgaccaagattatgctttatatcttctatcttctgaagttgtgtgaaatagtgatacaatacaaattaaagctgagctggtgttttacatctagtatgaaagaaattagcagaaatcagagcagtttaaacctatctacattattgctactgagttttgagtcatagatttttttaaaaagtatgaaacatggttaatcataaaaatccacataaagaaggaaataataataggaagtctgttttgtcgaattctagaaatatttttagagaactattattttgaaatgtgcaggatgcttctggtccaaggaccatactttgagaatcattgttataaatcatggtggaaccgtttgacctaatcaaaattaaaatgagaaggaaggttttttaatttaagaaagttatctttaacttctggcaacatgatcttgcttatcacagtagtaggatattataaaattggccaacatctcagcatttctttaaacttgctactatattcatttattcagtaaatatttactaaacatctaatatgtgccaggcatatttcgagctggagataaagagtaggatagacatagctcctgcccccatggagtttatattctcttaggggacatatatatgaacaaaaacaggtaaacagacaaattatgtagttgccagttgaaatatgtcatgtgaaggacaagaacaaggagatgattgatactattagcaaactattttaggtgtagtgatctctgaggagatgacattgaaattgagacccacagaagagaaacaactaggtctgttaagaggagggaggcgcattattcaagcagacaattgaatgtatacaggctttgaggcaacaacaacaacaaaaagtttctttactctaagaactgatagtagtttagctctaggctactatttaatattaagattatggatggaaggcagggagggaggtgaaagagaaagaggagagaaattaagaacaataggtttccgatttatgtaaattaattaatggtagtattgtttactgaaatggggaagaggtgtggggggtgggtgtcagtgagctcagctgttttgagagagtttgagcaaaaaaaaagtcagttgaggtgattaaaaattgatacattaaagtgagaaatcaaagaagaaactttgttgctgagacatttagamtatttctcagatattaataaaatttagagaacaaaacagtattctagagaaacactaaggttattaattaagaggaaagcaatctatttggggaggtttaagggaatgttgacatatacaaatactaaaaaattagaaagccaagtaaaaagggattaaaattctatctccaagtggaaaaaatcagrttgtccagaaaataataaatacatgattgatatggtttggctgtgtctcctcacccaaaatctcatctttaattgtaatccccataatcctcaagggcaggaccaagtagatgtaattggatcatgggggcagtttcccccrtgctgtccttatgatagtgagtctcaagagatctgatggttttttaagcatrtggcatttcccctgcttgcactcactccatcctgccaccctgtgaagaaggtgcctgcttctcctttgccttctgccatgattgtaagtttcctgaggcctctccagcaatgcagaaatgtgagtcagtgaaaccgcttttctttgcaaattacccagtcttcggtatttcttcatagcaatgtgagaacagactaatataatgatcataaagagattgttggtgagagaggccattgactcaccagagaacctagaaataaattaccatgggcatataatatctaacattatattgagttagtcaaaatatgaaatgttaatatttataggggagactaaggatgatgccagaactgaaagaaaaatgtttctagaagacctaaaacctaaagaacttagcagactccttgagaaaaatgtaaatgcctgaagtagttttgaaaatctgggtttagctagctcatgccctagaatttcagtgattacatagactcattaaaatgaaattcaatcttgtttttattttaaacatatttttcaggtatccaagggactgttaggaggacttaaataacccatatccttatgaaagtgaattataggcctccttgaaattaataaaaatcttcaaagtagtatttaatttaaacttgtaactttctttgtgttmtgagagagtgctgtttctttatattttaaagaaatagaccatttctgttttgttcaccaatatattcactgcacttagcacactgacacagagtaaccatttaataaatactttctgaatgaatgtataaatataaattttacatttagttttgggttacctggatagctgataattaatgaagcagttcctttgtggcccttaggaaatgtctctactgtgaccatattcaggtatatatggtggcaggctatacgtgaatagaattagtgcttattagaaatgaggtaggatgtttttgagattatatgtttccatgcactgcagagcatactggtgttattttaaacaaaatataaataacttttggattttgtgtggattttaattattttaatcagtcwyccgttaagggttaataatccagttaactatgttgttctcaaattccaaatactaaaytactgaggtcatgatgctttggggaacaaatactattaatgactagtgaaagaagtttyatagatctcacattgtttctggaagaccaatagatgtatttattaccataataacacgtagaaaaaggacagacatttctatgtggttcttagttctgtctctctttttttttttaatccaggatgtcartccttttgtgttcactccctaattatgtatttacattttctttatttttcttaactatrtatctgacctttttttttttctcaaggtcttgattaaaatcagctttactctacaataagttgaattgatttgggcttctttttctcatgatcctattatttagtgactgttttcttcaaatatttgtttccatgacttttgttmcttctttatagacatatttttagtagttgcaatttcacctccaccccgcctttctgggttgataatattggttaacactgactcctagggtacagtctcatcaatgttggtgtagaaataagatataatgaacaccaaacctaaaaaagcagcgtcaacttttactccagcagcagtggagttgttatttaccaaaagaaaacagattcagcagagatctgttagaatgcctatgttatgccctattaatctaaaacagttccatgataattctctagggttgaactgtttttaatggtatgtatgagaaaacgttttatgggcttttagccagaagattttatatataaatggtagtagaggaacattgttaaattcatgaatcttggaggcaatgtaatataatcrattttggggcttttaaatcagctttgaatcctgaccccttcacttattaacttygtgactttaggcaagttacttgactcctctgggccttaacttcctattttgcaaaatgagaataatatgacttcctgacaagaattttgaaagaatagaaggcagttatacaaaatgtgtgatacaagttttggcacatacaggtttcttcccaaagatgaacaagtcctactgctaagtatagaaagggagatataagtacaagttcctcgttatttcttagagctttgcgcccatagatctttatattgtcttaacctatgtgatccacaatgacccaaactacaatgtatgtcttaagaaagcatagaatttttacttttttttcagtttgaacaaaaatggtcagttgtgctctgagtcctaggtgtcttctagatataaatatgtgggaaggacaaaggcaaggggcatttaacagaacctcaggtcctacttctagcagagcagctatacttttctgttttaccatttgtatttctgtgcaagatattgattgaacaaaggggtctgtgtattacaaaaaagcttgaaaaaacaaaagcagggtcaagcagtctatttcttggctttcctttttctccgatgccaccctgctttctccttggcgttttaaagtttgtgggaatgggtgggagttagggtggggaagtagggaggaattccattctgtcttattgcatggagttctctgagaacaaaacatagcaaaaggacaagggtcctatgyaaagagggcatttctggtggaaaaattccttgacctccttagctcttgcgttgaactctatcaacaaagagctatgttttgagccttgattacaaattttaaaactggtaaataacaaatayatmttgcctctgattgcttcctcctctgactacattgagatatctttattagacccttamtattttcattatcttcttatcttagactctaatcactttactctcatttcagtgtctgcaagttcttttcccattagtcttctctgtaccaaccagcaagaactctgaccctggatgaatgttacctgactttactgccatcaagcatttttggagaaaataacacattgggctaatggttacctatgatttcctgaggtctgggttcgaccccttttaatcatctgaggaatttttctttcctccatcttcattatctttctccctgtagactttttactgtcaacrtttaaacatgttcaaataaatccaagcatcgaatgaaggtaacaaattaatcaacttattggttcagctgcaactctgtttctcaccccgcagtcaaactttttaaacaaattgtttattttcattgtctttagcccattccaatacagcttctgctcccataaccccaaactgcttttgtaaatttgtttcatttccgcacttaacagctttcccattaccttctgatagtctcatatccctaacattatatttgcacaattctacctctcctttctagctctaagcacttttttcatttcatgaaatacagttaatattctccttctctgggtttttgcaggttctatcctttaactgggaaacactctctgccttcctcaactcctcccacctaactgttcagttatcagatgtgatcttctgaaggaggtttaccttgacctgaactggctgagttctcctacttcataccttctcttcacagcacttgtcacatttgtaataatgtatttgtcattctccctgtgccttttaatgttggcttctagagattagggatcccactggttataggactggagaggggagctcaagaaatatttgttgaagaaatgactgaataaattaacaactgtagcttttcccagttcagtgcatcagttgtgtccttggccttattggagtttctcttccttagcagcataatgaattttaagtggaggaaaaactattagtgattccactagagttattaagcactgtagcccgtaatgcatcataggcgcacaacatatatacttttccattattgtcctctcctttttgctttaaaaataactagaaatatgtaataatttcaaatactaggaagctgagtattttgtttcttatggcacttttaatcaaatcacattatttattgagtactactcagtgtatatcctaaagtaaaaaataataatagacaaatgaatcaagtttctaaaaatcaaaacaaaaaactttaaaaacagtatgggaatacatgtgttcaaaagagaccccagaaagtgttttcttcctgaatatattagacccttttcagctcctaatgctgtagaataaatgaagtgttatgaaacttataattaggaactatctgaaagccaaatgtttagctaaaatgtgtgataaattaatgaacatacaaaggaatagatagcagtggcagtgtatttgttttgtgaattttatttatatgcaaaataataattgtatatgcatttaaatataattgaatggtatacatatgtatagagattgctaccatatttgatggattggtaaatagtattagaggtaatttctgaagatattttagtgtaaagatattgatgtaaaaaaaaattcagcaacctatctatatatggctgtaacaaagaagagtgatttggactactgctacaaagtaggttaaatgatctctacattacttcatgcattaacattctctaaattacttcatatattaacatttacatgtaatatatttgtagtatattctaatttaaatatccaacggaaagttggaaatgaatatagtttgtgtttaactgagttgagaaagcatagtatggtaattaaattctttttttaaccaaacattattataaataaaattgctgaattccaagtatttatacttaaataactttatgttgtaaacagtgtttttttaaagtactttctttataccttacactttattttagttaagttatagccatgtgtcttgggtagaattctgagagaataataagggactttaccctgtaatcacagaagcagtttggtaatataggaaccaagtgacagcttttctttttcaagtatatagattcagatctggacaggaatctttaagggtgacctaaaacatcattacgtcagtttacaacagaaggtttactctgttagtttccagtaactataatggaaactaacctagatgaacattggtacctactttgcagttagtgactgattttatttgaccaattagtactcatgatggagaggaaaataacttgtctgtgacctgtcatgatcaactcctaagggacaagctttgattacctcttaggtttattgtttttgccttatcaagtccacttgacttaaagtatgttctacaggcggaatacactgggggtggcgggcatggaatttttttttgctrgaattagagctaataagtttgatttagagtaatcagtttttgcctctgttctcccaacaattgtgtgatattaggaatatctttcttgtgtttctttttaatagtttttattttatttaaaaaaaatggaacacttcacaaatttgtgcaggggccatgctaatcttccctttgtctttccaattttagcatatatgctactgaagtaagtgagcacatggtttttctctttctttcttctttctttctttctttcttttcttctttttccttccttccttccttctttctttctctctctctcttttttttttttgacaaggtctggctctatcatcctccaggttggagtgcagtggcacgatcttggctcagcttccacctcccggctcaagcaatcctcccacctcagcctcccaagtagctgagactacaggtgcacaccaccacacttgactaatctttgtatttttttgtaragagggggtttctccatgttgcccaggctagtcgtgaacttgtgagttcaagcagttcacccaccttggccttccatagttctgggattataggcgtaagccactgcacccagcccatatgtttgttattaatgaaggttgtgctatcagacacataatatcactgtgaaaacaacatttgccacgtaattccttaaacagtgttctacaagaataaaaaatttattgatggctcattgtatgttagggtttattctgagtgccttaggttccacttccctctgtggaagccaaagtggggcagatagttcctctcataactcctgtgacagctagagtttggggcatatgacctcctgtgacagctagagtttccatcaactagttggaaatcgctgcatgagacttcacatctaggaaaagtgatgcaaagacatagcaacagtttagaatttattcttctagtggtttccaactcccaggctcaagcagtcctcccacctcagcctctagtggctagagcagcatccagtgtctcataccagtggagatactggtaccagcagtggtggtggtgccacattctcagcagaggcttcctaggctgtcttttttccagcatgattttggttgcagttctggcttcctaaccttctttagtgccatcttgtttcccaagtctgtttcttcagcttcatcattttgtgtgccatccgaattgtttcctacttaacttaaccagaaatcacttccattctttgtgaccaagaactggactagtacaattctcttggaaaaattggycttaatccctagctgtttggcaatatcttattatgattaattttttatagccacagctgccagaaccctaaatttcagttaacactgtaaagagaatttaagaaagaggaaataagtttatttaagtcatgacatcagaagaaaacagtaatgaaaatctaatgaacagtactattttcaagaaattgttcatgtattttagcaaaatgaaaaccacttaaagcatattttcagttgttgctgtttattaatattatctttattatgaaaggaggtaatttgtactaggcatgtactcctgaccttctgaaaaacctcccttcatttttctttgaagaatctttccctttcctgctcttagagtagggctacctccaccaattcagaggtgatgtatgtgacctatgcctaagcaatcagcacgctttatctccttcaacacagtgattggttgagattggatgagtatatatcagggtacctccactgaaagatagctattgcagcttcaagcaccacagcctcacacatcacatggagctgagaagaccaaaatatcagaaagtaggactgagaggatggagggaaagaaactgagtcctgatggtgtattttgaggcctatatatatatatctagtagaaaatgttatgaaacttttataattaggaactgtttgaaagttaaatatgcagctaaaatatatgattaattaatgaatgtacagaggaacagatagcagtgacagtgtatgttgtggaattctacttacatacaaaataattgtatgtgcatttaaatgcaactaagtggtacacatatgtacagaaattgctaccatattttatagtttgataaatacccagctattttaaaaactatttctaatcctacagtttcagttccataacccattacactgcwtttttgcctatgccagtttgggttagattttctgtcactggcaaccaagagttctctgtttctttggaatataaatgctaaatcatcttgagttgggattgtaaagtcttgctaccatgttttgaggaatacctcttatttatgttttagttacatataacttttgtacstaaaatattaacaaggaaagcaactaacaactttaagctgaaatactaatcctgaaagataagaatgaaaactcaaaccttaagttctataaaactttgagatagctacatgtttactttcagaataatttaaattggtagagtacaagttgggaaacaaacactttaagtgaatatttaagtcatgtaaaatatgtatttttaaaagtcaaattaaacatattaccaaatttgctggaactatatattttatttataataagcacttttctacattttacaccctgttgccttacataactttccacagttttgacattataacattgtgattttctgtcaaacatgaatgaaaatacgagtttatggatgatagactcatgctatttccagatttcagaggggtagaggaagcagcagaaaggccctggagctcgctggatcccctagcaggccattcctgcatgacaccacagggatccatcaggagggtggccagaggagcagggggcaaaactccacagagagaagtaaatctctagctgaactttgtaacaatttgaatggggtgagaagcctcctggccagaactcgggkgaggacacaaatctggagggcacactcaacaggtgggggaagaatgaagccctattcttttgcaactgggtggcggatagcctggggcaagttttcaagcctgtgtcacccaccacctggaaacagacttggggctcttgtggggctcggtgggagtgagactggccctttggtttgcataagagctgggtgacgcctgtgactgccagctttcccccacttccctgacaacctgcatgactcagcagaggcagccataatcctcctaggtacacagctctagtgacctgggaatctcaccccaacccccaacagcagccacagcaagacccacccaaggagagtctgagctcagacatacctagccctgcccccacttgatggtccttccctacccaccctagtagcggaagacagagtgcatataatcttgggagttctaagcccctgcccattgctggtccctctctgcactactacagctgatgctctctggaaagcaccacctcctggcaggaggccaaccagcactaaaatagagcattaaaccaccaaagctaagaaccctcatggagtccgttgcacaaccccccatcctcccaccccccactaactccactggaacaggtgctggtatctacggagaagagacccatagatggttcacatcacaggatgtgatattgtgcagacaacccccagtaccagcctggagccgggtagactcrgtggctagacccagaagagagayagtaatcactgcacacagkaatcacaggaagccacgtccataggaaaatggagagagtactacatcaagggaacaccccatgggacaaaagaatctgaacaacagccttcagccctagaccttccctctgacagagcctacctaaatgagaaggaaccaaaaaaccaactctggtaatatgacaaaagaaggctctttaacaaccccccccccaaaaataacactagttcacaagcagtggatccaaaccaagaagaaatccctgatttacctgaaaaagagttcaggaggtgagttatttaggtaatcagggaggcaccagagaaaggtgaagcccaatgcaaggaaatccaaaaaacaatacaagaagtgaagggggaaatattcaaggaaatagatactttaaagaaaaaacaataaaaaattcaggaaactttggacaaacttatagaaatgtgaaatgctctggaaagtctcaacaatagaattgaacaattataagaaagaaattcagagctcaaagataaggtcttcaaattaatccaatccaacaaagacaaaaaagaataagaaaatatgaacaaagtttccaagaagtctgggattatgttaaacaacaaacctaagaataatcagtattactgaggaagaagagatttctacaagcttggaaaacatatttgatggaatcatccaggaaaacttcrccagccttgctaggaacctagacatccaaatacaagaagcacagagaacacttgggaaatttatcacaaagagatcatggcacactgactgtcatcaggttatccaaagttaagacgaaagaatcttaagagctgtgagacagaagcaccaggtaactaacttataaaggaaagcctattggattaacagcagatttctcagcagaaaccctataagctagaagggattagccytatcttcagcctcctcacacaaaacaattatcagccaagaattttgtatccagcgaagctaagcatcatatataaaggaaagatagtctttttcggaaaaacaaatgctgcgtgaattcaccattaccaagccaccactacaggaactgctaaaaggaggtctaaatcttgaaacaaatcctggaaacacattaaaacagaacctcttcaaagaataaatagcacaggacctataaaacaaaaatacaccttaaaaagcaaaaacaaagtacgcaggcaacaaagagccggatgaatgcagtggtacctcacatatcaatactgacattgaatgtaaatggcctaaatgttccacttaaaagatacagagtggcataatggataagaatttaccaacaaactatctgctgccttcaggagactcacctaacacctaacacataaggactcacataaactgaaagtaaaggggtggaaaaaggcatttcatgcaaatggacaccaaaagcaaatagggaaagctactcttatgtcagacaaaacaaactttaaagcaacagcagttaaaacaaagagggacattatgtaatggtaaaaggccttgtccaacaggaaaatgtcacaatcctaaacatatgcacctaacactggagctcccaaatatataaaacaattactaatagacctaagaaatgagatagacagcaacatgataatagtggaggacttcagtactccactgacggtactagacaggtcatcaagacaaagtcaacaaagaaacaatgaatttgtaccttggaacaaatggacttagcagatacatgcagaacattttatccaacaaccacagaatatgcattctattcaacagtgcatgcaactttttccaagatagaccatataattgaggccataaaatgagcctcaataaatttaagaaaactgaaatgatatcaagccactctctcagaccacagtggaataaaactggaaatcgactccaaaaggaaccttcaaaaccatgcaaatacatggaaattaaataacttgctcctgaatgagcattgggtcaaaaacaaaatcaagatggaaatttaaaaattctttgaactgaacaacaataatgacacaacctaccaaaacctctgggatacagcaaaggtagtgctaagaggaaagttcatagccctaaatgcctaaatccctaaaaagactgaaggagcacaaactgacattccaaggtcacacttcaaggaactagagaaacaagaacaaaccaaacccaaacccagcaaaagaaaggaaataaccaagatcagagcagaactaaatgaaatggaaacaaaaacaatgaaaaagataaatgaaacaaaaagctgattctttgaaaagwtaaaaaaattgatagaccattagcaagtttaaccaagaaaagaagggagaaaatccaaatgacctcactaagaaacaaaacaggagatattacaactgacactcctgaactacaaaagatcattcaaggctactgtgaacaactttatgcacataaactagaaaaccaagaagagatggataaattcctggaaagatgcaactctcttagctgcttacatcaggaagaattggattccttgaacagaccaataacaagcagtgagattgaaatggtaagttaaaaaattaccaacaagagaagtccaggaccagacagattcacagcagaattctaccagacattcaaagaattggtaccaatccttttgatactattccacaagataaagaaggagcccttcctaattaattatgtgaagctagcattaccctaataccaaaatcaggaaaggacataaccaaaaaaagaaaactacagaccaatacccttgatgaacatagatgctaaaatccttaacaaaatactagctaaccaaatccaacaacatatcaaaaagataatccactatgatcaagtgggtttcacaccagggatgcaggtatagcttaacatatacaagtcaataaatgtgattcaccacataaagagaattaaaaacaaaaatcacatgattatctcaatcgatgcagaaaaagcattcaacaaaatccagcattctttatgattaaaactctcaacaaaatcggcatacaagggacgtaccataatgtaataaaagccatcaatgacaaacccacagccaacataatactgaatgaggaaaagttgaaagcatttcctctgagaactggaacaagataaggatacctactctccctactcctcttcagtatagtactgggagtcctagccagagcagtcagacaagagaaagaaataaagagcatccaaattggtaaagagaaagactgtcagtgtttgacaatatgatcgtttaccttgaaaaccctaaggactcctccagaaagctcctagaactggtaaaagaattcagcaaagtttccggatacaagattaatgtacacaaatcagtagctgttctatacaccaacagcgaccaaacagagaatcaagtcaagaactcaaccccttttacaatagcaaaaaataaataagtaagatacgtaggaatataactaactgaggagtcaaagacctctacaagaaaaactacaaaagactactgaaagaaatcatagatgacacaaacaaatggaagcacatcccatgctcatgaatgggtagaatcagtattgtttaatattactcaaatcagtaagaaaaaaacaatcccatcaaaaagtgggctaaagacatgaatagacaattctcaaaagaaaatataacaaatggccaacaaacatatgaaaaaatgctcagcatcactaatgaccagggaaatacaaatcaaaaccacaatgcaataccaccttactcctgcaagaacagccataatcagaaaatcaataaacagtagatgttggcatggatgcagtgatcaggaaacacgtctacactgctggtgggaatgtaaactagtacagccattatggaaaacagtgtggagatttcttaaggaactaaaagcagaactaccatttgatccagcaatcccactactgggtatctacccagaggaaaagaagtcattatttgaaaaagacacttgcaaacacgcatgtttataacagcacaattcacaaatacaaagtcatggaaccaacccaaataaatgcccatcaaccaacgagtggagactattattctaagtgaagtaactcaagaatggaaaaccgaccattgtgcgttctcactgttttgtgggagctaagctatgaggacacagaggcattagaatgatacagtggacttcgaggacttggggtgaagagagggagggggtgagggataaaagactacaaatatggtgcagtgtatactgcttgggtgatgggtgcaccaaaatctcacaaatctccactaaagaacttactcatgtaaccgaataccacctgtaccccagtaacttatggaaaaataaatatgttaaaaaaaaaaagtaatagccaaatctgttaactctgtgattcctgctttggttaatgtagattattatcacatgatattaaagagtcaggattatggagttaatgttttactggtgcttttttttttaaaaaaagaaaaatgtttattatttaaggctgtgtgcagtatgtgcttatattcaaacatcccttatgctgttagtcacagaaatactaactatgtgtatatgaatggcttttcacagtctatataatgattggaaaaataactaatatagtatattctaaatgatgaatctttatcttcctatataaaggacatcatattactaattttcaaatttatcagtaagacactgaacaaagcctaaaaattaatggatattgttttaatgtgatgtatgatttactaaattaagcttaggagcatttctgtcgatgtattcctatctttcagtatgtgcttacatacaaataacaactttgtaagtattttctttttacagattttcagtaatttatatcagaagtatataatcaagaaactttagtgtttctgtccgttaaatatttaaaatattttattctaaagtaaacccttttggcattttttaatgtggggttgcctcatcaaattttgcatagcctacattacaatcatagaatcttgagttttggaagagactgtaaagttcatttcattcattcagcatccatttggtggtagtgtgctttgaagacttactaagaaattaacacctaggataacattttttactttgcaaaatgtcattgtattaatattttacgcaaacaatacgtgaaattacagtactttttttctgtttcttgccaaattgtaagtagagttgaaaacagaattattttttggagatatgatcttgccctgttgcccaggctggaatgcagtggtgtgatcttggctcactgcaacctctgcctcctgggctcaagtgattcacccacctcagcttcctgagtagctgggacttgagtgccaccaagcctggctaatttttattttattttattttttgtagagacaggttctcactatgttgcccaggctggtctcaaactgagcacaagtgatccatccccctcggcctccctacgttctgggattacaggtgtgagccaccgtgcctggccccagatttttattgtctttgaaacagaagattcatgaaaggattctgccattttattcacctttctgacactgcagtaaagtgcagattaaagtatagttccctgtgaaatagccagttaccctttgagtagactccagttcacataaagaagtacagggagattacctgacttgcctaggttatatattgagtcagtaggagaagtagaaatactaagtgcagattcacagttcagtttagcccagaactatggatgctttccttatggttattacctggaaggctttacaatcactgatgtaccctccctgctgtctcctctcacttacacatatgcagtcttgattattttgataatttttctacatttatacacacttcacacataatttttgtttttttaaacctcagtttatagccttaagttatactcaggaatgtacattgtactcttaagcagaaagaccttaatattagttacagctgaagagtgagcttaatttctaagtacattttggtttttccctttttgtatgccttttataggtgttcacctttagcagccagtctcttgactttgcctaatactataaagaatagcaaacattgtattgacataattggttgttatggaagtcatttttaatagaatgaccataccttatttattaaaaaataataaactttatttttcagagcagtgttaggttcacagtaaaactgataggaaggtatagagatcccccgtatattcccttcccctatgcatgcatagcctatccaattatcagtatcccctattagagtgatatgtttgtcacaatagatgaacctatatgattatcactcaagaccctagttaatattagggttcacttttggtgtcatacatttcatggatttggacaagtgtataatgacagtacatccaccactgtagtatcatataccataatttctactacacggaaaatcctctacagtcctgttttacattttcagaagtgtcatatacctggaatcatacagtatgaagtcttctcaggttttcttctttcacttaatagtatgcatttaaattctccatgtcttttcatgcatcgatagctcatttatttttagtactaaataatctcttgtctgaaggtaccacagtttatttattcatttacctactgaaagacatcttgattgctttccagttttgctaagtataaataaagctgctgtaccatccatgtgcaaatttttgtatgcacgtaagtcttcaactcctttggataaataccaaggaacatgtttggtggattgtatggtaacagcatgtttagttttgtgagaaattgccaaactgtctttcatggtggttgtatctttttgcatttccactaacaatgaaatgagggttcttgttgctccttatcctcaccatcatttggtggtgtcagtgttctagattttggccattttagtaagtgtgtagtagtttctcatttttgttttaatttggatttctctactgacatacggtgtggagcatctttttatatatttatttggcatctgtgtaacttctttgatgaggtttctgtttaggtttttggctcacttttaagctgtgttttcttattgttgagttttaagagttcttcatatattttggataacattcctttatatcagacatgtgatttgcagatattctctcccagtcatctttagcttgtctttttattctcttaacagtgtcttccccagtatagattttttgtttttaatttaatgaagtccagcttgtcacttctttcttttatggactgtagctttgatattgtatctaaaaagtctgtttgttcaaaatagtaatgatttggatctgttagatcaattaagaatgaaacaaagttattttaccattatgtattctttccctaatgctccctctttatgtagatctgagtttctgacctgtctcctttaacatcttttaaagaactttaaaaaacatttcttgtgaggcaggtccactagcctaaaattttcttgatttttatttgcctgagaagatatttatttctccttcagttttaaaataaacagggtctcgctatgttgcccaggttggtcttcaactcctgggctcaagcaatcctccagagtatctgggattacaggtatgtagcaccatgcctggctttcttcttcacttttaaagggtgatttcaaagggcacagaattttaggttgttgggttttttcctcaacactaaatattttactctactctttttgtattttcaatttttgtggatacatactaggtgtatatattaatggggtacttgtgatgttttgatacaggcatacaatgtgtaataatcacatcatgaagaatggggtatccatcccctcaagcatttatcccttgtgttacaaataatcaaattatattattttagttattttaaaatgcacaattaaattattattaactgtggtctccttgtgccatcaaacagtaggtcttattcgttttttctactatatatatttttttgtacccatcactccaccctttttgcttgtactgtttctgaggaaaaattggatgtaattatctttgctcctctgtamgtaaggtgtttttttcaccactttggcatctttcaggatttgtctttatcttcgattttctgtaatttgaagatggtatccttaagtgtagtttctttggcatttatctcttttggtgctctgtgagcttcctggatctatggtttcgtatctgacattaatctgaggacatttttagtcactattgctttacatttttttcctgttcttttctctttcttcttctacaatttttatcacacatacgttataccttttgtagttgtgccacatttcctcctgggttttttgttttgttttgttttgtttttgtctttgcttttcagttttgaagttttctgttgagatattttcaagctcagaggttctttcctgagttttgtccattcaacggcattcttgatttctgttacagtggtttttttggtctctagcatttcttttggttatttcttagatctctcttcttgtacttcccatctgttattgctgtcttcttatcccttagagcccttagcatattaatcacagttgttttaaattcctgatcttatgattccaacatccctgccatagctgtgtttggttctgatgcttgttctgtcctcttcaaactctgtgtttttatgttgggagaagagaagtgttctgttgtcctatgattaggtatcacttttttagtaagcctgtgcctcttgactgtgaatttcacaagtgcttctcagtttttttatccttctccagttggacagatggctagagtgagctggagttgggtattttctttctcccacctggaaggctagtgccaactggagttggatattttccttcctgtaagtcagttaggctctgatagaactccaacaggttaagctctgtttaaatagtttcctctatgggcagaccttggtaagaagcacagagtgatccggcatattttaaaaatggcgtgtcctttcctttgctggaagcatgagtggatttttctccagtattcactgtgagaaccagatcaagtttctggaggttaaactcaacagaagtgaggagcctccttatggctgggtgcccctgcatttttcagtttttacagttgtccacactgactccagcaattaattgctgtttaagttttcttacactggcactagctcccatggaggtttctacttctgggtttctactccaataagttacaattctctgtatttacatctgtctctccaatctggggggcaatggtttaccctatgacttgacttctcttatggatccgagaagaatcgttgatttttcagtttgttgagatttgtatttgttgttaggatgaaatggtgacttccaagcttcttacatgccagaccagaaaccagaaatcccagcttaatgtmacagactgacatggactgcactgcagcattaaagagaataagaagttgtcgttgggttttaagtctgtgaaacaaagtaaggtttttaatttatccaaagttacacaccctgcaagtgacacaggtgggaatagaatctaaatatttggactcccaattaaattatctttctttttattttattttattattattatactttaagttttagggtacatgtgcacaatgtgcaggttagttacatatgtatacatgtgccatgctggtgtgctgcacccattaactcgtcatctagcattaggtatatctcctaatgctatctctccccctccccccaccccacaacagtccccagagtgtgatgttccccttcctgtgtccatgtgttctcattgttcaattcccacctatgaatgagaacatgcagtgtttgtttttttgtcctcgcgatagtttactgagaatgatgatttccaatttcatccatgtccctacaaaggacatgaactcatcatttttatggctgcatagtattccatggtgtatatgtgccacattttcttaatccagtctatcattgttggacatttgggttggttccaagtctttgctattgtgaatagtgccacaataaacatacgtgtgcatgtgtctttatagcagcatgatttatagtcctttgggtatatacccagtaatggaatggctgggtcaaatggtatttctagttctagatccctgaggaatcgccacacagacttccacaatggttgaactagtttacagtcccaccaacagtgtaaaagtgttcctatttctccacatcctctccagcacctgttgtttcctgactttttaatgattgccattctaagtggtgtgagatggtatctcattgtggttttgatttgcatttgtctgatggccagtgatgatgagcattttttcatgtgtcttttggctgcatcaatgtcttcttttgagaagtgtctgttcatatcctttgcccactttttgatggggttgtttgtttttttcttgtaaatttgtttgagttcattgtagattctggatattagccctttgtcagatgagtaggttgcgaaaattttctcccattctgtaggtttcctgttcactccgatggtagtttcttttgctgtgcagaagctctttggtttaattaaatcccatttgtcaattttggcttttgttgccattgcttttggtgttttagacatgaaggccttgcccatgcctatgtcctgaatggtawtgcctaggttttcttctagggtttttatggttttaggtctaacrtttaagtcttgaatccatcttgaattgatttttgtataaggtgtaaggaagggatccagtttcagctttctacatatggctagccagttttcccagcaccatttattaaatagggaatcctttccctatgaatgaaatgaagcgagaaggaaagtttagagaaaaaagaataaaaagaaacgcasaaaacctccaagaaatatgggactatgtgaaaagaccaaatctacgtctgattagtgtacctgaaagtgacagggagaatggaaccaagttggaaaacactctkcaggatrttrtccaggagaacttccccaatctagcaaggcaggccaacattcagattcaggaaatacagagaacgccacaaagatactccttgagaagagcaactccgagacacataattgtcasatwcaccaaagttgcaatgaaggaaaaaatgttaagggcagccagagagaaaggtcgggttacccacaaagggaagcccatcagactaacagcggatctctcggcagaaactctacaagccagaagagagtgggggccaatattcaacattcttaaagaaaagaattttcaacccagaatttcatatccaaccaaactaagcttcatgagtgaaggagaaataaaatactttacagacaagcaaatgctgagagattttgtcaccaccaggcctgccctaaaagagctcctgaaggaagcactaaacatggaaaggcacaactggtaccagccacagcaaaatcatgccaaaatgtaaagaccatcgagactaggaagaaactgcatcaactaaggagcacaataaccagctaacatcataatgacaggatcaaattcacacataacaatattaactttaaatgtaaatggactaaatgctccaattaaaagacacaggctggcaaattggataaagagtcaagacccatcagtgtgctgtattcaggaaacccatctcacgtgcagagacacacataggctcaaaataaaaggatggaggaagatctcccaagcaaatggaaaacaaaaaaaggcaggggttgcatcctagtctctgataaaacagactttaaaccaacaaagatcaaaagagacaaagaaggccattacatcatggtaaagggatcaattcaacaagaagagctatctatcctaaatatatatgcacccaatacaggagcacccggattcataaagcaagtcctaagtgacctacaaggagacttagactcccacacaataataatggaagactttaaattatctttctatttcactaaattccacttttctgaaaggtgatatgaatggttcatatagggaaatattacagtgaggcttgttattgtttgtaataccatattcatttagatgttttctccatcctcctttttttttctttttttaccttctttataattttccttttagttctggttcctgatggtactgaatattaagaagattatctgccatttttgaggaggaaatatctaatagtataatctttttcctctatgttacaggcagaagtataactgcagcagcaatctgcctttcccctttatttgaatttacagaatatgttaaaatcaataataagatgcaaataaaaaatcactcattgacacttaatatgctgaatacaaattcagcaccataattaaattgcaaagtttaacattatactccattttgatattaatatttgatcttgcaatgaatgtctgcttgtcaaccttttatttactgtggaggtcgtggtatacggtattaaagaagayattcaactagagctcaatttttctgatgagctcccaggttcccatcgcaattttagacaacacatgctgttttactggaagagtatctaaaggatatagtctgatcactctctacctcccatggtaaaccttctgtttgttttttgaatttggtagttaaaggtgcatgataaaacttgccatctctgttagatgctgctaaatgagactagtaaaatgactgccaagctccagccgctctttattttattgctttaaacatagatttcctagatggtcatgatctggtttgtccaaatccaccttaactctkaaagcaataataaatataaattttaaattctaaatgaaagagaggaaggggtctcttcataagtgaaaacattccttaaacaaatgaaagcaaacagaatttttttcatggacctgtattttcatttttctgaccattatacgattttcctagcaatataaaagaattctgcagtccctccctatttagttgttggaagagaaaaatacattaaatcttaattagtatactacctatagtagcatctggtgttactgaatttttaccatcttctgaaagcagtaatcattctttacctggaggaaaagattccagtaatctgttttattaggaaacttttctagccttcctttcagttacgggatttattgaaaactacctcatatacatatgcacatatacccatatatgcatatgtatatatacatgtgtgaatacrtrtatggctatagatctgtgtgtatgtacacatatagacacgtgtgtatgtttttgtgtgtatatgtttttatgtgtatctgtatgttcctttctaaatagcattctatttcataccttggaaaaatataaaattaaaaaatgaggtcaagatggcgccttttaagaaataagttgttataacagttcctttcagcttcacatcataagtgttaagaacacttgagtatttttaatgtaaacatattttagcatctatttgatttttactttattttcttgatactttcagatatatatttgctttacattattctcagggtttcttatttcccgaaaacactttgaatcatttccactgattctttttcctcccttgttagtttacatgtatcatttgtatgatagtgtctggaagtaaaagggcacttgagaaacaaagttgaataaaatttcatcatacttaattctgaaaattgttttctgaaattattagctcactgctgaaatatcttcagatcaaacgttcagaacatcagctcccarggagcttcatatttagtttatggtggggtatgattgtgtatttcacaaaattcatgaaggaaatttgtacaaatttattatggattttaggccagcggaactgtttaaacttcctactctatttgttccrttgagtagccttagagttgaaacagcagtttccatttttctcatgggtagatcaacccatatgcacatttatcattgatttctagcactggaaaagcatagacattggagacggtggtcgggcacggtggctcatgcttgtaatcccagcactttgggaggccaaggtgggcagatcacctgaggtcaggagttcaagaccagcctggctaacatggtgaaacccagtttccactaaaaatacaaaaaattaactgggtgtggtggtgcacgcctgtaatcccagctacttgggaggctgaggcaggagaattgcttgaatccgggaggcagagattgcagagagccaagatagtgccattgtactccagcttgggcaacaagagtgaaactccatctcaaaaaaagaaaaaaagaaaagaaaaaaattggagacagctgttcacgtatttaaaggagggagaatattcttggagaatataattggtgaaataaaaatacaattcatatgtactctatggaagataaactgcaataagcaaacctctttggcagattttaaaatcagaaatatattccagccagtgtgggatattcaatctaatttcctttgagaacctgattctgttggattggtaggcattaggaagcaacagctcttctctctccatctcctcaaaaaattgtaaacggaaatgttgtatgaaaaaaacttcaaagatacattctaatttttttcttttgctattttaataggcttttttattttttaagaactgaggttagtgaacatgtgagagaatctgaagtacttttcatatgtttttgtccttgaactgagttatttgaatctggcaaatttctctattaataattacaattattatatcactatgtcagtatgtgtgttatattcaatctagaatatttgctctttttactcccatggttttgaaataagcatataggcatttaatttttaggagttataaatgtccaatagctatgttttatatcaatatgaactgcattgtgttttattactaatagtttagataaatctgtatatccaaattgtgaaccactgaaatgaataattccctttcttagagaaggacatgaatatagtgagagatctgttactttctggattcttctttttggtccttcaagaagttgtacaaagataatatcgatgttctcttttattcatcagtttctctcaactggtttcagaacattgcagtatcagagaggggaaaaaaataagtatttcagattttttttttcttgagacaaagtctcactctgtcacccaagctggagtgcagtggcatgatctgggctcactgcagcctccgcctcctgggttcaagcgattcttatgcctcagcctcccaagtagctgggaccccaggcatgcatcaccacacccagctaatttctgtgtttttagtagagatgaggtttcaccacgttggccaggctagtctctaactcccagtgatccacctgcctcagccccacaaagtgctgggattacaggtgtgagccaccatgccctgccaaaaatcagtattttctctgtatcacactcccaacctttaacattgcctcccattctttcttttggctgttatttaatgagagactactatgggtaggacattgtgttaatctctgggaataagagaccttcatattcctgctattatggagttgcggtttagtagagatggtaggtaagaacatgggctcctgaattgcaatgcctgggttctgttcttggttgtggttgtactgcttactagaaaagttgaagaaatcacttcattatttgtttgagtttccttcttgctgaaataaatataactctatcttaaataagataatgtatgggttaaacaatgcatgtaaaacatttggcactgatgttagaaaagggaacatacaggttagtatctctaaccatgttgtaaaagtgatttgaccagctgtattcagttataaacattttattgcacttttggagccttttccaagtcctgtgtaacctttggaataccctctgttcacctccccccaccaaaaaggctcctgtaagtccatcacttcttggaagcttcctcatttaacatcccctgtctagccattcctatacatgaagcagacacgactccttggtatgcactgtgcagtaatgaacagttattccctccttgtacatgttgctaatgtggattatttatttgaattctgactctttgggatccctttgtttataattttaagttcttagaaggatagggaccacagtaatctaccttggtctatgtgacacttgcacctttagtattcaataattgaaacacataaaagtgatttcagtggaggtgagcacaagcttccttttttcactgtgtgaatagacatagaggtgaccacacgttttttcttgtcttgctttttcactaagctttctctgtgattgagaacaaacagggaagtctgaacggttccctgttattttatcttttggatgtagaggcatacatacaaatttctgttgaatgctttgtaagggttacctcatttattcttaaacttttacacagttactgctgtgtatttatgggatgcaggtactgtttatccattgtaattatagttcgtttgttagaccaaacattgggaaaatcttttcttgtgaatggtgattttctaaatttttacttttgttttttatttgccagattctgtctctcttttctttgttcttggtgtactaatctgattcctcttccatggctattccactttttccaagtcttaccctaaagccttttaaagcgatacgtttagatcaactttttttttctttttgtttgtagtttgcacattatatgctgtactttgactaatttaataattttttcttataattccatgtggaaattttaattttagttttgttttcccctgacctttataaaaacaagagattaagtgtaatattttctacttactgcttcaggctttgtaaatttggcacttaatggtttcattgttttagaacagaaaagattatcttaactgaccactaacaacatagttgccagtttggcgcaccaaatctgtagttaatactgatttcaaaatagtgtttcttggcaaatcacaaccaaaagcttagaatattctgtatgacttttagttctaaagtaccttgcaagtattactgttaatctcattttgtagcagaaataatagaccaggagcattaaaaggacgtatttgtttattcatatggctagtatgtgtggtactactgaactgaacccatgcttctgcctagttaaatggtctcaaaacactaagaaaaaaagccaacgtataaaattcaatagcggttagtagcaaggaatgagtgttatctgaagtcatagcgtgcttgttaaagtattttcaattaactttctccasgcgtctcttaaatatatgtttttgtatatatttacagtttttttggacagatctatttggcagtcttctttaagatattgtcagctactcattcacaagaatggtgacatcttaattttaaaaaacattttatatagttactctctttattctggtgcaataataatactacacactgggtaaattgtaaagaatagagatttatttgacccatagttctgaaggctgagaaatctgagagcaggatgctggcatctggtaagggccttcttgctgcatcattatgtggcagaaggcatcacatgaagaggagttgtgcttagaagacagagaaaaaatcggggccaaacttattctttttataactacctacttccttgataactaactcactcctgcaataacagtcttaatccattcacaagggtggtatccacctgacctaatcacctcctaaaggtctgacctctcaatacatttgcaatggcaattaaatttcaatgtgagtttttgaggagacaaaccatagcagttatgtattttgttaaacttaagcattttattctgttaaattatgtatgtatttatatatatatatacatatatatacacgcaagcacacatatacaggcatacttatgtgtttatatgtgtgtttatagatctttttcytaggaagataattatattttaaaagtcattgatggtagggatgatagcagaggaagttgtgaaatacaatctaagtaatattatagagcatacgttcagtattttgaaaactgctcaataagggtatatttgttgacaagtaatagatcacattacaaacttactattagacattgtttatctagtcagcatttatgaatagtctgtggtgatctgtgtgtttatattccacatacagtctatcaacaaatcctgtcatttctactttcagaatatatgctaaatgcaaccacttcttactacctttatcactgccaccttatttcaaaaccaggttttacttatttactatacgatcttgtccaagtgtttatagtgttaggatttttcttttcacaatcattcgtcataggtaaagaacttatttttctctcacatggtacattaaaaatagaagcaagcaagtaattgtctttaaaaattttttgctttgcctattattattcctctagaaaagataataataatacatagttacaagaacatttacattgaagaaggtgacttaatatttgaaattattgtgtttaatattatttcggtttttattaatgcttggtatattttgttaataatttaaatattgctaaattttggaaaaaattacaatggaatcattatattagagttcttcagagaaattcaaccaataagggatggttatatctctatataattatgtttatgtgtgtgtttatgtatatgtatgtatatttgtatgtatatgcagtcatgcatcacttaatgacagggatacattctaagaaatgtgttgttaggcaatctgatccctgtgcaaacatcatagagtatacttacacaaacctagatggtatagcctactacacagctatgctatatcatatagcctgttactctaagactgtaaacctatacagcatgttactgtgctgaatactataggcaattgtaaaacagtggtaagtatttgtatatttaaacatagaaaaggtaatgggttgcactaccacattatgatggctacagcatcactaggccataggaaattttggttctattttaatcttatggggccaccattgtatgtgcagttcatcattgaccaaaacatcatyattcagtgcatgactatatatatatttgtcacttattagcacattaatatggatttgtataaataaatttctagtaacgctcaaataacatacatggatgcattttcaattgcttctcaaatatatggagtattttaaataagtagattccaaaragcaaaacaagtttaataaatgtctatttgcagctacattacacactcatacacacacatgcacacgcacactctctcacagaggcagtcaactgttcatgaaatattaagattatattttacaatgatatttaaaacttgaaacatacatacaraacaatgaagtgtgatagctaasagcacagacttggatcagatagaatgacatttgacttccagctctgactttctgagccttggttttcttatgtgtcaagtaatgataatacctgyttctttgtgttgattaaatgagaatatatgtaaactacttgccatggtgccctgtacacatcatacacagtaaactattaccatctgtattttaattcttaattycttcccctgaacacaacttgataaatattctttaggtttctgttcctcctttcaaaagttgatttaattcataatgtaacttagcgtaatataaataataccatagaaayaaccatctgtagcagtggtttgatgggaaaatacagtcacagctacaatttgataagccaggaactgtatttttccctcctgaagttataaaagtagaagtagtaatcctctctccaggcatccttttatcttttgaagaatagaagtaaatatatctacatatccaagccagtggtagtccttctgtattggggctttttgcagaggattggggctttttgcagagcaggcctgcaaggggaatgaatatcagaaatgaggttccagtgacagaaggtactgaaatgctgtgtgtgtgtgtgtgtgtgtgtgtgtgtgtgtgtgtgtgtgtgtgtgtgtgtgtatagaatgtgaggggggttggataggttcatgtgggtgtaaagtgaagagataggccagggtgatagatgtatagaacttctgattttaaaataagcatgtaagctgtatactatttaatgaaattactwttgacattttattgaagttaaataatgaattcatcacattttatgagaccaactttaagaaaactagctggatttttaatggtttgcttcaacttaatagtggtatataacttagtacaaacatcgaaggctatcagaaaatgtatgttagaattttaatgattatagaaactgtggaatattctgtatatatctgacacttaaaattacttgttctggggtatccataataaaatttatgtcatgtggttttttgggtcagtattttcaggtataagcctggtgtgtaacagtgaatgctcttagaagattgggtctgtatcttttgtctctgtaaattacacaatgataggaagttaatatgttagggatttaataagtatgttaatgattatctataaagataatatgctttattttttgattggtttgtcatattttattggcctgctttctgctagaataccattatgatataacttgccaaggagccctagggtatgaaaaaacagtcttccctttttaattatgagaagttcagagaccttctgaatatattaatgattactactaaagcaattcttaataatttttccactaatatgagttgtaaagatgccagactcaaacagatgtgaatactaggctcccttgctagttgagttcttgttacttcacatcagtcttacagctttctgttagtgtgagtcacatgtgggtctcagcaaaatgataaattagcatagaccctggacctctgggtcatggtaaaaataatcactgaatattaaggatctgtgtaaagattcttaacctgtatagggtctgtgttcagaagatctgtgaaactcctgaaattgtctgccacattttgtgtatacgtgcatacacattttttctgtgaaggatatatgagtattttcaagtctgtaacccatgaaaggttaaggaccaacggatttataacctgttcagaagtcttttacattgagttaccatttgccatctcatttcctcactaattgcatattagtgaggaaaaacttagataccatatatttttttattagtcttattttaattttccagaaaatttgtgaccttttcataatacagtgttatttcttctttatgtgattcgtattttagtacaaataccatgttaaggtgcttgataaaatgtgaatgatttatgaaattttacttatatacccaaatttgttgttaaaagggacaaaaaggaatttttttgtattttacattcagtccttttcatggaatagaatattttaaaacaactttggcttgaatttttaattatcatatttagaaatcctgcttttatgaaaatacagaaccctcactctgtggcttacagacaatagtagtatattatgtagggtagcctaaacaatggttgattattgtgtttgtgtatatttcattctctctgaattggacttgagaggcaaactttgtctttaaacctttagctgttgctttctggacctttgtattgcctaagggatgcaaacttcttggaaagtagaaccataaagttgtaaatgaacaagggaagaaatagaaaatataatttttgtcttcattaatgtttctaaagtagacagtaatttcacaattacagtatccactctcatgaaatttactaactacattaatgagcaaatgtgaagctgttttgctaatgtggaaattaaattttttaaaacaaaacttttttattctgtcaccaaagaaagaagcacattggttatgttaataaaaataatagaataaacagtcattcattggatgtttaattgttacaggcacttttacatattaccttactggatcttaaccactgtaagcattaaatggtattgccattttgatgaggaaactaaaacatgtagaagtttcttcaaggtgttctatgtgaccttcaaaaccaggcaattaatgggtgcttaatatttgttaaattgaattgcattgaaatctctttttactctgatcttttcattagtattatcattttttcatttatctgcggttaaattatggcctcaattttgggactccaggcctcagtatacattaacataggaaatatacccatttaaatgtctgctacattgtttcctgcagtgattcttctttttataatcaaagcagtgtgtagcaagcttttatcataatattttggaaaaatacgatctcttttataatcctaactgttagctaagtgaagcagattttctatactttcattcccacttattagtcacaaattatggggctggagatgagttgagatattggaggtcttttctccccagccttctatgcaaatagaggattttcattttttcttaatagtttgtggtgtttttcctaaaaagtaatccttaatatagtttttacccatattggtttagtttcttttgagagaaaatatattttattgatatataataattatacttttggtatctctcattttaaggtattagcctcatttttaaatagtgtttgaatcggcaaatgggtaaaaaatttgggtgttatggaatataagaaaaagaaatgaatagttgtatagtcaacattttatacagatgtaagtatataaagtttatatcaaagaaaatacttcaaaatattttaagtattatagctagtattgatgcagtatggtcaaattcatttagtgagggagtcattactgctacatctagcttttataaaatttgaaaaattcatgaatattatattaaatattttaccactttgggaggccaaggctggtggatcatgaggccaggagatcaagaccatcctcgccaacaaggtgaaaccctgtctctactaaaaatacaaaaatgagccaggcgtggtggcgtgtgcctgtagttccagctactcaggaggctgaggcaagagaatcgcttgatcccgggaggcggaggttgcagtgagctgagatcaggccactgcactccagcctgggcgacagagtgggagtccagctaaaaaaagaaatatatatatatatatatatatatatatatatatgtatatataattcatataaatatagtactttatttaaaaataaatagcattttctcctcttctcatttgtttatacttttaatatgttctgtttacttgtaatcaatgtggagtcttcttttaaaaaaaaaataacattgctgttgtgaagaaaatttgcagatgaatattggaaaatatactgaatacctagaaggaaaataatgttttttgtccttcttaatatagaggtcaaaatagaaaagctatttctaaagttgccattcgtgggaaaggaaaggccttatcatttatagaatttgatatcagggaacagttgttctgaagtaaaacaatccagaccattaccacattgataattttctccaattagacagattagaggtttaatcctaaaagaaccccagtatccaatatttttgcctacatctttaacattaaggaaatcctgtttttaaatttatatttttaaccattacacaagatctttattattggaaaaaggacagacgcaaattaatcagaaaatttctcattgaggaagattgagtttttaaatgtatgttaacaaaaggtagaaaaactcatcacacttagcatgtatacagtacttatatggactagaaagtttgttcttgtgctttcagtagaagcataaaacaaatctgatgttgtcatagagatagtttcataataggttatgtttttgtacaagtcccatattttcactagaactattacaaacattacagtcatcagcagatgttacacatgtctagcatagaaatttctttttttgtttttgttgtttgtttgtttgagacggagtcttgctctgtcaccaggctggagttcagtggcgcgatctcggctcactgcaacctgtgcctcccggaggttcaagcagttcccctgcctcagcctcccgagtagctgggactacaggtgtgcgccaccacgcccagcttatttttgcatttttagtagagatggggaatttcaccatgttggccaggatggtctctatctcttgacctcatgatctgcctgccttaggctcccaaagtgctgggattacaggcgtgagccactgcaccgggccctagcatagaaatttctaaagtggatataaattaatcatatcaattctaaattacagtttagttaacattttttaacctgttcttcagttattacactgtatttttagtccaaaaaaagatgaaaggatttatcaggatrttttgaggggatagatttttaaataggtcattttgaagatacttttgagtagacatagtcattacatagtcattaaaaaaccagagctttacatatttttataaaataatttttaaattctaaaagtaataaatgaycttagggaagatttggaaaatacaaacaagtatgaagaagaaaaaaaraagtccccscaatcccactgtgcaaatcaaccactcttttttttttttccaagccaaactgtatccagctttattaaagatactttccakaaacagtcgtggtatttcaggcagaacatgggcagacagtcattaacagtacacaacaactttcaaacttaactaccttcttcaatggactaccgaaaatcagaaagccactataaaacccaatgaagtctkcatctgatgctctgaacaggcaaagtttagagtgagggttgacatgtcacatttagcatgttgtttaacaacttttcacaagctgaccctgactatcaggaagtgaaatgaaaacggcagaatttatctgaagatccacaatctagaaacggaaccactgctcttttgacaggtgccatctcagtggcatcccggaaaagtccagattgcctgacacrctggtaaccaatgactggaggtcaggtcccaacagatgtctgggcttaagggagttaagtctgtgctgatagatgggaagggagaagagagataaaaatgattttgtttttccataccacaaggcttttgtgycaaggtggccatatgtgtcaaagtcgcggaatccctcctgggagccaagagtaagtctctcaaaactagaagggaaaagtgttttccccacatcaatccagcttcgaagacaccctattagtgacatatgccccttccccacaaaacaacaatgaagtgttctgtgtgctaacagcatagctcaaaaaaaaaaagtaaaacaaaattttgcatttttataaaacttggtaaaaatagtatttcaaactgtttagtcaccagaagtacacagttatcaaaaatgcacacacttctcttggcacctccagcaccttcagctttctgtgcctgatctgttttgacatctccattttctgcagggttattcccctccttgccagcatcagcttttccctttctccctttgggtaccttctctcccttctttgcaggggcctttttaggcctgggctctggctttggagaagcaggtttagcggacaaccttgcagatcttctctgtggttcgtcctttaccttggctttatctcctttagcatccccttcagcctttctcttgggcatggtggtggcagtgatggtggtgggacataggcactgggcgtaggatgcagaggcatgtgggctttggtgagtccaggggtcgttcttgcctcttgttcatactgctccaaatcaaccactcttaatagtaaattctttataaatattgactattgtgtacatttaagttgtttattacttttcactgttaaaaatagtttttcctcacacaatttctaaggatgcttcctaatgacagcaaaatgcaattttctaaagaaatttatccaacttgataaaaccaagagtcctttacttaggacaggtatatggggtagtggtaagagcttccctaatccctgtttgacacaaattttcttggaagcaaggaaagtagaaccatattcccaagaagcattctcttggtgaggcagaatagaagaaagaataaatactatgagaacattttagggacagtcctgaatagtagtcgagtagtaagggctccaaaagaacttacattccttcctttgtcactggaaaatcccagttagctttgaatagggcgttgactctacccccatattaatatttttagacagtgttatagattgaattgtgcttcctcaaaatttgtatgttgaagctgtcactcccaatgtgtctgtatttggagatagggcctttaatgatgtaattaaggttaaatgagatcataaggatagggctattatccagtatgactggtgtctttgtaagaaaaagactagctaccaggtgtctgctttaatagagaaaacctatgagacaagaccatctaaaagccaaggagggaagccacaggagaaaccagccctgcggacaacttgatcttggactttcagcttccagaactgaaagtctggaggctgttgttgaaaatctggaggctattgttggtggctgttgtttaagccacccagtctggcatttcgttaatggcagycctagcaaaccgatacatacagttttctccctttcccttccccttccccttcccattttagtagtagtgcagtaggcagaataacagctcctcacagatagaaactgctactctgtggactgtgtaagcattaccttaaaaggaaaaaagattgggagactatcccgggttatctaggtaggccataagcacaataataaatgtccttataagagagaggcagagggagatttgacacagacatacataagagaaggtggtacgatcactaaggtagagactgggataatggccacaagtcaagaaatgctggcagctagaaggaggaagaggcaaaaagcagatttccaagagggaatatagccctgctgactccttgttttctgcccagtgaaactattttggactttgtgagggaatgtatttctttttgtttaagctattgagtttgtagtaatttgttttcagcagccataggtaactaatgcaaatagctgctgaaaataccaaatacttttctgtgtctaatgatgtaatcttatggttttgaatcatatgatgtttgctttctaatttgtgaaaaaatcatatcgattactttgctatttttttgtaaactgcctctttctggtatttttttcaaacactgatggatttgataatattttgatagagttttttattaaggaattaaatagtctctactttttcttttttatactgtctttgtcaggtttgggtcataaggttatatgttaaattgttttggatacatagtcggagcccaggttattctwatcttgaaagtcagttatcaaagctgaagctttctatgatagacaattgggagataattttggttcttaagtagaagaaaccatattaaagtgtgttttttaagataataagacataacagtacatccaaaaattgtttgtaggtacctagggagcaaaatcaggcataaagtctcagataacaatctaggtactgagtttctcaaacacattctgtctcattcatgttcttcaggagtgaagactacgtgaattgagttttgggggatttaatcaggaagtaaaggaattctaagcccctagagaatgtcacagtagatgactgagaggtgatcatgtttatcttttccctgtaattcttttcattccattttttttttctttggaagaggtgaacatcgtagataataaactttgggagtgttaggggatggaagggaacatgtctgtataggtcagagtttctgaggttggtagccttggactttttgtgagagaaagaagagtagagttataaggatccagggatacatatgcaacccaagcattgtataaacactggaaaaataatataactcacacgtctgttattccacattttcaaatgtacttaattactttgtaaatctaaatcatcaactgaaaaattatgtttctaaatttgtggcacctgtagttaatgctttcaaacaacaaataataacagcttatacctattaccctatgggaatctgtagagtgggtttaaaaaattattttaaagggaccatcttttaaatgaaaccctccctataaacttataaaattaatcagggaagaagggatggggagaaacaaaaaccaagcttgcagcacattcagcgttaatcactaggtcaggcttgctctctggtctgcttcttcatagttgtttggtgcctattgtcctacgatcacaaagaccttagattataattctccttaactgctccatagaaaacaacttgaacattatgaaacattaagttttccctttgagatactcttttttttttttttttaactgttccaaaggcacattggcacctttgagatacactttcaggtcctgcataccagtgaaactacaggcaccagctggtctgacggtgagctgtctcagcaaatgcactcggtatcttcatgatttcatctcccttattccaaccaatcaatgaccccaaatttccagccccttgccctctactatctccttaaaatccccagcccagaactcctctgggagatggatttgagggtctcctcccatctcctttctcagccaccctgtggttattaaattctttctgtgttacaaaccctgctatctcagtatattggtccgttactgtagatcaggcgtacaaatttgttggtcttgaatctaaacaccagtcccttaatcttattactgaggatactcttggctatgtagttactcatggttacattgctagttagttacagaaccctggtgagagcctgtgttttcaagatctcttagaaatgctgtgaagaaaaggtcttaggtttaggtcttagtagtaattatttggtttgactttggaaaagtgtagatacctgcatctcctcactgtgggctatgcacagatgaaatgtagcattattacgttttgaaaggtgcaggatagcttctgtttttcaacattatgctttagttgttctagccaccattctttatttaaatgagtaggaagccaagagcaaagtaaagatggatttttggagtcctttgcttattttcccacattttttcttaccagagaacacataacatagacaggtagataggaagggagggaggtagataggcaggcagttcaaccagaaaaaaatcaagcctgttttagcaggttgtgaaaagatgaactgaatctgtcaatgtccgcatcttctttagttaccaggagtggatgtgggtaagccttggtgcagcagataatactgataagtgtatatgttccaaatagagatgtggtcataggaggaaaaagaatgttaatgccatctgggatgttaagaagttagggaaggacacagagcataaytgagatgaaattgtaacttcttactctcttcagtgatagtcaaatctaatttaagtctgttactctrttctcatgaaaacattctcaagagttgaagaaaataaatagtaaggcagtctgtatggaccttaacaaaacttagttttgactattggaattaaattttaatattttaatttggaaatctcatcctgaaatctcttttggtaaaaacatggaatctttttagtatgaattagaattattctggtcaacaattatagtttctgtacccattagggtatcaaagtcttatattcaaattatattaaattgactmaktgactcatctagttcagtgggaatatgattttagaagtagaataaagtctacttgtatttgtaaagttgacacwatgttttatgagggaatttaatgttcttttcaggaacatgaggctggacagaaagataatcttacaagaaattatctcagtttttcattttggccttttgttcacaaaagagctagaattcaaaagaaaacaacatttagcctatttatttatttgtttattattttttgagagggagtcttgctctgttgcccaggctggaatgcagtggtgccatctcggctcactgcaacctctgcctcccaggtttaagcgattctcctgcctcagcctcccaagtagctgggactacagttacatgccaccacgcctggctaattttttgtatttttggtagggacagggtttcaccatgttgatcaggcttgtcttgaacacctgaccttgtgatccacccacctcagcctccaaagtgctgggattacaagtgtgagccactgcgctcagccgccctttttaatactatggttattttagttgatatcttcagattgctcttgattggagtatataaaatatgtcatagattgtgttattttaattttacttgtctatgttcttatttctttgaagttgctatttttcactatattttgctgtcacctataaattataaatattagtcttaacagaagtcagatattttctatattggatttttttttgaaaaaaaggagataggataaaatgtaaggaaatcaaatctaggaactaatttagaaaagtcagaggatttttatttagtattgagaagtataagataagttaaatgtatacaccagagaaaaaaagttcttattacaatgtaatatgtggaacaaaaaaaaatagtaaggatatggctatctatattttattttaatgtttatttaacaaatatttactcagctccaaattaggtactagaaactgtctcagactctgggaatatatttccacacatcctggtcaatgaaacattaaatttctaattagaaattttagaagttctaagaaagcaaaaagctcatggtgcttttggaacatagtccagggakatttaacctaatccagagaagctcgggaaaaatttgtgccagactataagrtgagaccgtaaggttgagtcagagagggacagaaggggtttggagagaatgttattggagtgtaggaatagtatgttcaaaaactctgaagcgactataatgtattgtaagataccctgaaagaagttcatgatcgtaggagtggaggcagtgagaagaggtgaagccagactggaatggttcaaaggcaacacttgaaattacctgattaaaataaggcactcaacatagccttaagaatgaaggttattccatttggtattctttgctgaactgcttaacagtatttttatgtttccatgtgctgaattcattttataaatttttttaaaagtaatgcatgtgtttggagcagcattataagaccatggaaatggttttactgtttgtctcttttacgttttttaagaacaaagcttccattttccacttccatctcttggactattcatttaacggtgatctttctgtttcttaatccaggttctaaggattctggggttggtagtttaactcttaatccttttaaaaaattgaaccaatgtatcttttcaatgagaaatagttcataaatcttgctactcaaataaatcatgagtctatatgaggacttcagttgggaattcgtttattcctgttcactagaattaggaaactctatgtagataggagccatctctgtgtttacttactgtctctacagttcccagccattgcctagtatattaatccatttttgttggtataaaggaatatctgagactgggtaatttacaaaggaatgatatttattttggctcatgtttctgcagactgtacaggaagtgtagtgctctcatctgcttctggtaaggcctcaggaagcttacaatcatggtggaaggcaaaaggggagttggcatatcacatggtgagaggagggaacaagggtccggggccgcggtgccgcactcttttaaacaaccagatctcatatgaactcagagcgagaactcatttattgtgaggacagcaccaagccattcatgagggatcttcccccaagccccaaacacctccctctaggcccacctccagcattagacatcctatttcaacatgaggtttggaggggacaaaacattcaaaccgtatcacccgggatattgttgatgaagtatttgttgattgaattaatactaaattttgttggcattacattttattttgactttaaatgctgatgagtatttgatagttcatggttctgtgataacatttaggcttgtagtgaataaaacattacaatattgtttaaatcttttcttttacatttaaataaaagatggataagaatgttactttaacattttatataatatcctttaacaatctgtaggctaatctttagtttatggggcttctaacccataatgcagttgtactgattcttttgccatttccaatttgttgctgtgaccatttggtgaatattttatttcacttattatactttttagatctagagttttctgtttttgttgtttctwtttttctcttgagatttattctgtgttcactcactgatagcatatttttcttcagttctttgaatatatttataatagcttttttgaattactttacttgctaaattcaatgtctgagcccagttagagtcatttgtattgagtgtattttttcttaagtaatttcctgaagactttcctgtttgtttttttggggwtttttttttttttttttttgcatatgtagaaatttctggttgaaaactagacattgggaaacatatggtgaaatgactmtgggttctgtcatattcttttgaggaccttggttttttgttctagtaggcaattaacttccttgggttgaaaccacaaactgtctcctgtgaggtattcagcttacacctttcctctgctgctttgttagcctgaacacctataggtcccccttgtatatgcacagtgtggtagcccaaagattttggcagatgctcatcttctttgttgtttctttgtgtctcagaatttcctcctaattgacagtagccatgccagctttgggccctatactctgacacatcaagcctgtctagattcatctttctaccactcaagctgtaaatgattgaaaaatgttctcagttaataaaagaatcacagattctaaaatcttgtttttttttttctctcttcctgctttttcactaggcttcataggcctcccttgctcatgtgtaaattttgttgtcagctaggaatttgtgtagcttgtgctctgaatttgagtctcgtgccttctgtgattagcttggtgctaacatttttcctttaaattttcagctctttttccagctctccactccaagttctagcatctttagccagtgcgatgccatttttttcttctccttttttgtagctgtagctatggagtttggtcagtgccttgcagccagtatgaactctcaattcttaccccttctagttttcaaaataaaactctcttcagccttatgtctgcatttgaaagtttgaagtatcttcaagtagtttgtttgctttaatctagtatcttattattggtatctctggggttttgtatgaccacgtcagtttttcagcatgatcagaagttaaactacttcatccctattgatttcaaatagtacatttaaaacaagggcttctaaacattcaatgaaattcaaatgatgttttagacattaacttacacctcaactcttccaaatttgtaagttcatgtttacactttgtacttccctttttttttttttttttgagaacagcaaattatatttmagctgatggactttcctcagtttctgttaattacatgtgtgtctctatttagtagtgcatttagagtcactatttttcactgctgcagatatctagacatttgattggaaaatagttcggcattgaacttagtagcaatattgggggacttgggactaaaaagcaccaatcaacttagaaaaccaagccctgtagtaacacaagggaaaaaaaaaattcctgaagccaataccttgggaaataaagataatagaaatgaaatcatctaagtagatggccttaatatttctggacatgttccataaccctcacaggtaacagtggactggcatctgggagacaggacaaaacataaatgtggaatttcaaggatattcctattttctgttaaagttgcaggaagtatgaattactaaagactttacatatggtcagattgctgagtttcagtttcaaatattaaacactctttttcagacgttctcccatttsactctcatttcatatgagttcatattattttatgccccaggcccgaagtgtagataagtttactgctccattgtatactgtttatctgattcactctccccctcttttgccttctggtgttacagagtggtaagcaggaaagcagggtctgtatctatctgtgctataggttcactatccttgccataaattaagttgatcrcttaaaaagtatcactactttagcactagatttagctcgcttttaacagaaatttcatggtgatcttttctcatttcaaggcccttgaaataagggccttgttttctcgttaatggagcatctcattctccttcaacagggcttgatttcctttgaacaaacattattcttaccaataattctgataactttctggtaatttaattgtggttatccagcctctttattctccatcagttcattttagatattcttctgatttccttttgtctttcacaagatctttgaaatcccattttctctacatctttaatatgacctgaaaaaaatgtttgttcaatttatacatcctgccacaaaatagtactctgcttcaaattccacatttatgttttgtctcctctgccacaggtaataacccgtccactattacctgtgggggttatggaacatgtccagaaatactaaggctgcccacttaggtgattttattcttattatcttcattttccaaggtattggcttcaggatgttttttctccttgtgttttctgacttgattggtgatgccgagcattcacacagcttttcagtttctcagcttagaagcaaggaatgttaaaaagttactatcagtgcctttaatcatgaaaaagacaagtagaaggaattagttctctcacccagggacatcagtgtgtatgtataccagtgggaaccagacatcgtgtctaggtaaaatcacttatcacactgcagctaattttttcacctggtaattttagccaaactaggtcatgttataaatgtcagcaaggcaaaagagagaataaaatgtcatcagaataatgcacatacatttcaatggagcttaaaatcttttataggaaacaggattatgaggtaggagatttttttcattgcagcagtgaatgtgaatacagttactatgattcttaaggtattcactttggcctcattcctgctttctttaaattagaaaaaatatctcaagtttgcttacaggtaagagttttaagccaaataaataacagttattgtagtgatttggttgaaaaataaacttctaattcccctttaaaaactgagaagaaatgaaatatagtgcaacgtcagccacaaaatcattattttgatagctaacatcatttgtattctaggctagaattttaaaatttaaagttcaaaaaataaaattttattcacattgttgattttgcccaatgacacaagctatatgttaatattaaattaatatagacaaattaaagaaagtaccacatttatcactttcatatgtagtaatttttatttcaataaccagaattgtaggtttcaaaaaatgtttgaaaatttgctttaattaatagttttgacaaagaacctttaatagaccactgcttttcttttcaaagtttcagttaaacctgaagaaataatatggtcctgctgtgatttttgaatgaatgcttttgtggttgcataaattgtgttttttcatgaatattaggattgtaaatgaaaattaagtctggattctgatccttttcctttcaagcttattaaaataagatcttttaggatcactgtgactctctccttgttagttttatgtcataacttagccctgattataaacaaactttaactgtttcttaattcagttttttcttttgtcatgagcaaagaaaaattactgaaataaataagcattgagacatattcttgtagttgaaaacttagtgtgggaatcatatttttgactcccagctcaggatagtattaggtagggtagattattttatcttcttgtaaaatagtgtaaaataaatatttgcctatagacattacagtttagagtagagaagtttcacattagaaagatgctgattcgtctttacatttaggcataaaagagggagtacatagagagcatttataatttatctactttaaacataattattttttattatttccctttgcactatttttaatcctactcatagaatgaaagatgaggcattgaacttgtatctaagattgatgatttgttttgagtctggggcagacagacacagtaatggcttagtctgatacaggcattttgggttcagtctctagggacaggtattcatatgtaataaaaccacttgaactggcattgattgccattgttgataatcctagcaggatcaacattgattgagtaaataaaaagatcgaatttaccttcttctggcaaggcaggcagagaagcaggacaaagcataaagacttgacagcactgtagcattacctctattcaactgtgcttcagagaaaagaagtggcaatgattaagggtactgttcaattcagcaagcaattattgagcagttctgtagcacaacactgttagctgctaaaggactcaaaaggagaagacagtatgattttgcactaaagtagtttatcatctaaattggaagacaaacggttcatatgtgaaacagctagaaaacaaattatgacagtatataattgagtgtacagttgttcatgcaacagaatacaagcacaatttatttgtccagcaagtgaaaagatatatctttataatgtttataatgttaaattttgtgtggcaacataaagtaacatagcctgagttaattcaggtctttggttatttaagatgaaaaaacccccagcaatttaaatggtatttatttaaaatatcctttattttatttatcgtcctttatttagaccacctaaaaacactagatatatgattattcatacctgagccccccccaaaaaaaatcaagactagcttactccctgttaatgattcaatcaattgagtataaactttattaggttttgttcactattgattctttgcctcatatatcataaaggttcattctatctattttgcagtattttccaatgtctaggtattctgaattatgttcactaaaaagtaggtctcaaagagcatcgtaatctccttagctttgtataaggaagccatgtaacaaagcagccttactacgtttctgtttttgcttttgttttatttttatctccattacttgttaagtggtaatggtgtagtagcatcttaaaataccatactattaagattgagccggggaaccttctcctattctttgctcttcagatatttctctactgtaaccccatagctcttgaacatctcatgacatatatcattgtattttaatttaataaattcatttttctatgcactagactggcttctttgcattataaccaggacttcacatagatgctggtacctcatagatttctaataaatacctgctgaattaaggaaacacaaatttatgttctacatcacgatgttagtgaaaatttgttgctgtgtttatttctcacaataaataaacatggggtgcctcctgtagtagtgtcctatgggaatcaattattgatacccagtgatgtagacaagttgttttaaaaaagaaaagattgaaggaaagcagtctcctcttttaccagcccccacctcaactatataattttaagaaaattgatatcaaaagctgtgatatccgtttctctttaccatccaaagttcttgaagttgccttgacaagcagagattccttgaatcagtccaaatacatgatatatagataaataatacgtgtgtgtgtgtagacatctttagtagaaacagcttttcagatactgatttcatactgtcttcctcctggctttccattgacttattgatttcagatacagtttcaaattgcatcttaattgtggggagtggggatagtagctagcctctggctcctcttttttaaggttatttctgagactgccttggagtggttcaaaccagaataaatgcagtttactgcctatcactccatactcttaagatggttttgccagcttttagagcctctcagatgttctaaaataaggtcaagctgattctacatcctattggtggtaggtgttagtgatgtcaatttggcacaatgtttttgacttgagatagaatcattaatccagggatatcttgttaataaatttaccgactactcacttggaatttttgatgtagcagtttttaataatatagctttttcatgtcaacaagagtacattctgactgattctatttataaaagtatgcaatactaatgtttaatattagaacagttagcagtagttaactttggagaacaaaaatggtagaggtaaggggtcagtaagaggacttctgaggatgcaggtaatgtatttattcagcgagtcgtggttatatgggtgtgtttattttgtagtaactcattgagctgtatgattgctatacttcactaaaatctatggagatcaaaggctactttggcagctttagtctaatgacaaacttattattttcttaaacaatgggcaaaattttcttctgactttcagattcctacagtctaaagggaaagataaaactattttagtatgatagctaaaatgcttttgctcttttaaaattctcattataaagtgtattgtttattttaacttctatatgactgttattggctacttaaaagtctttaaagaaattaattgggaaataacagttgaacatgaatatgggagtacttacttcaagacaatccagaaaaaaaaacaacagaatataaaatgtaatgtttaacaaaaaacaaatgtcattttgtatttaaagaacagtttaaggtatgtttaaaacaactacttctgaactgaatgatactacttctcaccccctccatggcaaaggggtcatctaaattagttgtagtcagctgcaccaagctgaagagccactttacactgaactgaattttgtatggaagctggaaagaaccacagactttactaccacattctaattggcaggaaccctgcttctgatgctaaacagcatgtcaggattgcatactgtatcaatttcagaagtccaagttacatttgggtttattgtttatccagccacaagtaagctgccttctgtaacttacccattggcttactgggttatgattttctaattagaaatggaggactttgagatgttaaaagtgggggcccaataatgagtattgcactgcagatacacagactgaatatcactgtcctaaaaaaaaaaaggcttttaaattgaaatatcaaaatcatgattaaaatcaaaaggtaaacaagcaagataggataaattcaatccatggtgttggtaccagtactcttcacgtgaaaaggacctcggcataagtgttcagaaataacaaagatcaaccagcttggccaacatggagaaaccccatctctactaaaaatacaaaaattagctggacgtggtagcgggtgcctgtaatcccagctactctggaggctgagacaagagaattgcttaaaccccaggggggcagaggttgcagtgagccaggatcacaccactgcactccagcctgggcaacagagcaagactccgtctcaaaaaattagcaaaaataacaaaaatcaataagctgaaaaatgttataaaatttgacgttgaataattcattagacatgaaattacagagtgcttacatttgttgggtactcttttaattgctttacatatattaacttgttaaattctcaagcaacctatgagatacaggacaagacaaagagaagttaagtacatgtagaaggtcacacaaatgacatttaaatccaggcagtctgattgtaattctatgctcttacccttaaaaggattcgtcaattccggctaaatggtgtgcctgaataaaatgtggmgcacggtagcatttataatatttattcattcaacaaatatttatygaacgcttacgattgggccaggcactatgctaggtatttatggttataatattcccccacttatttttggggttttacttttcatagttacctttggttaactgtggtctgaaaataggtgagtacagtacaataagataatgtatgtgtgagagagaaagactacattctcatgactcttattacagtatatagttataattattctattttattattagttattgttaatcttttacagtgcttaatatacaaattaaattttatcataggtatgcataataggaaaaaacatagtatatataagggtcagtgctatcagcagtttcaggcatcctttggaggacttgaaatatatctcccacagataarggggaactatacataacagtttatgaaagtccttgacccttgtgaagtctgtattctagtagaggtctacagacaataaacaaaaaagtaaaacaactaggttgtctaataaaatatttayatagaagctatgaaggggactgtaatttcataaggtggtcaaggaagrcctcactgataagrtgacayttgagtaaagatttgaaagatgtgagaggataaaccacgagraatgttctggaagcagaacattccaggtaaagaaatcagcaaggacaaagtccytgagaagaaagtgagcttggtatcttcatgaacaaggagagagttttaatgaagcacagtaagcaagagggagattggaagaggagaggtgagaggggtgtggtaggacagatgatgtaaagccattgttaggattttagctctcgttttcagatgggaagctatttgaggaatttgcatagaaaatcaaacctcaaaatgttgagagaagggttctagaagaatccttgataactggaaaggtgaagtttttacattaacagaagaggtaaagagtaataatcaaaaataggaagatcttcagtcagtgatgctaatgtgtctgaagagtcagggtccccagtaggggaaggaagaggaagaaagtgaaaggaggctaaaattttcactggcattgtaggtagaaagactagggtttgagtggacatctgctatggaagtcaggtgacagtggaggccaaagtaacaaaagcaggcagggaaattctcagcagcatcagagtaatacaatgaaattcctcatagaaatactatcaaggaaagacagagaaagccattggacacctatgtcaatcaactagggcagctttgctaacgaacacactcttaaatctggcaatcgaaagctgcctgtttaaaaacaaaaaagtaatgaatagcaatgaaaagaaaaaaatttcaattttagaataattattagcacaaggtcacatggacaggaacarttacccattgtttacataaattctcatggtagcaataatgtaatgcatatggctttgaagatgggtaaaattattactttaatacagtaaaacaggtaaatcatgaatgatgtagactgcttgtgccagtatatttgaagtaaagtaaaattcagtgttcaaatggagaaaccattgaagtgtccagtaatgatgcatttaaataaggtgatttggctgcaactgcattcatctgtaaataatttacacacagatcgagttaggaacttccgaaaaaatagtactcgttctaaaaacatccaattggataatttcacttataagggtaaagagtactgattttaaaaggttctcagagtctgttttgtgaagagatcccttaaagtataatggtggcggagcacagggaagagctcacatgcagccgcaggagagctagggaaaaagggtgacagctctgctaagccgccacttagaaaagagttggataagagcagtctcttcagagtctgacacctttcattttacggaaaaccttcacctagtctgtctatctcttaccagtgaacttcttcaaatgtaaaggtgtttgtaaaaggacataaaaatcaatcatttgtataatataatttcagatctgtgcctttyatatatatacttttaccacttattttttccatctgtgaaatgtgctgacacctactttaacaaactgatacaattgagaagagasagtgtgggctgctaataagaagctctcagtcaaaacatagtcaaaaacagagaacagattgataatgaatacttaattctttttaggagtgtttttggtcctacaggattcagaattataaaagctgtaattccctttggctgcaaattgtaggmatgttgcttgcttgttacatttcgagttccaagttgaatcagttgctttcttgaacagttgaaaagstgtcatttaagcatttcaggtatttcattttcctgttacaatcctgggttagatttsctgttacttagctctcacctcttcatctattacagttttctccctcatttaattggagtatatcctcaaagatcttccacagaaaaggcatactggagatacaatttcagagttcttgaaggtctgaattatctgtttgctttcatatttaatagatagtttgggtatatagaattctgttttcaaaatcattctcctatagaaccttgaagacatttcctccattgtgtcctggaatttagggttgctgatgagaaatagaattccaatttgattcacattcttgtgttggtaacatctttttccctccttggaatctcttaagggttttcttctttatcttcgatggataaaacttcaagagaatatatttggattcaagtattttattcattcagttcgcttgatacttgctcagcccttccatcttaaaatcaatagttttcttcaagtctggtggtttttaaaaattacttgtctgattttctttctatagcatacatacattatttgtgcccacctgttatctttggttatctttgaacactcttytatatgttttatttgcggcattatgttacttagaaataagaacatcatatagtttgttagaaaaggatacatgttattgtaacagaagaagtagagcagaggaggaaatgtagataaccttgggtatggaagcatccaagatgtcttccagaggataagtaaacttggtacaaccagacaatggaatattattcagtgctaaaaagaaatgattcggctggacccagtggctcacacctgtaatcccagcactttgggaagctgaggtgggtggatcacctgagcacaggagttcaagaccaacctggccaacatggtgaaactctgtctctactaaaagtacaaaaattagctggtcatggtggcaggcacctgtaatcccagctactagggagactgaggcactagaatagcttgatcccaggaggcggaggttgcggtgtgccgagatcacactactgcactctagcctgggtgacaagagcaagactccgtctcaaaaaaaaaaaaaaaaaaaagaagtgatccgttgggccgtgaaaggacatggagaccccttaaatacacattactaactcaagccaatgtgaaaagactctatactgcatgattccaactatatgacattctagaagagacaaaactgtgaagagagtaaaaaagatcaggggttgggggtgggagatgagtakatggaacacagatgatttttagggctccagtaaataccatgtatgatactataatttattcaaactcacagaatttacaacaccaagagtgaaccctaatgtaaactatggacgttggttgattatgatctgtcagtataggttcattgactgtaacaaatgtactactctggtgggggatactgataatagtaggggttatatgggaaatttttatatcttcctctcaattttgctgcgaaactaaagccgatctaaaatagatttttttaaaaagtagagcagagtaaaggggttaatgtattggggtgggggtatgcaaattgcaattattgaatagaatgatcaaggtaggcctcattgagaagctgacctgagcactgagcaaagactgtggctatctgaatgaagaatgttacgggcagaggatataactagtacaaggatcctaaagcagaatgtctctgatatgtttgatgaacagcaagcaggttaatgtggctcaagtgaattgagtgagggagagagaatggtgggaaataagatcagagaggtaaattgaaatgggctgcgtcactagtctagactttgtaggctagtgtaaagatttcttagtgtgacagagatgggaagtgtttacagagtagaatagtaatggttatatttgagtatttttctctttggtagttttattaaaacagatgtaacattgcagttttacaaatcacatgattttcaatttagttctatcataagttcataaacttgaaaaaaaatactacatcaagcttttattttaaaatgtagataaacgttacagaaaaaaaattgccaagcgcaatggcacatgctatatagtccagctacttgggaggctgaggtgggaggatcactggagcgcaaaagtttgaggctagcctgggcaacgtattgagaccctgcttctagaaaaaaaagaggcaagatttttaagctgaagtactcttaggaaatatttcacatgagcaggtattatctttaatctgctttttattatcatggttaaattatgagcaaagctcataaaatgcaataaatgcattttgtatttcttgcaagttagcagtggtgttaaatcttaaatctctgatctgtactaatatcatcarctcctactgagaattagaataacagtagaaactttgggaaagattttaaatgacaacaaagctaaagggtcagaatgtcgtcgttgcaaagcaattttcttagttgtaataaaggtaaatttaataaaagtaaaagcaatctgctcccagaatgttacagtattttgttttgaataaatttatattatctggaaatcaatatggctcatgttgcacaaaaaacaaggtctgaaaatagtaatgccctagagttccagtaggaggccatcgccttgaactgtttagaccaatatgaaaggctacttcctggaagaaacaatgcttctcagcaagatatttcttaaaataccattttcagaattatttgtagccactataataaaactatcagtaaattgtcagattgttcttggcattggtgacagaaaaactgcacatatttactggactgcatgacaattaagaacagagtttttcatgattaatgggttaaaaggcaagagttttgaatgaacttaaattgggcaattctcaaatctttgatgattttattatatgtcatcctgaccacttttagctggtttaatgtaattttgaaatgtttccctaaatgttacatctgttaatagttagaaaccagcttaaattcccattaagttttattcaacaaacctaaagcttctgttctgagaacctcataagtaagtaccctctgtgccatagaaggactaacagtatacttcaacattttacaattggttttgaaaattaaaaaatatgtaggctccccaggagttcatattcaatttaacaacaccaattctacttaagacataaaaatctatttctactggcaacaagatgaaaatctccagctcatactccttatatggggtaaacacccagggaatgattccagcaaagcacagaaccaggtttgtgarggagagactgggctttgacatagtaccactggataatacatacatcagtaattgtttctgtcacttacaaatatgtatctgtttaatgtcttcagttgtttagacgaacgatttggatgatcctaaatttctttgaaacttttacatttagagttccaaaaatttgtttttctccaagattaaagcaattctagcatagtagcagcatgctgcatcaacaagttgatttttttttaaagtgtatgtcttctattgaagagctcgatgaagttcttaactgttgtctctttaattaaacagagaacagcaaagcttgtttttttgccaatcgcaaatttatactcaatttaaaccatggcttttaacaaaattcctatactaaaataactcttcacacaagaatcttagtggattttttataggttcttggttaaccagcaaaactcaacaaaatttgttggcattagtaacaaatactttttaaatatgcttctatttctcccatcagaactttgatttctcttcaaagaagcctcatcatagacttactcacacatttgtgagagttattagaattgccataatcaatggatactgaagaaaagggaagatttgagggttggtttttgtttttaatttttaaaaaactcgtatcatgattctggagctaaaagcagctcacatgggccttatatgagctttgcctctctttgagcagtacattttaaaagtcaggaagaaaataaaatctgactcttgtagcatttagctttgtattggagtggcctttgcaggtaatgccaacttccacgacatttagaagattcataaagtgctggtcaaaataatggaaaaaatagcagctgtcatttgatcagaatctgtgtgcaaaccaattaaaagccctgtcataactatttaagcatgtaaggtgatttatgattacctttcataaattaatgaattctaccaataagagcagggtgctacattgggtgctcctgttctcgcagagtttacagctayacattacatgaggactgctccaggtttgctgtgtttaaatgattgacaaggcagaaactttgtcttttcttcaactgattggcactatctacttataacttataacttagcttatttttcactcccccccaaggagagtagagtccagaatggccggtggtagtctcagagtagaagagttgaggtgtcataagataacgacacccttgaatttatttctcctatactttgcttcataaaagtgagcacaaggacagacaggcagaaaatagtagatcactatgtgaggctagagagagtcctctttcaggttcaacaaaggaaagacagaagaaaagtgaataaggtacataaatataagaacataagtgtagacaggtagatgatgaaaaatgggagaaatggaagacgtaacaaaaaagaaaaaagatgaagaaaaatatgggaagagaaaggtaaggtgagatgaggagggcaaaagaaacagaatggagaagagagaaaagaatggargcaaaggaaagaagggagaatacagcaatctcctcctgaaatctgcctgtcccaagcataaagattaattgtaatattttaattacaaattagcttttcctgagaaaacttcataagcacataattcttataaaattgtgttacctcaaatatttaaaatgctttctagtcaaatatttagggggtcatcattctccaaaactagctagccttatgcagctggtaggagttcttcacagctgttctttaagccatgttgcatgagaacttcatagagaacctgagaagttccattttaagagtttctcctgcttcggtatcctaggcaagaaatcaggagaaaggaatgagaaggaagaatcactagtgtcaagtgacacatgaaactccagtaaatctgggtattacttaggtcaactagagtaattcaacataaaggtagaatagttgttaagattttaaaagccaagtggtgatttcgaacttgtagctattgttctaatatgatgggtaatcacttcctgcaatggtgaactatttataaactgctggctcctcaaaatgtaaataaagaaaaattattccaggctacaagattaattttcctctatgtctttaatctgaggtagatccattttttgttaaaacacacttgttttatttatttagtcaaattcttcacattaagaaggaggaatctgagacccagtaagattaagtgactagtttatggtccttgggtagaacaggaatgaagcagaggtttccattcctaggtcacttcagaactactaattgaggttcatcagaaaaaagacataagccaaagaaattagaacatgaagttgagtatcatctttagtaaaaaggatctagtcattgcttccttataatattgaaaattagtttaaccgtaggtggacatttctttgaaatggtttctaccactaaaaataaaactgaaggtagaggattaggttagaccctggagcaaaatcaaaacagcttatttcagcctaagaacttttttaaagtaaatggcaagccmcaaatacctacatatctgtaattttctgagccaccataaaatctgcatactctgtaccaaagtaaaaaacttcacttactgacacaacctttactaaaaagtgccacagactgtacgtaagaatacttttatttagagaagaataaaatacaagctgtctagttcttaatatggtaaaactctctatcctcttacactctgctttcttatttatttatttatttatttatttatttatttatttatttatttattttgagatggagtctcgctctgtcgcccaggctggagtgcagtggcgcaatctcagctcactgaatgctccgcctcccgggttctcgccattcttctgccttagccttctgagtagctgggactacaggcgcccgccaccacgcccagctaattttttgtattttctttttagtagagacgggatttcaccatgttagccaggatggtctctatctcctgacctcgtgatccacccacctcggcctcccaaagtgctgggattacaggcgtgagccaccacgcccagccaatttgtcttttagttagcctgaataaatttaacctctcagaggatccctcaactcatgtgaaaaaatccttaatagtttctgtcttacattaaacaaaaaggcagacctatgtcacctggagtcataggaccctgagttatctcctaaggtaactctaatgtacattccttaactctgaagctaacagctatgaaggtgaatgccgatagctgctgtaggtttcacagagagactcaatgattatgaagattctgaccatatctaataacagacaacagataattgtacagtaagatttaggaaaaaaaagtcatttcagttttgaaagttttgttaaggtatataaatgcatatctgttgcctattagtatgatgatatggtagacaaattgcctttgtcaggttttagttttggctctgccattaattagctatgtggtttttgagaatttcagtcactttaacacatgtttatagatggttacataccaggcaccgtgcaagtcattttaacagttatcttaggaaatcctctcagcaaccctgagggtttgacattattattatcatcatcttacaggaaagagaactggggtttagattgagttttttctcaaggttcagtagctagtggcctgcttccaaagcttgtattattttgaaaagcagccagtttctggaactatgtccttaacaagtacttttgacccagtgggaatgaaaggggagtgcagaaagaggtatataggattccagccctcctacttctgcttcagccagagcaattgcctgttcattgttttaatatattgagcttttcaggtaagattttagaggggagagggttctgtagcattaaatgcctgatctcacagtattatgcttcactagaatgaaggggtaaaagtggtattaagctaatataagaaaagtaaataataatcgttggataggcttcaaaaaagaaatgcatttgagatggaccttgacaagcagataaaatcttgatttagttgaaggactccatctggggaaacattaatgaaagtgcttaaattttcaatgctaattaaaatgtttatttttaaaatgtttcctttgatcctgtttttctttattaaataataccctggacaggaattaagagcacagcctgaagtgattgtgatgtccaagaagtactactcatggaacaaatagacaacttgtcatatttcaaaattaaatgctgactgcactatgaatatagaaaagtacagttgtaaacactatattctgtaccatgtaacatcttatgtatgatttcagttctttttaagaccaccagactacagttacaagaaagccaagatcagactgactcaatttgcattacatacatgttcagggaaagcctaattagggaaaacagaaacttcaaatttcactcttttaaactgaataggagagtatcttacatccactgccagaaaatatcaccccagaagtgaaaatttacatgttttaatttctgaaataatgactttgaggaaaacagttagaaattataaaacatacaaattcctatttgtcacactatggagactttggagaatatgattctccaagtatcttggtgtttaaacaaataaaaatatagttcagccaaaaataaactagctcacatgaaaaagctgtagtattaaaaactgctacatcagaaagtcgaagtgagtattcagtaaatttattaacaagatatcactggattaatgattctatctcaagtcaaaaacattttgccaaagtgacagcactaacacctaccaccagtagtatgtagaatcagcttgaccttatttcagaacatctgagaggcactaaaagctggcaaaaccatcttaagagtatggagtgataggcagtaaactgcatttattctgggcttgaaccacatcaaggcagtttcagaaataaccttaaaaaagaggagccagagattaaatactatccccactccccataattaagatgcaatttgaaactttatctgaaatcattgagtcaatggaaagccgggaggaaaacaatgttaaatcaatatctgaaaagctgtttctactaaagatgtctatacacacacacatattatatatctatatatcatgtatttggactgattcaaggaatctgtgcttctcaaggcaacttcaagaactgttgatagtacagagaaatggatatcacagcttttttcttaaagaaaatatagcttgaggtagggactggtaaaagaagagactgctttctttcattttttttcttttttaaaacaacttgtctacatcaccaggtatcagtaattgattcccactggacacaactacaggatacactccatgtttattccttgtgagaaataaacacagtaacaaattttcactagcatcattatgtagaacataaattcatgtttccttaattcagtaggtatttattagaaatctatgaggtaccaacatctatgtgaagtcctggttataatgcaaagaagccagtytagtgaatagacaaatgaatttattaaattaaaatacaatgatatatgtcatgagatgttcaagagctatgggggtacagtagagaaatatctgaggaggggtaaagaataggagaagtttccccggctgaatcttaaaagtaaggtattttaagatgctactataccattaccacttaacaagtaaggaaaaaraaaattacaaaaaaaaaaaaaaaaaagaaaasagccatatgattacatgaaaattgaataccttctcctgaatgatttttaggtagacaatgaaattaaggcagaaatcaagaagttacttgaaactactgagaacagagatacaaaataccggaatctatgkaatccgactaaggcagtattaagagggaaatgtatagcactgaatgcccatatcacaagttagaaagatctcaagttaacttacaacttaacatcacaactaaaagaactaggaaaccaagagcaaacaaatcccaaagctagcagtagacaagaaataaccaaaatcagagctgaattgaaggagattgagataagaaaaatcattcaaaacataaatccaggagctggttttttgaaaaaaaaaaattaataaaatacatagatcactagctagactaataaagaagaaaagagaatattcatataaacacaaaatattcaaataaacacaatcagaaatgataaggggcgattgcaactgaccccacagaaatataaccatcggaggatattatgaatacttccgtgcacataaactagaacatctagaagcaatggataaattcctcaacacagctaccctcccaagagtgaaccaggaagaaactggatctctaaacagacaatatcaagcttggaaattgagacagtaataaatagcttaccaaccaataatgtccaggaccagacggattcacatctgaattctcccagatgtatgaagaagagctggtaccatttctactgaaactatttcaaaagttgatgagcaactcctccctaactcatcctgtgaggctagcatcaccctgataccaaaacctggcagagataaaacaaaaaaagaaaacctcaggtcactatgcttggtggacattgatacaaaagtcctcaacaaaatactggcaaaataaatccagcggcacatcaaaaagcttacccacccccatcaagtaggctttatccctgggctgcaaggtcggttcaacatatgcaaatcaataaatgtcattcatcacataagcagagctaaagacaaaaaccacatgattatctcaatagatgcagaaaaggcatttgataaaattcataccttcgtgtttaaaactcatagcaaactaggtattgaaggaacatacttcaaaatgagagtcttctatgacaaacccacagccaacatcatactgaatgagcaaaagctggaagcattccccttaaaaattggcacaaaacaaggatgccctctctcaccactcctattcaacatagtattggaagtactggccagggcaaataggccagagaaagaaataaagggcatccaaataggaagagaggaagtcagactatccctgtttgcagatgaaatgatccaatttctagaaaaccacatagtctcagccaaaagcttcttaagctgataaacaacttcagcagagtctcagaatacaacatgagtgtgcaaaaatcgctaggattcctatacatcaacagcagtcaatccaagagccaaatgaggaacatactcccattcacaatggccacaaaaagaataaaatacctaagaatacagctaactagggaagcaaaatatctctacaagaaaaactacaaaacactgcttaaagaaatcagaagtgacacaaatggaaaaacrtttcatgctcatgaacaagaagaatcaatgtcattaaaaatggccatacttcccaaagcaatttatagattcagtgctattcctattaaacctccattgagattctttgtagaactaggaaaaaaaaaaaactatcttaaagttcatctggaaccaaaaaagagactgaatagccaaagcaattttaagcaaaaagagcaaagctggaggtatcccattacttgacttcaaactatattacagggctacaataatcaaaacagcatggtattagtacaaaaaaagacacatagcctaatggaacagaatagagaacccagatataaggccayatacctacaactatctgatgttcaacaaacctgacaaaagcaagcaatggggaaaggattcctattaaataaatagtgttgggataattggctagccrtatgcagaaggttgaaactggaccgtttccttacaccataaacaaaaatggattaaagactgtaatgtaaagcacaaaagtataaaacccctggaagacaacctaggcaataccatgcaggacartggcacgggcaaagatttcatgatgaagacaccgaaagcgattgcaacaaaagcaaaaattgataaatgcgatctgattaaagagcttcagtacagcaaaagaagctatcaacagagtaaacagagaacctaaagaatgggagaaaatctttgcaaactttgcatccaacaaaggtctaatatctagtatctatacggaacttaaatttccaaagaaaaaaacaaaacaacctcattaaaaactgggcaaaggatataaacagatacttttcaaaagaagatatacatatggtcaacagtmatatgaaaaaaagctcaacatcactgattattagagaaatgcaaatcagaaccacaatgagatacccatctcagtcagaaaggttattattaaaaagtcaaaaaataacagatgttggtgaggttgtggagaaaagagaacacttatacactgttggtggcagtgtaaattgcttgaaccattgtggaagacagcgtggtgattccttgaagacctaacagcagaaataccattcaagccagcaatctcattgctgggtatatacccaaaggaatatattaataaaccattktattataaagacacatacgtatgttcattgcagcactattcacaacagcaaagacagggaatcaagctaaacgcctgtcactggataaagaaaatgtggtacatacacaccatggaatactatgcagccataaaaaagaacgagatcatatcctttgcagggamatggatggagctggaggccattatccttagcaaattaatgcaggaacagaaagcaacaaccacatgttctcccttayaagtgggagctaaatgatgagaacacatggatacatacaggggaacaacacaaactctggggtctattggagggtgaaggtgggaggaaggaaaggatcaggaaaaataactaatggatactaggcttaatatctggttgatgaaataatctgtacaacagatccccatgacacaagtttacctatgtagcaaatatgcacatgtacccctgaacttaaaagttaaaaagataacacaatatcaaaattttatgcaatacctacaaatttaataaaagttgtacaaagaattactgacagaaatttcaagacctaagcaaacaaaagaatcatattcactgaccaagaataccacttttactgctgtgagtagaaaatattgtgctaagccaaaaaaaaaaaaataactgagcatttttctttaagctctataccagcatgtgctcacatcagaatatttattaaacagtcatccttctatgaccttgaatttctcttaattacaatttaggagtgcataaattgacttaagtgtagcttttggacagcattgaaagtttcagatacagatggatacagatggaactacaaggcagccctgtgagggataattagaaaaagtataatattaagagagttaggcatttgtaaagcaggtaacctgtttgacagaaaaagaattaaggttatttacaacaaagactccggaaaggtaaaggaakataggagagagtaaagcccttagtgctgatctatgccaggtgtgcgagaccctagttaggtatcaaaatagcctgtacagttctgtttttgttgtaatttggttttgttttgttttaatacatttgtcctggtctaaagacttgcacaatttctgggagtggccttctgtatagcagttattcatacaggtctctgttggttctgttagagacaaagttgagttactgtggcctggctgtgcaaatactcttgttttccttttctaccaactttaaaaacaacactaaaataaaaacaaaatgtgtcatgtgaagcaactcatgtatgttgctatctcttggatccggaaatatactgacaaaattgaaatggaagaccagagacagaaaaaaacaaaaaagcaatttctcaccatgcatattatttgaaacaaaagaaatttaagttactgacatcttgtttgaacatcttgtttggagatttctaaaatcaagtaataataagtaacagtaaatggtactgtgcccattattatacttttaagctgtgttaaatgttaatgatattgtctttagcaatttttattgtttttagtgaaagaaaaatatattcacatcagagcatggttaccattcatattcttcctttaaagtcatatttttcatcataaattcttattaccttggtatatttgggactgctatggttggggctatttcagataacaaataattgcaaagaagtatttacttttcattgaaatattctttaattttgttttatgacaggattgaggtatgccctcaaacattatttcagtgattattgtagataagtattcgaatctttcatctgttggatatctggataaatcaaatggcctggccatggcaaaccacaaaatccagtttcgtagagctcatttgtttcaatgaaagattttaattaatcatattggttgcatcacaatgattttgaagttactttgatattaaataaaaaagaattcttatataagcaatggtaataaagtactaaagtattaataaagtattgagaatttgaaattgactagagaattcaaaaatgagaagagacaagtcaaggtaaattccctcatattcacatctacaccttatgggttacaaacatttgaattctgaaagataatgctggcacgactgtgatggtcaatgggtttatatcaaataaactatattgtagtttataaaatggttttctcttactatagccaattaaaatcttaaaaatagagtgtgtaatgtagtacagattttaagttgcctttatatggcttatgcttcttgttatatttgtgttttggggggaattcttggcaagagattaggtccacatctgattttatgaaatgaatcaacaatgacagtaaagtaataaagtcaacataatgatttaattgtctatgattcacataagtcacttaacaattatatttgtttagtggtatgtttatcataaagttaatatgtttccagattgttcaagttttatattgttatatttttcaaatttcattttatgaataatgataatttatattccctcaaacttccatgtattaccatagttgatcttttctgttcattctctgttttgaaagaaatctgactttttactttcaaacatctagttttcattatcttggagctaattcaatcgctgtgatacctggaaaaaattacattttttatcttttagtttgtaaggagacttttgaacctgaaacagaaactgaatatttttgagattcactagatggattggttttcttaatatgcatttggtatagtaataataacgtgttatctttcaggtataattttcaattcatatgaatatgaacaatttatattgaaatgctgtggcgtttttatttgtttagttcttagaaagggtagctgttctatgggtttacagagacaagatttttatacataattggagatactagatggaagtagtttggctaaaaaggaaaaaaaattctatttgattgaagatggagggctgagcatacatgatgacttcttatccttcctgacacctcacctcatagaggcatatacataaaggaatagatccatgcagcaaagaaaatcagagagacttactagcacttggtatgttttcaagaaattactaggagaaggaaaaatgggaatgagctaactgatggaacaagcagtgcagaggaggagatgggagggaactgatcagcctgcctgaaccttggagagtctctcttctgagaatctgcaaggatgaagatacagagctcaaaacaggagactcaattaaaggaccatatctgcaactgggacaattggctcacctacttcacttttacaacccagattagaaaccagtctgatttcagttcttctgagcaatgaaccatatgggaaagggtgacgtttctgttgtgcctcttggcatgccactactaagcctacattattctggcttgggttggggggtgcagttttcctaccagttcctgccttaagtgaaattcctgcctaaagtgaagcttgcccgtatccaaagctacccatgtgcacagagctcctagttaatgctaccaagtaggcaagaagataggtgcaacctgtttttattattatgcttgttcattgttttctgaagctgtcatttcaaatgcttgatttttccattatgttcttaccttcagtttattgttcattaagtatttgttccccattacacagatttttcaaaaattaaagcagactcttttctttttatttatttatttatttatttatttatttattattatactttaagttttagggtacatgtgcacattgtgcaggttagttacatacgtatacatgtgccatgctggtgtgctgcacccactaactcgtcatctagcattaggtatatctcccaatgctatccctcccccctccccccaccacacaacagtccccaragtgtgatgttccccttcttgtgtccatgtgatctcattgttcaattcccacctatgagtgagaatatgcggtgtttggtttttttgttcttgcgatagtttactgagaatgatgatttccaatttcatccatgtccctacaaaggacatgaactcatcvttttttatggctgcatagtattccatggtgtatatgtgccacattttcttaatccagtctatcattgatggacatttgggttggttccaagtctttgctattgtgaataatgccacaataaacatacgtgtgcatgtgtctttatagcagcatgatttatagtcccttgggtatatacccagtaatgggatggctggatcacatggtatttctagttctagatccctgaggattcgccacactgacttccacaagggttgaactagttgacagtcccaccaacaatgtaaaagtgttcctatttctccacatcctctccagcacctgttgtttcctgactttttaatgattgccattctaagtggtgtgagaaggtatctcattgtggttttgatttgcatttgtctgatggccagtgatggtgagcattttttcatgtgtgttttggctgcataaatgtcttcttttgagaagtgtctgttcatgtcctttgcccactttttgatggggttgtttgtttttttcttgtaaatttgtttgagttcattgtagattctggatattagccctttgtcagatgagtaggttgcgaaaattttctcccattttgtaggctgcctgttcactctgatggtagtttcttttgctgtgcagaagctctttagtttaattagatcccatttgtcaattttggcttttgttgccattgcttttggtgttttagacatgaagtccttgcctgtgcctatgtcctgaatggtattgcctaggttttcttctagggtttttatggttttaggtctaacgtttaagtcttgaatccatcttgaattgatttttgtataaggtgtaaggaagggatccagtttcagctttctacatatggctagccagttttcccagcaccatttattaaatagggaatcctttccccattgcttgtttttctcaggtttgtcaaagatcagatagttgtagctatgcggcattatttctgagggctctgttctgttccattgatctatatctctgttttggtaccagtaccatgctgttttggttactgtagccttgtagtatagtttgaagtcaggtagtgtgatgcctccagctttgtccttttggcttaggattgacttggcgatgcgggctcttttttggttccatatgaactttaaagtagttttttccaattctgtgaagaaaggcattggtagcttgatggggatggcattgaatctgtaaattaccttgggcagtatggccattttcatgatattgattcttcctacccatgagcatggaatgttcttccatttgtttgtatcctcttttatttcgttgagcagtggtttgtagttctccttgaagaggtccttcacatcccttgtaagttggattcctaggtattttattctctttgaagcaattgtgaatgggagttcactcatgatttggctctctgtttgtctgttattggtgtataagaatgcttgtgatttttgtacattgattttgtatcctgagactttgctgaagttgcttatcagcttaaggagattttgggctgagacaatggggttttctagatatacaatcatgtcatctgcaaacagggacaatttgacttcctcttttcctaattgaataccctttatttccttctcctgcctaattgccctggccagaacttccaacactatgttgaataggagtggtgagagagggcatccctgtcttgtgctagtgttcaaagtgaawgcttccagtttttgcccattcagtatgatattggctgtggatttgtcatagatagctcttattattttgaaatatgtcccatcaatacctaatttattgagagtttttagcatgaagsgttgttgaattttgtcaaaggccttttctgcatctattgagataatcatgtggtttttgtctttggctctgtttatatgctggattacatttattgatttgtgtatattgaaccagccttgcatcccagggatgaagcccacttgatcatggtggataagctttttgatgtgctgctggatttggtttgccagtattttattgaggatttttgcatcaatgttcatcaaggatattggtctaaaattctcttttttggttgtgtctttgcccggctttggtatcagaatgatgctggcctcataaaatgagttagggaggattccctctttttctattgattggaatagtttcagaaggaatggtactagttcctccttgtacctctggtagaattcggctgtgaatccatctggtcctggactcttcttggttggtaagctattgattattgccacaatttcagatcctgttattggtcttttcagagattgaacttcttcctggtttattcttgggagrgtatatgtgtcaaggactttatccatttcttctagattttctagtttatttgcatagaggtgtttgtagtattctctgatggtagtttgtatttctgtgggatcggtggtgatatcccctttatcattttttattgygtctatttgattcttctctctttttttctttatcattcttgctagcggtctatcaattttgttgatcctttcaaaaaaccagttcctggattcattaattttttgaaggtttttttgtgtctgtatttccttcagttctgctctgatcttagttatttcttgccttctgctagcttttgaatgtgtttgcccttgcttttctagttcttttaattgtgatgttagggtgttaattttggatctttcctgctttctcttgtgggcatttagtgctataaatttccctctacacactgctttgaatgcgtcccagagattctggtatgttgtgtctttgttctygttggtttcaaagaacatctttatttctgccttcatttcgttatgtacccagtagtcattcaggagcaggtggttcagtttccatgtagttgagtggttttgagtgagattcttaatcctgagttctagtttgattgcactgtggtctgagagatagtttgttataatttctgatcttttacatttgctgaggagatctttacttccaagtatgtggtcagttttggaataggtgtggtgtggygctgacaaaaatgtatattctgttgatttggggtggagagttctgtagatgtctattaggtccgcttggtgcagagctgagttcaattcctgggtatccttgttgactttctgtctcgttgatctgtctaatattgacagtggggtgttaaagtctcccattattaatgtgtgggagtctaagtctctttgtaggtcactcaggacttgctttatgaatctkggtgctcctgtattgggtgcatatatatttaggatagttagctcttcttgttgaattgatccctttagcaggatgtaatggccttctttgtctcttttgatctttgttggtttaaagtctgttttatccaagactaggattgcaacccctgcctttttttgttttccwtttgcttggtagatcttcctccatccttttattttgagcctatgtgtgtctctgcccgtgagrtgggtttcctgaacacagcacactgatgggtcttgactctttatccaatttgccagtctgtgtcttttagttggagcatttagtccatttacatttaaagttaatagtgttatgtgtgaatttgatcctgtcattatgatgttagmtggttattttgctcgttagttgatgcagtttcttcctagtcttgatggtcgttacattttggcatgattttgcagcggctggtactggttgttcctttccgtgtttagtgcttccttcaggagctcttttagggcaggcctggtggtgacaaaatctctcagcatttgcttgagcagactctattttcaagagaagtagttgagtcttaggagtctgcagaaactacttttacctctgaagacatttgctaatatgttgatgggatataatttaggaacaattagtgtttacattttatcattttagtttgaatttaataatagcataagctaacactgttatttaatagtgtacgtaaatgctaactgaatatatatgtattcagttacttattctttatatcttacaggcaaaaaagatacaacccatgagtgcttactttttcgggttgtaccttttttgcctgtaagccataaagagtattttattaaaacattaagaaatgttagtctcattaagtagaagagaagaacataattcttatgtttaagccatttagtagtgggaattgaatgtagtgttcagaaacgttgcagttagatccactcttaatttttctcatttccttaaatttcatggatatgcatattgagctattttcgtattcaatctcagctaaataaagtagcgcaaatatgcatgactgaaattaccttytataaaaagttccaaaagcatttgaaaaatatcccacgggtgataagtctgtaatattttactttattaaaatgctgtacctggcttctgagtggttatctaagaagaagraaagaatctacagtataatgagagttaaccatgttttgtccaaaatgattttgaatcaccgttsggacagatcttgaagactagtggaaacttcaaayggcagtatcgaacttctgttccttttggggttgttgagtatatgaagaatattatttttctgtgtctgacagtcggtagctttgacatkattatagtgaagtataatttagatgttagttttaactataatagactgtaactccttgtattttgggtgctgtagarattacctttccctttgcatgtacgtgacagttaagatctgaagaatcttgattaatggttcttggatttatgtttaaagaaatcaaggatgggcatttttctcatctccgtctttggcatttgaaacartatacaggttgagtattccttatccaaaatggttggaaccagaaatgtttcagattttggattttttcatattttgtaatgttttcatacacgtaatgagatatgttgggatgggacccaagtcttaacgtgaattcatttattttttatgtatatcataaacatatagsttgaaggtaatttaatgtaatattttgaataattttgtgcattaaacaaagtttgcatacattgaatcatcagaaagcaaaggtatccctgtctcagccagccacgtggatactctgtggtgtttggcatcactgtcattcctgactctgaatttgtatgctactgataaacaactcttttattagacttactcacacatatgtacttaacagtgaaaaaaatgagttcagagtaactaagcagcataatagcatcaaacaatggcaggctttcatactttacctacagtgctgtttttgttaaaaggttactctactctgtattttattttttttaggtaagaagaaatattggaaacatttgagagatcaagaaatgggtcctctagggatgaggagaccttctgaataaactatgtcctgtgttcctgcattttgacagcaacccatcacataaggccacttacggaattttctccttgtagtgtcatgtcagtgctcaaaaactttcagatgttggagcatttcagatttcagattttcagattagggatgcacaacctttacaaagggcctttatagagattttaaatatataacttgttgtctactgagtaaaagatgggctgcttctgtttttctcctaacartattttcagcttctgtactaaccagttccagatgttccacgataaagaaatatttaattttcatatgaaatttatgaaaggaaaatgcataggagggcattttagcaaaacaataagacaaaacagcttttgacagttggtttgctattaataagtacataggagtacacagtaaatggaaggctcatttagacccttagaatttttcttagcagggggccctttacctgaaatcatggtactagttttaaacttcatgttcttttttgtaaagacatttaaggcgatcagctcttttcaaaattaggttaatttttcagaaagaaataatatatcaaataaaaggaatattatggtgggttcagatgaattttaattgaaacataagcaacagaaaattttaagattcttatatgtggaccactttgtataatgtgcctacaaggtaaagattttgtggtcatctgaattttgggagaagtaattttccaagaattaatacttaagctttttgaatcacagttttgtatacccmatttcattatttggttctgtgcgatatagaatgttcaaggctaactataatcatttttgtccaatttgttttaaagagggttcagcagctccaggaatggtataatggtgaatgatgtttccatatcaatacagatctacaaatatgagtatatttgaagaaaagcaaattcatattgaatttaaaggcatataaattggatttcttttccattcatggacatctacttgtataaagaataaaaattacagtttgaatacatccaaaaccttttctcttaccraatttcaatactcttttctaacaatgtcttagaattttgtagtatatctattcctccsctagataagatctgtagcacacttactctcttcctccctgttactatcctagaatgcttttgtattttaattttagattatttccttttaaaattatgcataaataattatttaaatttagcttcctactttttggacactactattggacaccaccacatctttttttctctggatkgatttttttttgttttactggagttgatcatttaataattcttagattgtatctgaaggtattaaactagcctgtttttgcatgactgaaaatgtatatttattctcacttgattgctgattagacttgacatagagtcctatgtttaagtcattttatcttagatctttgaaaatactattctattgacttttctgatattgctaaaaagatttctgatatcaatataatttttgtaccactgtagatgaccctttttcatcccttcgtcctctttctttctctttggaagattttggaatttttatccttggggtttgatactacgctaggatgccatattattaatgctttgcctcagctgcctctccctgcacctctgcttttgtctgaaacccgaatctacctttagctaagggaaattttcttctttcatttctgtgattgctttttctactcagttccgttttattctttttttcagtagctactagaacttctagatctatcctccttttctcttactttatatttcctcattttgcaggggattctgaataatcttttgtctttgtcttctatctcaataattttatctttagctacgtcctttaatttttttttttttttttttcctgagagtctcgctttctcacccaggctgggatgcagkgatgcartcttggctcactgcaacctctgcttcctgggttcaagtgattctcccacctcarcctccagagtacctgggattacaggtgcacgccaccatgcctggccaatttttgtatttttagtacagacaggatctcaccatgttggccaggctggtcttaaaggtcctttaatttttcattttcttttttaaggctttgtattgtcattattttgttagtcatgtttttaattttgtagcagtcttttccataattgtttttttttgtctgtgtgctatcttttcaaatctcactgagaattacaattatatttaacgttttcctctgtttcttttactctgctgagtgttatttcttcaatatgttaagtttggtgactttcttgctaatttttcctcaagtgtttggtgatttttggttgtttgttgtttgttgaatagttgagagcctaggctgaacagtcttggtggctggagggtatttatttcatcagcccaaatgagaatccctttttacttcttgtactatgtagattctcattacagaagccttcatccaataactgcagggcaaaagaagtgggtgtggctgggcagggtattcccggttgtagaagtttttcacctgggtttcggactacatttccataaattggctgctaccttgttctgtttctctaatctgggactctccatagtcagaaattgcatttgggagaatgtactcctgcttttgttatttattgaccatgagctttgagtttctctgagcctctatagcagactcacactttcttgttttagctgcaggtttctccaatgtgattttgcctttaaactaatcacatctcctctgatttgtgtttgtttacagagcttcttcaaaatttttggtctgcagtggtattattttcctgcactatcattctttcttctttttagtaatatattttatatggaatttgaggggaaaggaaagaggtaaatgtgtcctcattggccatccattcttttttaaagtaaaatgtaaaaatacagattttgaaattaagagaactaagagatgatgaaaccatttcaatggagacttatcaacatattatgaagggaggaaaatgtgctgaatattgctgatgtttaatgaatttagaaaggacatttatttagcattagcctctgtcaccaatttattatttttccctgtggaaactaatgactttggagaaatttcttgggtaatgtttattgttagtcatcctgtttaagaacaacttgcttaaggtgatatttttatttcatkgtagcaaatggattgttttgacatattcagtrtggacccatttaaagtaggcatgttattttcaaaagtgccatggcatgtcagtatcttgtaaattctaacttaaccaatattaaagaagtaaaccttcatgtactttaatggagatcacaaaagracttcactgtcttgttctatgcaagatttagtaaaaacagagtattaggtgttatagtaatggtcatgcaaagcagtagctcatctgtacaagaaaattaatggtcttctaaaatggccagagatttgtttataacttcattttaattaattacatttttggaaaatgagttgaatttaagattagaccccaggcttgaatttgtcatattttttataatggtattttgaaacaaagtttgctaatagatgtttaaaagagagtaagaaaatatttacatagggtttatttgtggagtaagtattgtgtctttgtcattattcaaaaatagaaaaaagttgtgaagcaacatgttctctttgtgaatgttgaaaattactaacagatctgtgcgattggttttgtatgccttgtgaagacttgccaaatttgattttatttttctcttttacttttttctagtaaagccaagtcctacttgagagacatcagtagcctatggaaatttgttgcttttctttgaaaagtgcacctgcatccaaaactgagtaaaaacatatttcacgaagaaaactataactaattaaatttctcagtactacctaatttgccaatataactagttttggttaaaaagaagttgattataatgttcataactgtatattgaacagaaaaactggatgcaatcagaaatcataggtgtagtcaaggagatgaaaattgtagatgtgaccgttgctatttscttttaaggtttcctaatcttgcctagcgtaatgactgagttttatgggtatttggaggattttcttgttccaggtggtggtcrtcctccttattttattttttggtaaggctaggagtaatgtagatgtgtattcttctcataacttagtaaaactcttttatcaaattggtcagtgcagcctgcagctggggacttctaaaaacatrttaccatgactagaaatttttatttcagtgcacttacttgacatctttctggttattattgaccaaaacacttgactcctgcctcttctttctttttatccattttgttgtccttattttgcatatttttgcatatgtacagatttctggcttcctcattcctatcaacaaccagaataacttttagtggtctaacttgtatcttcacttatcaacttaaactgttctttttgaaatgttaccagtgggttcagtgctcctgtctctgttctctgtctctggatctctcttcaacctttggttccactggccagccattcttaactgtttcggtttcagaaatattttttccctttagttttataataataattagctaatttttcttgagcacttactttgtatctttgactattctaagcactttacatgtcatatgatctttaacacaatccttagagatctaagtttgtattattttttccactttcagataaagaaggtaaggcacagagaggttaattactttgtttgaggccacactaataagtggtagaatcaggattcagacacaggcagtctgactaaagagctggtacttttcctctttagatgctatactattctgatgagtgtctcctctcatctttttctgtttggatctagttgtgtatattttcatttgccctacacttacctggttaggttaaaatttctacatccctcaaaactgctgaagtatcagttaaaaatatagttttcaacagaatagaagtttaatacatgttgtgaaccaatttcttcgtgttgccttttgaaattaaatttaaagagagcagtcattaatggctcaaagttagacctaagaggatttataggtgatgtgtatatgtgtttttgttttatccatcattcttcagtttcttaattaccaatactataccaagacaaatgcctgcatttcatcattaaccattaaaatatgattttcttagagttgaagattgaatttagggccagttttttcaagtacattaattatgtttaaatgtgtaagtctactcattataaaagtgaattattttgtaagtgttggttattaagtctgtgtattcccaagattttcagtctgaagtgagctgcagatacaatgcctaagcattttgtcctttgtattttgtaccagcaaaatgaaaatcattttttatagcctcattactcattcccaaaatgacctgaggtaccagttaggtccatttgcacaatatctggcaatatttctatgtcaaatatgttacaatctggtatttaaaatggccactgtaagtattatcaggcactattgttcctttttaaaaaacagtataaaatttgaaaacagtgctttggaaattatgtctttagtggctgtaatataaatggttaaccttacaaagggaaaacatgaaattgtttgaaattggtttatattggttgtcatgctaaacatattttttaatagtttgcttatttggtttgatattggttgtcatgatttaaaatgctatggttgtgtagaagttcttcacgaatatataagccgtttttacttacacatatattttagaaaatgaatagtttatatttttgctgttggaggactttttaaaaacatctatgaaacactaagatacgtctgaattggagctgaggactaagctctcatttatcttgcccaaattcctacataagggatctagagagtcatgccctacaaaccataaattctcatcagatgggttttatttgaccctatgtatcatgacttacttttcaatctgactctggcataacattacgagacaaggaaaaaatatttaaccccaaaatatatttccttgccataccttgaaattgccctgcaaagtctcttgtgggaaaaatccacatcttatagagaatcccctttcctctttgttttccttcctttctttccagatccaggcgataatcaactaagagccaggcacccttttaggtccgataagaaacattttacagcctgctctctctctgaagtctgctctctgagagattcctctgcccaataaaacttggtctccacaatcgtttttcttaacttgaacattcctttccattgatcccaggtcttgagataaactcgaccaattgtcaactagaaaatatttaaatttacctatagcctggaagctccccgcgcccctactttttgttctcctgcctttctgaaccaaaccagtgtatttcttaaatctatttgattgatatctcatgcctccctaaaaatatataaaaccaaaatgtaccccgaccaccttgggcacatgttctcaggacctcctgagggctgtgtcacaagccatggtcgctcatatttggctcagaataaatctcttcaaatgttttacggagtttgactcttttcgtcgacagagcaaaccgtacttcctgaaaagattaagagttagacagctagactttattcagagtgtgaacctatgtacctactatgtaaaatgcaagagctttagagcctttaactaaaggagtggcccctaaatcaagtcaaactcttctgtttcccaactacctcttgctgtataggakccatctggctctgctttctcaggtgtacattcttagaggaattttagtgattaaagtacaggccttggtgctgggggaagaaagagggttttcttctgcaggtttgttaaactgtaattcaggtcaaatttcgaatatacgtatgaaggcacaaaagtgtttaatattttagtttattccctttagtagttacaaaaattactgcttagtgaaaacttagcatcaggatatcccttcactaaaatctaggtctgtaatttgacaattcatttcacagcacctgacattactgttacattcactgtagcacttagcatgcaaagattatattttctacaactctcagtctcctctgttattggatgatgcgagcgcattaactacaaagtcatgtaaaggtcaagtcaaggcttaatttgaaaacagaagcctgagacccatccgtttacataacagacacagcactgtggtctcctgtgtgactgttaggtctgagcactgccccatattgctaatttctcacattgcttttcttaacattttttttctttaggagcttgatggagagatataccatttctgtcaggttttgcaaaatgtcttgagctccttgaaaaatagatgtcatgtaaatgcaaagtacggtcagttcttttagcctaagacattatttgatttttatagcaagtctattccatgtaaatgacatgcagtcatatagcttaccatgaatacgttcatgtcctaaaaatctcagatactgcctatattcagagtagctaacatttaattttgttttcatgtgttctttgaaaagagtagggaaaatgttttttatattattatggcttaatctctggatttggtcaccagtgaaatgaatttcatagcctcattctattacagacattttgtctgcttcgcaaaataacacaattttgcattattggtggtctgtgttcaagagacattacatctaaagagagctagaaattgcaatttaatactaagcaatgtgatgtgggaaaggaggccaactctccacatgctctttctgctagagcataatattctgcatattgacttttttttcactatccccaaaagtcaggatttttcattaagttctgataatactgttgaaattgaccttgattattcatgtaaagggcctctcagacaacctataggtatgagaatagctttcagaattrtaatcatatttaggttatatttaagcagtgatgttacacacttcccaaaaagtaatttattgggacatttacataactctgtgtacttaaatttatctacttattgcttatttaaaacattacatatgagagtttgtgttttccttactcaccattttccatacggctttattttcctcttagtttgaaaacttaaaaaaaattcaagttaacaggcatttattaaacatctgttgtattcaaggccctgggctacgtacatgtggaacataaaaaatgatgatgatgacagtgattgcaaacacttgcaataagtcctcatattgctgtcaagtaggtgctgttgttatgccatattacaaatgaagcagatgagccatagaatatttcataatttgctcaaggtcacacagccagtgatttsagaagactggcttaaaacacatgcagttcgacaccagagatgacactcttaaccactgtgctatactaaaatgaagacaagatcctacccttaagaacctttcatcctactagaaaagtggtaatacatattcagagaaaaaaacaaaaagaaaacagtaagtcagtatgtgttaggtgctgcattactggctcaaatatggaagacattggtgctcagaaagagatgtatttcttttgggaggtggggaaggcctcctggaagaagtgttttagctgacccttaaaaaakcggcaggattttgtcaagtgaagttaattagaggaagaccttctccttaagggggcaatgagaacaaaggcattgttttcaggaaaatgcagtgcccaaagttaatttgactatatgaaaaagaaaartatttatacctatgcagacctttgaatgtaatgcatgttttcatttaaaattagaaatttatataatttttgaggtattatggatccaaattgtagattttttaaaggttaagctgttatatttttctttttaactaaaggggtatatttcaatggaaaggagttgcccaaactgaaatccgcagcgatgctaaggaataacatttatttcatatgaaaatattgtaaaatattttatggatattgttttttacatctaatcttaacattatctgtaagctgaactttgatgcagtagtagtaaacctactttctacaggaactacttctattacactctttaatttaaatctctttccataacctgtcaatatttaaagtacaacaaaaggtagttgcactcmgaataaaaatttgttttcacagagaattttagcccattatccctgatgaacatcgatgcaaaaatcctcaataaaacactggcaaactgaayccagcagcacatcaaaaagcttaaccaccatgatcaagtgggcttcatccctgggatgcaaggctggttcaacatacgcaaatcaatgaatgtaatccatcatataaacagaaccaaagacaaaaacgacaagattatctcaatagatgcagaaaaggcctttgacaaaattcaacagccgttcatgctaaacactctcaataaattaggtattgatgggatatatctcaaaataataagagctatttatgacagacccacagccaatatcatactgaatggacaaaaactggaagcattccctttgaaaagtggcacaagacaaggatgccctctctcaccactcctattcaacatagtattggaaattctggccagggcaatcagacaggagaaagaaataaagggtagtcaattaggaaaagaggaagtcaaatggtccctgtttgcagatgacatgattgtgtatttagaaaacctcattgtctccagcccaaaatctccttaagctgataagcaacttcagcaaagtctcaggacacaaaatcaatgtgcaaaaatcacaagcattcctatayaccaataacagacaaacagagagtgaaatcatgagtgaactcccattcacaatggcttcaaagagaataaaatacctaggaatccaatttacaagggatgtgaaggacctcttcaaggagaactacaaaccactgctcaasgaaataaaagaggacacaaacaaatggaagaacattctatgttcatggataggaagaatcaatatcatgaaaatggccatactgcccaaggtaatttacagattcaatgccatccccatcaagctaccactgactttcttcacagaattggaaaaaactactttaaagttcatatggaaccaaaaaagagcctgcattgccaagacaatcataagccaaaagaacaaagctggaggcatcacattacctgacttcagactatactacgaggctacagtaaccaaaacagcatggtactggtaccaaaacagagatatagctcaatggaacagaacagagtcctcagaaataataccacacatctacaaccatctgatctttgacaaacctgagaaaaacaagcaatggggaaaggattccctatttaataaatggtgctgggaaaactggctagccatatgtagaaagctgaaactggatcccttccttacaccttatacaaaaattaattcgagatggattaaagacttacatgttagacctaaaaccataaaaaccctagaagaaaacctaggcaataccattcaggacataggcatgggcaaggacttcatgtctaraacaccaaaagcaatggtaacaaaagccaaaattgacaaatgggatctaattaaactaaagagcttctgcacagcaaaagaaactaccattagaatgaacaggcaacctacagaatggragaaaatgtttgcaatctacccatctgacaaagggctaatatccagaatctacaawgaactyaaacaaatttacaagaaaaaaatcaaacaaccccatcaaaaagtgggtgaaggatatgaacagacacttctcaaaagaagacattkatgcagccaaaaracacatgaaaaaatgctcatcatcactggccatcagacaaatgcaaatcaaaaccacaatgagataccatctcataccagttagaatggcaatcattaaaaagtcaggaaacaacaggtgctggagaggatgtggagaaataggaacacttttacactrttgstgrgactgtaaactagttcaaccattgtggaagacagtgtggcrattcctcaaggatctagaactagaaataccatttgacccagccatcccattactgggtatatacccaaaggaatataaatcatgctgctataaagacacacacatatgtttattgyggcactattcacaatagcaaagacttggaaccaacccaaatgcccatcagtgatagactggattaagaaaatgtgacacacatgcaccatggaatactgtgcagccataaaaaaggatgagtttatgtcctttgtacggacatggatgaagctggaaaccatcattctcaggaaactattgcaaggacagaaaaccaaacaccgcatattctcactcataggtgggaattgaacaatgagaacacttggacacagagagaggaacatcacaaaccggagcctgttgtggggtggggggaagggaaagggatagcattaggagatatacctaatgtaaatgacgagttaatgggtgcagcacaccaacatggcacgtgtatacatatgtaacaaacctgcatgttgtgcacatgtaccctagagcttaaagtataataataataatttaaaaagataaaaatgcttaaacagaaaaaaaattggtttttactgtcatgaatttttcccacgtttatgtttattaacaactgacacaaacaaaacctgtacagaaagtactctttattatacactttatttcaaagtactgaaatagtgttttatgatcatagtatttctagaggaaagattttctcccaagcctttaaggggaaagctaatccacttggagaaattttgggccacccaccaaacctgtgatttcctgccccaatttatgaaccaagttatactgagatcgttaaatggtgtgatttctccttrtgactttcacattttactttataggttatattgacttttagatttcaggtagtaaaataaaaaatcttatgcagttcamgttagaaaaattggattagtccaagtgatattttcacctggtattttttttcaggcatttcaatgttactttttattacatttataaaattatatgttttaaattgtatggttttcccttatctttttgaaaaataccatactgattcatctcaaatattttagcctcttcttaagtttccctttcccctcaacttttccgtaagcgcacaaaagaaagtattgatttttgccaattattttggttgctgaggttgtaagccatcttggtttgcttacatgtaggttattaaagtacccttcctagtctgacttgccagtcttacttctctaccttttgttagaggaataagggatgaggatgagagaattaatatatattttttaccccatttctgcatattttaatcccatctccagaaaccaggttaatttcacctctgtcacaaatttgaaaggaagggaaaagatgtattaattgccatttttattgttattttctgactttcaagccttctaatctaaggttagtaaatggacagcatttaaaaaaaatattcttgttatcttgacataatgaagaattatgtttttgagtattttgtccattgtttcttatttcctactttacatttttatttacagcaaggttttatccttttactaaagggaaggagatgggwtgaatggcagactttaactggatgctttatttaggcttttsgaaagcaaaaaaagtttatacattgttacagctgggtgttgggttacaggctgtttgttatattcatgtattagttcctgttattttaacattttaaatatttcataattgaaaaaggaaaaattagactgggaccagtttatagaaagctttaacttctaggcaaaaaaggtagaactttacagttggttgtggagaagatattgactgtcttttgtagagagtagcatttcgaaaaactgaatttggcgtctgtatttagaacggtctagagaatggagatactgatgaaaaggaatgttagcaaattcagcattctgatttctgaaaaatgagtgcttagattaggtagtggcatggggactagaaagaacagggatgctgctgctttgtataatcattcccattatataaaggttatatataaattaggacggacacggtggctcacacctgtaatcccagcactttgggaggccgaggtggatggatcagctgaggtcaggagctcacgaccagcctgacgaacatggtgaaaccccatctctactgaatacagaagaattagttgggcttgatggtgcatacctgtaatccgaacactacttgggaggctgagacaggaaaataacttgtacctgggaggtggaggttgcagtcagccgagatcacaccattacactccagcatgggcaacgagcaaaactctgtctcaaaaaataataataaagattatatataaataaataaaatcacaccatttaacaatctcagtataacttggttcataaattggggcaggaaatcacaggtttggtgggtggcccaaaatttctccaagtggattagctttccccttaaaggcttgggagaaaatctttcctctagaaatatatgatcataaaacactatttcagtactttgaaataaagtgtatattaaagagtactctctgtacaggttttgtttatgtcagtttttaataaacataaacatggggaaaattcacatgatagtaaaaacaattttttttcctgtttaagcatttttatctttttaaatttttatatatttaatatataaaatatatataaaatataaatatatatttatatttatgattatataaaattcctatatctttatattatcatttccataaccattttagtaagcatccccaaatagaagttagggtgtattactaattctgcttaatatactttgtatacttttgtttcctatctcaaatctagtttctattatgtaagtataagtaccctccatgaattgggttaacattctaaaccatgaccagactgagagcatgacgactaatgtggtttttactcctaagctaccagtatggaagatcaacatttaagaaggcattagtcatctgtgctgctgaaaataatggtttcacattagtctggaccaattagaaggagcctatgtctacttggaagagtttgatttgcagcatagtccttggctgcttctacaagacttggcaaacttttgtttaagtcagaccctgcttaaatgtctaaaaggaaactcttaggccattatttccccctactttacataatattgctccatacaaacattccacttttacaaaatcatttactttttcccaactctgtgatacaaatgagttatcttttcgtaaccaccaacctctcagttttatatttgttagctcagatctgacatgaaagtaaaaattacttataaccactttgggattacacaaatttaacctgttcccatgttgtattcagtcctctgtgaaatacgagggtacttcaaaaaggtcaaggaaaaattgaattaaaatataaaaataaaagatgcaaattttatttctcaacataggctccattaaggtcgagacacttttctaagcgataataccagccatttagtccatccctcatttcttttggaattgaggaatttagccatgtcagtgcagtctttttgtaccttactaactgaaaaaaatgggtattctttatagatatttttaagatcaggaaataaaaagtcagaggaggcaaatcaggtttgtaagggggatgcttaatggcttcctattgaaactcttgtaaaattgctctgtgtgattagaggaatgagcaggagctttgtcgtagtggaggaggactctagtgaagctttcttaggtgtttttctgccaaagttttggctaatgctctcaaaacactttcataataagcagatgttatcattctttggcctcccagaaagtcagtaggcaaaatgacttgaacatcccagaacactgttgccataacctttgctcgtgactggaccactttcatctcttggtagccattgttctgactgtgctttgtcttcaggatcatactggtaatgccatattacatatcctgttaccattcttggaagaaatgcttcggaatctttatcccactcatttaaattttcattgaaagctctgttcttgtctgcagttgatctgggtgttgtaagagttttggcatccatctagtggacagtttgctgaacttatttctcaatcacaatcgtgtaagctgaaccaattgagatgtctgtggtgttgkctctggtttctgctcttaatttcggttctcttagggcatgaacaagattatttttttcctctcaaatggatgtggatggtctgtcactgtgggcttcatcttcaatgttgtctcgtcccttcttaaaacaagttatccatttggaaactgctcatttcttttgggcattgtctccatcaagtctttataaaacatcaatgatttcaccacatttcacccacaattcatcttaaatgtgatgcttgttcttgcttcacttttagaagaattcagtttgctctgataggggctatttttaaatgaatgtcctatccttcttagtgcctcaaactagatcctgttcagacatactgtaaaaagttagtatattttggtgcaaaagaattttgaaatccatgcatagttttttcrtaatatgcatttttcatgagctttttgaagaaccctccttgtaatgtatcttaattccctattccattaaatctatgattttgaaccagccatatgtgacctgtaatcaaaaagtgatgtttgatagatgctgtcaccattctgtcatttttcctcatccaagatagaagatgtcttcgaaagctttgtatatgttccagtcctataaaacaattctacaaaacaatttcaagttcaaaattattattgagaacttttaaacaggatatttagaagtttgttttattaacttggcctaggtcacaaaactcattaatattaatgactagactacagaggcatgtagcctgtctaaacattaacagatacaaaacattaaaccaaattgtgaagcttcgttatgctatgagtcatttcaggcaaagaccaatatagcaagcaaaagctgaacagtccagttgaaatgtttctgatctaagcctttgacttctgtttgtagatgaagtggagttttgaaactgacactcaaattttttattgacttcatatgaataaatgattcattaaaatataatacttggaactaaagtcatcattcaaaacaggcatttattattaataaactacagaaaagagaaaatttgagggtacaatttactttttttaaagtatcttaaaattgcatttattttctcttagagaactttagatgatatcagtcattactaatgtcataaaatgtatgtaaatatgagctaagtgatgtattttatttacccaaagatatgatctaacagcctctgcaactgtcaccaacctttcctataaaacagcaatatattaaatgatagtgaagagggtctgaaatttcaaccttgagatgcacttacactgtattcagtacagcagatttatacttctacttatatatcaacaacaggtctttctaactggcaagtcttgtggtaaacatgagaaatatggatgcttattaggtcacttttggtaaatagaactaataatttgagacatttgtctacaatagagtttggcaaactttcttctgtaaarcaccaaatagtaaattctttaaatttgcagactatacagctctgctgttacaacacaaaagtaggcttagacactatataaaagaatgagtgtggctgtgttccaataaacctttatttacaaaaactgaaagtaggtcagatttttcccaaaagctgacagcaggtcacacttggcctgcggactatcaatccctgagctacatttgcttgattttcttactgtatactcattcctctgttcagctgggcttggcttttccccatcactgcaccaaaatacttttgccaatatcagtaacattctcatcattgaattaaaatgaacacttaccagtccttgtctcatttggattcttgggagcagttgacattctaatcaatctgtccttaaaattttttctttctttagtgtccctgacctacctctagtttttaacccacctctcaaggcagtctcttaattattggtgtgccttaaggatttattattgatcttcttgacacatttgccttaagcagtactttgtgttactatagctctaatttctgtctgtttttctccctcctgagcactcttaagtattaatctgtagcccagattcctaatttaaatactgagtttgtacatctaatggcctgctggtattttctacatgcttatccaaagatacttggaaatacctgtcttaaactgaacttgaaattcccaacctctatttcatccccaagattacttccctcaacccccattctatctcaatgaatggccctacccatctttcacttgcccaaggcagatacttgtgcttcatctttgattcctaactcttcatctcacccatgtctttcattgaaagaatcagttttgtggatgtacctccaaaatagctcttaaatctgtatgtgttatagtctgttgcttctatgctagttcaagccaccatcatcacaaatttaaattactagtagactgctctgcttttccctttcatgttctcttttgctggtgggaatatcccccatcctgctttattcccaataatttatctttcaggtatcagattagatatcagttctactaggaatcctttattgactccagaatgtaggtgtagtgtttgttctctgtgccctatactttgcctgttagggcaaagtatrtcattttgtaacctcagtttatttgtctctattggactcgtaagctcaaggaaaacaaagattgtacmcattgtcttcatcattgctgtaaccccaacamcctagcgtgttgctcgtaaatctatgttgaaaacaagtgaaattagtctcaatatccataaaatacaccatgttctgtataaatcaaagcaccrgaacatatctgatggcttaatttgcactcaaagtaagtatataattagaaagttgaataaattaatgaaataaagatgtcatacttcacaaagttktatgtagaacatcagatcctaaatcataaggcataaactgctaatggccagatttgcttcaccatatgttaatgagcgtacaagtaatcactgtgcttataagtaatataagtatcccctattcttatttaatcctggctccttttagagggaaagtaaagaaataaactgaaaaaaaaatgtatatatatatatatggtactacccttgaccttaaggaacacactatgttttggaagccttcattgtaaaatgatcgtaagtactaacacaggtattcttactgtgctgtacagcaccaaagcaagcagcaggtggataggagggggagaggaaatcaggcgaggttttgcagaggaggtaacacttcagaagagtcttaaagtatcagtaagacattgscagaaagaaaaataaaaattaatttcaaataaaatatatataagcatgtgaagcatgattgagaaatatcttcttttttttcttcttttttgagatggacttctgcttttgtcacccaggctgtagtgcaatggcactatctcaacttactgtaacctccacctcccaggttcaagcaattctcctgccccagcctcccaagtagttgggattacacctggctaatttttgtatttttagtagagacagggttttaccattttgccaggttggtctcaaattcctgacctcaggtgatccacccacctcagcctcccagagtgctgagattacaggcatgagccaccatgcccagccgtatcttcttaattgtcaaaggaaaatcaaagtgtgttagtagcattatcatatattatgtttttgtgtcatacatgatttttttattctaaattttaaaatctaaccttaattcagttatttaaattaagatacaagccttgctaaacagaatttktactgatacatgctacaacatggatacatctcgaaaatattatattaaatgaatgaaactggtcacaaaagaccacatatatgatcccatttaaaattgataggatttccagagtaagcaaatctgttagaacaaagtagattgctggttacctaggaccgggagaggagggagcagggggtaagacaggagagttggtggataataactaaaggacatagggtatctttttgggatgatgaaaatgttctaaaattaattgtggtgatagttgcacaactgtatgaacattctaaaaaccattgaattatgcactttaagtgggtgaactgtgtgggacatgaatatttccataaagctgttaccaaaaaatataagttaaattctccagtgttgttattttcactaagttatgaaaaaaacccatgttccatcctttatttaggtatcattgtacaaactgaactatcagctgttgctgcattgaattcacagtagtacacaatagacatatttcaaacataaaataaaaccttattagctccagatatactaaggattatagaaatatatcaactcatttaaaccatgtactttttagaatatgcatcatttgttcacttgattccaagaagattttgtgaatcataatcaggtaattaggttagcagagaactaatgtgcatggaaaaatgaactccagtttttatcagtcatatttagttggaagagcctcattagaggttaaaattttcttctggatagttactgccttaaattaaccacatatcttatcaaattagttattgtacctgcctgtctttaggaatttggttccacaagtgttggaggtaaaatagcatgtttcctattattatgctgcagtttacaatggattttcagttgcctgttgtatgataaactcactgcccttcataacttgaggtaaatgctgaacttgccctttttaatttgttgaaacagagcttccattcactgataagaagtgtaaatttaactaaattgtcaaattaacctcatttaggtgcacacattggttctcttttccttgaagacttacgtgacagcacaagatagagaaaaattaagcctgcacatgttttcagttacctttttcttactctgtgaattacattaggttatttcattcaggatgccaaatacatagtagctcctgaaagtacaaatgcatcatttaaatttctgtctatgaatctaatgcagtcattttataaagaaaagagaaacctaaatttgaatgttgagatcataatctttaaaactacacactagaaacaatagaatttcaatttattgtttaaaatttacccagaatccctcagccaagatartaacacatgtcttgagaagttaaataatgtacctattacaaatgatgtttcagtcatcagatatgtacttatccttagaataaattataaatacttagaaaaatataccattacctatagtattgagtacagaaaaagctccattgtttttagctgtcaatgctcttttcaacctagtttctcactgttaaaaaagcttcaaataatcatattcaaaacctcttaacttgctgattatattcagcaaccatagctaaatatttcagtaccaaagctgaaaaatcataatggcatatcagcacacacataataaattatggttaatgaatactatacaaggtgtgttttgattggctccaagtttgtgatctgctcatggatagcacattgtatttttaagaggaaggaaaatatagtgatgatatgactgccaagcatattgctttacactgaagcaaagtggtattttagccaaactcaaaatgtaacatatagacaacaagtcaagtgacctaatagccaaaatgaatatatctaattaaacatttcatgaaaatatttcatgcgctctcttatacgatttttatactgaataaaggtttctggtcaaagacagtttgttatgttgacagctaaaactgttgtatgttttagctaaacatgtataaaacacaaaagcatttgccttaaccagcttgaggtggggaccttcaagtgtgaggtgctacctttttaagctaactacagaataaatacttagagtgtaattactatttagcccatatattttctgagtaaacaagacttataagacctgtaagactactaccattggggtcaaatactacaatataattagaaaatattgaaatcatttagacaaaatccacttattctgatattttccatatccaatatttttttccttcaggggaaaaatgacttgatgtcaactgaactatactaaaagatctagctaaatgaaatcactggtgtatgcatgtatgccctaggatgtgcatgcatgcaattggaagcactgttgggagaacacaagagacaacatgaaaaaagacccagagagaagtatgtaaaaccctactggtacttccgtactgcctggacatgcagtgcattaagaggatattgagagatgagtccgtaggaatcatgggccagagtttggaagtcttgaatgctatgctaacaagtttagagtttttgctgcttacattcttaaataggtaatcattttgttaaactgtacttttcaaaaattaaaagttattcgattgatttaacactgggaaaatgccttttgttgtgtattccatgtatttgttgcagttgtccttttgtaacttttatcaaactttgatgtaagctcaggagtttccgtttgcccagtgcccttcttaaagaatggggacattcctgtgaggttttggaaactgctggactgcataatattttaatgaagtctttggaatcacagggcttgaggtagcaacagagatcagctgaaattyaggtgaaaatgataattatgtagtatattcactggactaactttttttatttgtttcatattagaattttaacctgaatgaaacctagctttttaacttggcaatggtattgcattgatgtttgtaaaatgctcacagtggctgtgaaaattttgttggtctaattggtgtaacagatacaaagagatttgattacattttttcagaccatttttgagaaattgaagactttaaccttgcattacctcttattattaagacagtgtgacaccccatccgctatatttatcaaaataccctcagcaaagcttttaaatatttctgtatagaatgagttactgaatggaagtaattgtgcaaactgattaggacataggttctatgtattatcttgatatacaggtgaaagtgctatagcgatctgaagttaccacagtaatgcaatggcaagaacaatgacatgtttcacttttatgtattttatgagttatttcaccgttatgggcgccattttcctcatctattaaataagaggattgggcaaggatactgctgaagtgttttgttactgacatttcgtggttctacctacttccattcactagtttaacttgcatacataggtgtacttttcaacattcttgaatcatagaattggaaagaatcttgggtagccaggctgcctcacagaaaagtagaaatttattcattcactctgcctaggatgctttgcttgcactttctcaggctggtgccctttgagccagagctggttgtgacatcaattattatccctttggttgccaagattgatttcatggtttggagagatgggaagagaatcctattctccctcgttgccccacgtacagttcttcccaaatttgggagcttagttataaaaggcaacctgcagacataaagaaggatctttctttggttaaacgtctattccttgccatggtacattcatctttgtatcatgagcacttttctygggcagcacatgttactcttaaatgtttactgaatgactgaatatagtggatgacaraaatractaacagttgtaaatgtaagtagagtttcatggtttatttagcctatggtggagctgaaattatatctctaggtttttgaacaatgatgcttagtaaagattgtcaacaaataataatagagatattggaatatgtttacaatcatctataattatattgttatagagaatrtatctgtrgacatatttaataaatggtgcctaatgagttttgttttataaactcattcagtaagacttgaaatattatttacattttatctctgccttttatttctgtaactaaraagaaaacttcctctttaagtacctaccaaagtatttttacattcaacttggacaagagtttagtactatttcttttactgaaatattctatctcctgattttctagttgaaaagataattgcatcatttctaattctgatatccaatttaaggtttaaagctaagcartgtaaatttggtttaattcttayctagtttatatctgtattatttagaggatatttctgcttgggtaatttgtgaagaggttaatgcatttctgtcttgaaaaatgtatatgtgttcctaattcctaactaatgggaaaacagagggtatttttagtgtcagctttcatcaagtcagacctttctgaagaccttactgaattctatttccatgggaattttgctaatgggtatgtgcaacattatctaggtactcatagataggattacaaattaaaaataaaaaggaatgggtggtgaacaaacacatctttcttttcttttaagaaattgacagaatattaatctttgcactttcattttcactttcgtttcactttgcattgtttttagattaggtgcagaaagtccaagtttggtactaatgcatgagatcagcatagacaatataagtaatgcatttattaaggaagttcttagttgtaatcttrtatgtacaagcagaagagagaaagtcttccagtttctctatatttagttaacaatattagtgacttcaatgtgttttacaggaaaatggaaaatttaaaaataagccatccagttgtattgcctgtatactcgtttactgatttattttgattcatgtaatgcatgtgcactgtacatgtcaaaatactgtgcagaaaacgttaatgaagctggtgatattcaacatttattgaacacctrcataccctggatattggaatttccttatggctcagcctcaggctacctctgttttcatactactacttttttttggtcccatgtgatctgggaaaataccttcttttcctgggcaatttcatgtactttcatggttttaaatatcatcaatatatcagtgactcccaaattctcttttctggctctccagacatatattgtcaaggaaatcttgcagatatatcaagctaattgtgtctgaaactgtactttggatcctgcccttcttcagatctgcagctcttaagaatttctaatctcactcagttccatccctccagcttctgccagaaacctgagagtcatttttgactcgttttattttttcactacccttcatcccaattcaagtctgtcatcaagtgctgtctcatctacctctaaacattacctcagaatttttcacttttctctgtcattgctgccatcacatttgatcaagccactgtgtcttgcctggactaatgtagtttggagaaactccaaactggtttctccatatacagttcagccagttctaattcatttccaaataaaagccaaagtaagttcttaaatatgtaaacataattatatcactcttatatctaaaactctataatgcttttacattgctcttatgataaagatctcttttatctatcccagaagaggtgtttggtcttaaattagcttcctagggcgaccataacaaagtaacacaaacgaggtagcttaaacaacagaaaattattttatcacaattctgtaggctagaagactaaaatcaatttggtttcttctaaagcatctctccttggcttgtaaatggttgtctttctctggtgtctttgcatggtcttccttttgtattatctgtatccttgtctcttattagggataccattcatttggattaggggccaccctcattgactacattttaccttaattacctccaagctctgtctccaaacaaagtcacctcctgtggtactaggcgttaggacttcaacttaaaaattttgagaacacagaattcagaccataacagagcctaaactcatagttgatagacgaggaataaacatgtacacataggagcagagacttctggtgggttttgtgggaactaagcaagttagattagagaagattctgtagaaccaagaatggaagactaagaaaaatgttatcctgctttattctcccttaagcaggtatcatttgcagtagcctccaaaacatcttacatataaatgcttttatctcaagaggaatcatgcaatactgcagatgactcagtaaaaatccatcacctctcctacaaaaacaaccattctacctacaacaaaaacgatgacagcaataaaacaaaaactctaccttatttactgacttcatctttatgttttaaaacttattcatttgtatggaagggtgtgtatgtatatcaatatcttggcctatctagctatcacaaaataacaactttttttttttttaagacagtgtcttgctctgtcacccaggctggagtgcagaggcacagtcttggctcactgcaacctccacctcccgggttcaagcgattctcctgcctcatcctcctgagcagctggaattacaggcacccaccaccacgcccagctaatttttgtatttttagtagagacagggtttcaccatgttgtccaggctggtctcgaactcctgacctcaggtgatctgcctgccttggcttcccaaagtgctggtattacaggcttaagcctsaaaataagacctgttattttgaggcctggcctcaaaataacaactttttaaccaaatctgatcaatgtttcgtattagtcttactgcataatggcagtatccattgatactgctgttaaacaaccaataaaaaatccttccagaaataatttatattacatatccagttattatattcctttgaaagaattcctgttacaattatcagcaaaggccaggtacagtggctcatgcctgtaatcccaacactttgggaggctaaggtgggaggatcacttgagctcaggggtttgaaaccagcttgggcaatatagtgagaccctgtctctacaaacaataaaaataacttactgggtgtggaagcgcacttctaatcccagctactcacaggctgaggcaggaggttcgtttacacccaggagttagttcgaggctgcagtgagctgtgattataccattgcactccagcctgggcaacagagcaagaccccatctcaaaaataaacaaacaaaaaagaatgatcagcaaatttaatttctttaaaatcttttaacctaaaatccaattttgcattatatgaaaatatccttgtatctggtttctggaagaatggagatgtaatgtcattaacttttatgctaaagacagctatttttaaaaactacgcacagtatcatctaaaggattgtatgtgtgtgtgtatgtatgtgtgtgtgtgtgtatatatatgtatttagatagatatactttggtttaattcaagatagttttggcttatggatgacaagatgtggatgtgttttcataactcacagctgtcgtttatgccataagggtaattctyttcttattcagtatgacataatatgctacattttattatccagactrtctttctgactcygaggaaaaaaataggtccaaatagtcaaattccattatctaatgacagtggtaggcaggaagcacatggataattatatatacattgtcagattcagcctatgaaactactttaaccaggagtttctacattttccaccatgaagtctgttgttagagttgctactgataactaagatgacaggtctgaatttcattttattttctctttttcttcccttaacaaagatactaatgaactatgagttgactcataggccagaagtatataaaattaaggacgaaatatgtagagcctagacaatccaaagagaagcacctttaatactagtaattgaactttcattgaacttaatgcatttcatatatctttgttgggtgggggctgcaactggtttgtgttcaaactgaagataaattgtttgaaaatccacttaattgatggataaaaccttctgtacattttatgacaggtaaaaaatgaagttagttgattctggttttataagcaaacttgtgacttcctagttatagtcctaaggaaagctgaatgtgttttcctcctaaaaatgcaatgactccagggtagcttttgatcaaacccactcctaatatttgtaagacctgaaacaagagtaaaaatggagacccatatcatacatgtaaatgtaaaagtcatttaaaaagctaccgaactcttaaatgtgctctatactccttacttgataagataacttcttgatatcttggaaagacagatttaaatttaaaatttttggactccttgggattctatgtcagaacatgataatgtggggagttggcccttggcctgccaccctttcctttttatcctgcacatctaagctccattcttacttccccacaaaacaactgccctgggccaccccttggaagactatggagtatatgctgtctacaaatagacatgaaacacttaccactgctgtattccccatggtcttctctaagtcattatggattgaaagagaaatggcaatgattatgacagacataagtcagatgcttttctgtatcaatttagatgattatgtgtctttccacctttattctgttaatgcagtgtaatacactaatcaattttcatatgctgaaccatgcttgcattgtagaaataaatactacttgtataatgatatgtagtataccatggtgtataaaccctttaatgtgctcttgactttagtttgctagtgttttgttgaggatttttgcgtcaatacttacggatattggtctgtagttttcttgtagtgtctttgtctgactttggaaccaggataatactggcctcattagaataagcttggaagtatctyctcttkttcaagtttttggaagagtttcaggacaatggatgttaattctttaaatgttttgtagaattgtccagtgaagccatctggtcctgggcatttctttgttgaggagtttttaactaytgattcaatctctgtattcattattgatctgttcatattttctatttattcatgatttagtcttagtaggttgtttctaggaatttatccatcttgtcttaggttattcaacttgttagcaaacagttgttcatagtggtcttttataacacttttttatttctatggcatctgttataatgtcctctctttcatttttaatgttagttatttgggtcttccttctttttttcttaattagtctagctaaggatttgtcaattttattgatctttttaaaaaactaactcaatttctwtgaatttttatattgttttttgatttttctatgtcatttatctctgttgtaatctatattattttcttcttcctgcttactttgaccttagggttttttttttttcctagttccttggatgtaaagttaggttgttaagttgagatatatatgtattttacattatacacttaacagctataaacttaaccctttaacactagtttcactccatcccaaaattttgrcatgttgtgttttcactttcatttgtcttaagatatttcccagttccagttccccttattacttatttggcccattgattgtatgagaatgtgtttaatttccacgtatttgtagatttcccagttttccttgtgctactggtttgtagttttattccattgtaatcagaaaagatactttgtatgatttcagtcttctggaatttaagatttgttttgtggcccaatgcatggtcttatcccagagaatgttccatgggtactcaacaatacatgttctgctatttttgattagagtgttccgtatatgtctgttaggtctaattggtctataaggttattcaaatcttgtttccttgttgattttctgaataattctgttcattgttgaaagtggaatattgaagtctcctactattattgtgttgttgtcaaatttcttcaatcctgccaaagtttgttccatatatttagattcatgtaaatacagtaagtcctcatataacattgtgataggttcttggaaattgcatctttaagcaaaacaatgtacagcaggcttttaaataatgtcattttgttcagtgtccttttatcataatgttgagggaaaaaatggctttgttgtttgtactttttcttaaagctgcagttttcaaaaaactgtgacaacattgagaacttactgtatttatgcaccaaagctatgaggtttggtgcataaatatttataattgttttattttcctggtaaattgacccttttgtcattatataatgtctttctttgtgtcttgtaatggttttttatttaaagtatattttgtctgactttaatgtagccacttctgctctcttttgttaccatttacacgggatatctttttccatcctttcactttcagcctatgtgtattgttagatctaaagtatgtctcttrtaaacagggtatagttggattctgttattttatccagttaaccagcctgtatcttttgattggggagtttaatctgtttacatttaaaataattaccgataggcaaggacttattgccgttttgttagttgctgtctatgtcttgttcctttcctctctcattgcctttctttgtgtttcattgatttttttttctagtggtatgctttcattcccttctcacttccttttgtgtgtattctacagatattttctttgtggttaccattgtaaatccataaaacatctcaaagttatagtattctatttcaaactgataacaacctaactctaatcacatatgaaaactttctcctttactgctccacttctccatttgttactgatgttacaaattacatttctatatattacatgtacattaatatagatttatgggttttgttttgttttggggttttttcatttaaatttcacatactaaatttacagtattacgtattactatatttttccatgtatttacctttattgagaaccttatatttttatacagctttgtgtttttgcctgctgtcctttcatttcaacttaaagaacttcctttagcattttgtatagattagctctaggtgatgaactcccatgrcttttctttatctgggaaaatgttaatttcttcttcacttttgaagaactgttttgccagatgcagtattcctgattaatagtttttttgtttttgtttttgtttcctttcagcactttgagtatatcatcctactcctttctggccttcaaagtttctgctgagaaatttgctgataatattatggaagctccctcatatgtgataaatcacttttctcttgctgctcttaagtttctgtctttgactttacacagtttgactataatgtttcttagtatggttatctttggattttcctcgttggagttctttgaatttcttgatctgtatgtacatttctgtccacagattggggaagttttcagccattttttcttcagataagctctcttatttttttctctcttactttcccttctggaatacccatcatgcatatatggacctggttgatattgtcctaaatcccttatcatctcttcacatttcttctttcttttttctcctctgctcagtgatttcagataacttgtctgcaagttcactgattcttcattctgcctaaaactgttgttgaatacctctaataagtttttccattccgttactgtatttttcagctccaggatttctgtttggttcttttttatagtttytgtgtttttcttgatgttctcgttttgttcatgtatcattttcctgattgttttcaattgttggtgttctctctctttttttttttttytttttttttttttgtgagacagtctcactttaccacccargctggagtgcagtggcataatcttggctgactgcaacctctgcctcctgggttcaagtgattctcctgcctcagcctcctgagtagctgggattaaaggtgcatgccaccatgcctggctaatttttgtatttttagtagagayggggtttcaccatgttggccatgctggtctcgaactcctgacctcaggtgatccacccacctcagcctcccaaagtactgggattacagatttgagctaccgctcccagccttcttttagctcattaaacatccctataatagttattttaaattcccagtcaggtagctgatagacctttgtttcttcagggtaagtgtcccgagttttattttgttcctttgattaggccatatttccctattgctttgtatgctttgtgatttttgctgggcattttgaaagacaactacctcccctagtctttgcatactggctttgtgcaggggaagaccttcactaataccccagctgggagttctagggcctctcaaatgttttctgatattttgctccctctggcacctgcccgtggaactgcagctctaatatgcctctcacctctgttttcagtgccttccaaacgctggtgctgggcgtgtgagtgcccttctttaattaatacagaaaccagttccttgggaatcccccagaaagccagaatgttggatgtatggttcattcttttatttctgtcctgagggaggagctctggcatggggggtggtgggttcttcttggttgctccgctattccacatgggagagaggcatgcatgaatacactgaacactgtgaaattcatttcctaccactttcattggaattccttcttggttttataatggtgtgggtgctgtagcatctcaactggtctctcaagttctcacaagggtattctgatccgtatattgttaacttggtaccttagtggtggaaagagggcctctagctttctagtctacccctatagctattgttcttttaagaagtatgttttcgaagttacatttcttctctttcctcaatgtaacattttaggaaacaccaccttaaaacaaagcaaagcaaaatatagaaaacaagaacctggcttgactgccacctttaggggtacatcagatcagttgtttacgtgctgattcagccttcattctctcctatctttttggatggaggtgagagtgatgaacttgtcttgcttttctcagaactttagggtaaacctaggcttatcatccttccttaactgctaggagggcatatactatgtatagatgatgctgattaaatctttggagctttaatgatgtgtgacagccaatgaatttttctaatatagtataaaaacttcatgattttatatcattcttaaaggaagaggctttaaagcagatgtacttcttttttcattttaaagcttaagtacttagatatatgagagaaaatgaagaagtatggaaatttgatcctgtacacttagcttcatgaagagtgagatgcattttctgaacatagccccattgactcttctggaattagttggagataatttggtttgaaatgtcggctttgtaaatagaaatggaaatcattaaaacagataaaagtgaacatagaaactgcgaactagaataaacagtatgttggaaatgaccatgtggctcaattttgcatcagttttctacttctttagttcatgatgcccattttatgtcatgtgattacagcagtgtgatcagagcagttagcatattcttggcattttctcctcattaactttcacttcttcagagggaccttgagtaaaataaacacatttgagcagtcttaagcaaattgtttgaattgtttcctcagtatacagaatcaaccaaaagtaggttggattgagttgagttgggtttagtttaatatcatactttactacagcatcatacatayatatacaatattacctagcatctgtagcacccataaaggattctctaatgcatgtgaagtaaaaggaaagagwgtgtttaagtcctgactttgaaactgttgtgttaattgtgaacttttgctgagtctatacattgaagaaggtaacactcagcatgttgagatcacaactgctagattagtgcttggaggcagtagctgtgctgatgtgaggcattaatggctgggtgagttcaatcagatatcctgcctccagtgtctttgtgtaatggtatttactagatttcaaacagactgctgagaaagatgaaatataatctcatgtattatctctgtcttgaaaaaattagataataaagttgttctcttactggcrtatgttttattaaccttcgtagagtcaacttaaaggacagatgtctgtagaattgaaaccttttgctagagtgttattaagtgcatttttgagttctaggaatcatggggttgagtagagcaggtaagcattttttaaaaccactcagaggacaatcttatgtcatattctgaggttagctggagagaaaaaatgtgatgtaaattgtgtgcaactacattctttttgttgtttttcttccttacagagcctggagaaagttcttgtggaattcagtcacaaggagttgtttgatttctataacaaggtctgtatttttaaaataattttctaatatgtggagtttttttcayaatattttgtttcattttatgaattcttatttttaaatgtcatattatggaactaagttctttaaacttcccttataaaagaccttatgtttcacaggaggaagtatagcagaaatgaagagaatttgaaaaactaaatcaggaagaaaaggaaaatagttttaattaaagcaataggattgttgctttaatataaaacattaagtaatgaactttgtgattcctagccacactgacactttaaatatatrtaatgtcaaatactttaatttctgggcccaagggtaaagggaaacatgcctttagagatttatctgtgagtatatttcatgtctctttctgaagactgattttgtaatccaggaaaatatactccctccaccccccaactttaaaatattatcaagtaggcagttcttctgccagtgtactgccactggagcatgcgtgtggttatcctgttcagcccaccaccactgtacccactccctcatatgtaagcctccaataaaaccccatgtctcattaaaaaaaaaattatggagtgataatttaaaaggaaacagctgaagacacttaaaacaacagtattaagaaatcttctttctttgaaaatttgaaaacttaaattttcaagcacaaattctaatatcttcacctaaaaagaaaaatattctaagtggtaattttattgctatgtgaatggatttaatattcatagttaccagtgctattttttcctttctatttgcatgtgtctgaataacacttgatatgagtttcgttcccttcactaacgtctttttttttttttgtctttgtaaatagctagagactatacaagcacagctggattcccttacatgatgttttcgaagactgtttttttcatcacgctcctgccacctcattattttgcattgaagatacattgccaggttgtgttttctgaaggattcagtgacttgctttctgtaaattatatggcttatcacttcttagacaaataacaaccaatagagatcattgttaagaatactgaggttctaatatactttctttagttctgtgagccaacagtaattattaagaacactttccctttaaaggaaacaaaagtgaataccatattgtttttactgtcatagtgttgctttcttgcctgtcctgcttagtttttacttgctggatgataccataatgtatcaaggagcgtccatggatacaagataagatgtgtaccttagtagaatacagagctttggtaattacatgaataaaattaagaaaatagccatatacaatcaaatacactatggcatttttatttgaatatgatgagtatattttgcttcggaaataatataggaaggaaatgtaaaatagtgagtagtatggtatcagttaattccagtctgagcttctctgtcaacttcagtttctctctcagtttaatgatttaataatagtccaggtttttgtgtgtttttctttatactgcaaattaataatgattcactttatagtttgggagacagaatcaggtcttgaataaaataattgtaatgagtgctaaatgggcaccattattcgaatcagataccttttatattctctttccataaatacgttgatttctgtcaataaaatttttgtgtcttaggattggttgaagtgtacattttttaattatatacattatagtatattttatgccatgaatgtatgtaaatgaatacatttacgtacatttgttaaaatgtatgtaatgaatacatttacatacatttgtttaaaaaaaacttgaattttttatgaatgaaatttctgtattgtttscaaaaagagagagattcaaacatgacttkcttcacatgaagaaatttgatttcagaaatgtcctatatttaaataagcaaagccattgaaattgaagcacatttcttatttgaagcatctgggaaatacaactgttaagtatctctcaaatattcagtatatggaatttatacccacatttgtttgtatatctatytgtaagctgttgcttagaagaattgagagtttggattatttcagaatacaactattacagttttccatagttgattgaaagtttttaaactcaaactttcattggtagaatatctggaaggcatgtttgcaatataatgtggcttgtaggatctctcctacttttttaygctctgttttgccagttctcaaaagtaaatacctgaagtcctagaggtactataaacattttggtaaacattctttgagactttttctcatgtacatgtaaatatacatcatcccaagttaaatttgataggccttcctgacagtagccatatagataaatagaagttttcgttggtttagtggcaaaactgaattcttaatgtaggtatacaagttaaatatgatggttagaaatgaagttttctgaaagtagttcgttgtatgctccctaaaagaattagctttatatttatcttaagaatatctctaaacctatgcaaaaatatggcaaatagtcttctttccattagtctagttcaacaaaatctgactcagagacagtaaagaaagggcaagtagaagatctaatgccaactaagaagataattatttctgaaatatttagttgaagataactttctttcttaagacattactgtkgttatgatgcacaagtcaaagaacatgtggcatttccaaagagtattaaatgcatgttacttttttataaaaataagataaatgagattaatggggcttggaactgcaatcttggtaaataaagttactgtatgtctttcacgagtgtgtgacatgaggattgaatagacagaattgcttgttagaaagaggaactaatttttgtatctattacaaattatatttgtaattcttccctaattataaattatcatgattatttttatttgggaaataccaaaaaatcataaataactaayctaaacttacagaatcctatcatccaaaaatggccattaatgacagtttgatagatttattgcagtttttttgtatccatttatctttcttgttcattttttcttctttcctaacaaattgaagtaatgccataaattctgtttcatactttgctttatgtacccttacagcatgaacatttttcatatctttattgcccaaacataattttaatgtatattaaatagttcatcatttgaatgatctatactttatatactttatatttctcaaaataattaaattgtccaaattttggcacatttagattattcaaatttttgaacgtagggaactcactgataaatataattatacataaaccctagaccacatctctcgtgatattattagtatagattcctagaagtagagttgctrtgtcaaaagtatgaagatttattttctattttcatctttaatcggattttcattataaaaaaacaaggccaggtgtggtggcttatgcctgtaatcccaacactttgggaggctgaggcaggaggatcacctgaacccaggagtttgagaacagcccacgcgacatggcaaagccttatttctataaaaaaatacaaaaattatccaggcttggtggtgcatgcctatagtctcagctactcaggaggctgaggtgggaggatcacctgagcccaggaggttgaggctgcgagtcattctatcatcccactgcacttcagcctaggtgacagaatgagaccttttctcatacatatatatatagctgcccattaaaacaaagttgcaccattttgccatctcacttcctggaagtacctacctaatactgcagacatttggtgggtgcagtagctcatgtctgtaatcctagcactttgggaggctgaggtgggcagattgctggagcccgggagattgagaccaccatggtcaacatagtgagtcctgtctctacaaaaaaaaaaaaaaaaaaaaaaaaaaataataataataataaattagccaggtgtggtggcacacacctgtggtcccagctacttgggaggctgaggtgggagaactgcttgagcccaggcagttgaggctgtagtgagctgtgatcatgccactgccctttagcatgggcaacagagcaaaaccccatctcaacacacaaaaaaccagacatcttataatacaaatatacacacctcttgtgtattttcaaaaatacatttatatttatttcaaggcctttgatatatattgctaaattgtttctccaaaggattatattaatttgtactcccacaaacaatgaatgagaactcacttgcctcaagccaccttcagcagccccttcttccttctatacatttcaccctcaacattttttataacctgaggtcagtgtttgtttaggaagagtgatgggacatattgagatatgtcactttgataactatagaaggattgaaaaggaaatctctttaaaaatcaaatatgagagccaataactcagtattcaagtgtaagggcttcgaagtcaggcatttatttattcaacaagtaatcactgctgagtatggtgaatatggtggcaggaactgtgtatgctaggtaccatgtttacagtgataggcaaaactagttcttggcctcttgaaatgtaatgtgttagtgaaaagtaaacaaatatggaataaatgaacaaatatgggacaaaatataattggattctattcagagaaaattaatgatggaaccaaacttggactggggcatcaaggaaggattctctgaggagtgagatttgagctgagtccaatatgatgagttaagatggcacaatagtagaatagagtgacaggcattctagagagaatggcccatgcaaaatctcagaggatgggaaaggcttagcgcatttcaggaaccaaaaggtcagtgtggctagagtgtagtgaacagatggcatagtggagtgcactacaattaggtagacagggagccattctcttacaagttttgtcgtttttaccaccaaaatgtattgcaagtgtatctccagggcactaccctgtccaagctgccatcaactttgccctggaccacctttcttccattctagccctcctccagtccagtcgttgtacagagctaatttttaaaaaataacctattaattataccatctccctgcctaaaacccttcaaaggatcctattacacattaagtaaaatttaacgatctggtttctcaggacagtgcaaaggttatatccttgttcttctactttgtgtgtgtgtgttgagcaagttaatttgtgaaagttcactttacttatctttgtaataggaataatmatctaactaacatgagtgttttgaagattaagtgaaattcatgttaaacatttagcataatccttgaatctcaatcatataataagcattagctgacatttttataatcattaagaaaataagcagactctctgttgaaatttttccaggtgaagtttgaattagagtcaaaattgtagaaagcttgctatgaagccccttcactttaaacttatttggcattctaataacaactccattttataatcacagattctaacacaatgccaattctgcttttattttttatttaaaaaatgaggtaatacatgtattatgggaccagaatgaaaaaaataytttcttctgagtacctttccacgtggctcttctggctctgagaaatctttttctctactcagtgaactttgatttcttcttaccgtaaataatgtcttctacactttattcattataccaaggatcagcaaatgatggacatgacccaccacttgtctttgtaaataaagttttattggaacacagttgtcttgctaccaaactcactcttgagactttctsccttccttgctttgaagaaataataccatgttataagagaggctgcggatagggctacatgacaaggaactgagggtgacctctaggggctgagggagaacagccagcaagaaattgaggcccttagccttatagcctctatgaaataaattctgcgaacaaccttgaattagcctggaaatgggttttcttgtcgtttttttgtttggctttgttttgtttttttccctgttaagcttctrgatgagagcacagtccaactgactcttattgcagccttgtgagattttaaacaaaggacccaactaaactatgcttgaactctacccatggtaattgtgagatgataactctgttgttttaaacctctaactttgtagtaatttgttacgctgcaatagataactaaaacaacagccatgctcaattgtttacatrtggtctgtagctgcttttgaacaacagcagggttgagtagttgcagcagagaccatatggcccacaaagcctaaaacctggccctttatagaaagaaaggatgcagaaccctgctttatactatgctctctaaaccggagcatccctagagaaataaagtagttggtagggaacacaaaaagtcgtaagatggacgttgtatatatttcaatagcatcacttctactttttgccagaagtagaagaaattacattttctatcctcttttgcagctactgcagccgtggaactaagtgttgctaatgaattgtgaatggaagtgatcattcatctccagttgtcttcctctttctgtgattgaaacccagatttggagctgagtcagctttgagcagacaagaatgctaatgcttaagaggtagggagcaacaagatggaaggaacctgggtccctgaatatacttatagaacacagctgtctccatgcccttgacagaaataaaatatcttgtttgagttattaaatttggggtcagtttaggctatacacagcacgtttgcctgtagcctaactaatatggtggcaacataattttattataattggccagtaatgtacaacatattttaaaatggagatttacattttatggcaaaatgcatataaatgttaaagaggaaatgggaaaccttaaaaaacagaacaaaacctttgtgcttgcagcctgcgaattcaggctaaattctcagtgttactgggaacctatattcacctccctccttcagtgtggttattttgagacaaatgttttgagaaaccataagggtatattgtaaatttcccccaaagtctttccataattctttttctactgttgaataagaggactgggatggttctgatttattcagatgcattagtcagaagctactcaggaattataatttaaatttctgatcaattttgcttccctaaaactttgattttttttttgccatcattatgcaaatagtcctactcaatagaccagcttcatttaatgctaaaattaggaacacattaatttgaggtattttatagtaaagcttaatggcatttttaattttggagaattttaaggatttttaaccattgctcccatctcgccatatgcacactcctgaagtatttttgaagctcttttgcttttctctgaactataaggttgtactagctgttatggaggcctacaatccaaatctaaatgatggcagttttcatagcctactttgttttatttgaaatggaaagttactgatttttatttcaaaagaagtagtctgcaaagacaggaaaggtgaagccagtccagtcaacaaatctgtaaggaagatggtgctacaggcttagagagactgtttcaatctccaaggcaggaaaaataatgaatatataataatcttcttttagtgaaaccagagttcagtcatttttagcatcttttaatgagaacctgattttttaatgatttttaaagatttttccttcaaaaaatctaggtaaaggaaagcagttaatagtaaatttaatagttgcatttatttttttctgacttatgtttgtatttttttaattggcaaataaaaattaaaaacactgtacattctacccaaaactttaaaggaaagtcaataataaagttttttaaatctatgataaatatagacttgctgtaaggcaaggagtgcagtgatttctcaaggcctttcctcatctctccttctgagatttctaagtttcctttgtgcactatttttagtccacatttcaaattattctgcagtttcaaccagactacataaggggacaaaggaaaaagctgctgtcccctggataaggctgctttaacacatcaaccttggaagctccagcattcctctccatcccaagaatgtgtttatgctttgacagaggagcagagtaatttccagctgatcagagaaaaggtgacttgtgtattccagaccatgtgttctactttgcagtccagcttcttactctctttcatgctgctgcaagtagttctacgaacattggggtgctttagaaatactgaatgaatgaattaatagagtatgtagtttttttctgccttgggctctctccatttatttgcacagtactatctaaattcttaaaataattgtaaacttaaagttgtacaaaagtagttttcaaactggtttagccagctatgctggtatttggtaattccattagggaatagccacatcccttctagggagtatctcctgaggtcactgatccttttattcatcatccaggagataaacatgagaataaaagccttataaccagccagagacccagatttctgccctccagaaggctagagcaagttctcgcattgctgtgaagagatttatgatagtcatgaagttgacctacacatgcttctgggtactgatgctgcaagactgaaaacagttacattcctagcaatttcagagttgttttatgtgatagggtcaaaatgaagtgctccagagagacatcaacaacattcttatactgaaatatatgttcagtgtgtatagattttctgagctcattacccagaagattttaatttcctgctgaaaagagtatcttgattaaagacacacatagacacacacacacacacacacactcctgtacacactgcctacaaacaggctttcctcactgatgtgggacaattctgacaaagtttttttaagtctccctttacatggcacagattgttccaacttatcacaaatataccagctggacaaaaatcagataaagttgacatagatagtacagaaagcaggcaagataaacagagccacacagaaagctgttcagtaacagtttagtttaattttatgcaactaagactgtgcctttagatgtagagcccaatgtgagggatcagtttcttatgatagagtaatatttataacatctaacttttctaccttatggcagaatgccctgtgaatccttgaaactcaaggccttctttgtcagagttttggttcttactgcaaagtatgttctttccttatgtcatccaaacaaagtaactagagtagtaaaaagaaagtcagtgagtttggatgcattggctttctggacttgcaaattatccagtgcaggcatttctcacacagcaggcttggaggactctgggggtggccacctttgctagatatgctattaacctccttcatatggttgggtcagtgatcttgtaaagttctgcttggcaggctcataggtgttgataggtgccctaaactgatggaccagtagagggtggccaccatctgtgaggttatttcttcaggccctcaataagcacttacccaaatgcactgattttacagtgctgtggttctgtactggattccatgaagcacccttcccgtctctgattttccaggatcattttccttaagttaatgccattcctgtaaatgcatttctactctttgatcccttttctttagtttacactttcagttaaatctgtaagcaagataatctttgaaaattattttaattaatgtttatatttagctctatagtctgtgtaaggagatccagggttacaagagtctgcttgaaaaaatagagccacatcagatcaaattttctttccataggattgtattttttgaaatgttaaaaattctcctataattaaatatttaaaccttatttcatcatttttctaagcgtttttactttagggtttactaaaggaagccaaatcaatttcataaacttctctgtataggatttcaaatagaacatttttatggaaatagggtgaatatgttatagaggaagaaatgcttctgcctctctgcctacttccctattggccctctctctcgttctcccacatcctttagggaagaatggcttgccattcatgtttggtcagttaaagtattggttggccatgtttatcgatggccagatcaaccataaaaagaccatgcccatggatggtgctccttttgcatttcttgtttccactctatgggatggaatagagagagtccagattttgaggagaagctgagatgtgtggggaagaggggcaggtagggagggagtgtctttcttaggccttaagaatgaaccatatgctcttacccaaccttaccaagctctgaaagataattgtcattttggttcccagttgctatcagtcttcctatgtgtagctcttctggaaatgtcagcatcaggagtgaatggcaggataagatttgggcatttgtgaagttctctagtcaggttccattaatgcaatcacaattccagcctctgtcctttatcagtcgtcttagcagatctgtcttatttttcagtgataaacgtagagagctatgggcaaaaacatcaaaggtatcattcatatctttcaattctcaagtaggcctcgagtaagagaagaaggctttgaaatcagttactctgactcccaaagaagacctgcttgacacttctaactctccattctaaatgagcaaaaatttcatctccctgaaagcagagggaagacattgctgggtcagtttcaaaggctcattggttaccttcctgccacaatagaccattgagagtctctgctccccgttcctggcatggtggaaactgaccttacactcaccttcctctatgtacttctgagtgagaacttgaacttcaacatccccctctagctccctaggaaagtgaagaggtatggaatatgccctcagtagcctggcttgattctatcttttggctgtttgctgcatttgtagaaggaaaagaacaatagaaaacattgcttctctctttgcagactaagcatttacagtggaacatagctaagtaggaaaccaagaaaaagagaggatgagatgttaactgacgaatcaagttactcttgtgtgctccagtaacagatgtccaagaggcttcaggcctacctttgtgcctccttttttaaacgtatttgatcatctgcaagttggactgatttacatcatatgaaacccatgagatgtgcttgaggcaggagaatgaatgaattaaaggctttttccgtatgttattttcaccctgaagtagttaacctatcccagtgtgtatcaaaagcagaagaaactgattctgcaatgccaagttgtttctgccttggaccatttaccatacctgaatcttatgtgtctttttttttttttttttttttttttttgctgaacctcatccacaaaatgtgttataggcagtacaaaaaaaattatttaaattaaattagtgatagttagctttaaaaaacatgcaacatttcagttccctgcaaggggctctgaaatgtccaatgatatgtttcagagccattaagcttgtttgcctctttctgcttctccttcctgaccactgttgtgggggcagagagccagatgtcaggaggttcctttcccaaaccagttagcatgtcctcatattttgccctcttcagccacagcttgttctcggctctctccctgcatgaatcaacagcagtcccaggacaggcagagaccatcaggagcttaaccttcacacagagagagactccagatctcagagagcagtgctcaagattccaagacagaaccctgggattttctactgtgagtttcatgctgcaaatacacaaatcaacagttattttgtatgtatactcaggtttcttcatttatttgaaaaggtggaggaaggaatggagaaaaatggacagaggtaggagtgtgtgggggtgtgtgtgtgtgcatgcatgcacgtgtgtgtgtgtgaaaaggcattatatttaaagaacaatggtttttgatagccttataattactatattctaataggatgctgagcacggccttggccggttaactctatttgcttagtcattcgttcatttacacatgtatttacccattaactaataggccagtcaaatgaggttacttctggagtgctgtagttctgtttgcatatcaggatctacaataaaagcattgccttaggtcctcaggtagaggttgatcaggggcagaaaggcttttcctgctgactccaccagcagcattctggtaagatgaaaaatggagaatgattagtgtgggccacccttgagagactatggttagtcataattgagtagacacagcaataccttcacgagactatccatcaagaaataagttttttaaactgtagttctagtaagaaagacaaacctatttattttgtttaagtaagtgtgcttggtgccagggattcgaaataagataggggctcatctctttggccttaattctaggctaaacattactcagcttgatggt

SEQ ID NO: 98019 - DNA, 177429 bp, Homo sapiens
  misc_feature (1)...(177429): n = A,T,C or G
tggcactcctggggccccatgaagcaattatatacaatcataccgttcaccacttgtgaattcggtagcagtatgatgtattgactgaggacaaagtcacaggtttgatctcggtgctctgctttgttcctgaccagattaaactggggaaaaagttggaaatggttctgcaaaaatctgtcaccatggtgggaaaaacctaggctcatttccttctgctgatgggtctgtgttgcatctagttttactttcaaacagctgcagatatcctggaaatgggaagtggaagtgtctgaactatagaggaaacaaggcccaggaaaggatttctccagccacgtggagctccctgagcttcctaaagataggagtcccacccttccaacctccatccatgaatagcaccaacatccacccagttgttcaagccagaaacccatccttcacttcttcctcccttccctttaccttccacatccaaatccatcagcgagttcacttatagcgctgcaatacatcctgaatctctgtatctcatcctctccactgctgccaccctacaccaggtcacttctcatctactcaagtggcctcctaagtctctctgcttcaaatcctgagcctgtccagtccactcttcacaagcaactgcagtagtcttttaaaaataactcagataaagtgtgagccattatatacattaccctaaattgcatagtttgcccacctcactagccgtagcccctcattatcctccaggctcactggctttccttcaggaccttgactgaagctctcttctgatttggggctttgtaacttgctgatgtccctgcaacacccttccccttccctgttgcttttcctggctaattcctccaatattctttaggtctcaacttcaatgtcactatctcagagaagggcccttgcctgcccaaatctaggtatcttacctatgtacaagtaaaccttcttattttccttcatcaacacttaacacatactttataattacaattgttcaagtatttatccagccaatatcacattattctgtaagtttcataagggcaaggattctagtttaccaaggtcgaatttggaaagataccaaggttttagaaaaacaccatgttgcctgctgtgatgaagaaaagttactataactaggtataaaattcatgtaaaatatggcaatttctaagtgaatggtatattttttattacatttaaaataccttacttattttgtccagtcatcctgttatttgcttgagttgctgagcactggactgctgccttaaagggtggctcatgcctgaaacccccactacaaagtcaccagcttcttgcagtagccatgctggcattctgtttgattttgtgccagctccttctagaagtattgaggtgtttttttttcttttttaattaaaaagaaattgaacatttaaaaatgcacaatatgaaaataatttgaagtgccctaggactgtggttctcaaactttatggtgcatcagaatcacccggagggctagtcagctctccagactgcctgattcagcaagtctggggtagggcctgaaaagttgtacagagttcttgggtgatgctcatgctactggttcagagttcacactttgaaaaccactgtcctggggtgtcacgaagctatggtttataaacactgaattagcttaggtatttgtaaaaagaatagacatttaagagatcatccaaatatgtagttacataatccattaaccactctttgtcagactggtgagcaaactatacacagtcactgttttcagaacaaggaggatgtaacaaatcacacctggaatccgggaagatgttagccaatcttgatttcaaggtcatttactcaaaacacagttctgaaacccctgctatggaatatgcagccagcactgaactgggggccagaacataggctgccatccacccacccattcaacagttgttcttcacattgactctgggcctcacactagagaaactgttcacaagtcagacgctacccctgctctgatggagttcacattctttgaaggagaaaggcagtaacaagttcacaaataaacaggataacttcagatggtgatagcagctctgaaggaagcaacaatagaataatggtatggagtggggcctagggtgctactttagatggggtgactgaagaagaactctttgaaaagatgacatttaagctgatacctaatgggtgagaatgagtcagcctttgaagaaggatgaaaagggtttcaggcagagactggcaggtccaaaggtcttgtggagagaccaaggttggcatgttctaggaactgaaaggccactgttgccagtaagcacctgcaggaagaatgtagaaagaactcggagagggcagcagaaatttaaatgtttttcttagtgggaatggaatctactggaaaactttgagcaagagagtgatatgatctgatcaacattttaaaaagatcaccctggtttttgtgtcgagaatggactgcagtaaaaatgaaatcaaagagccctgggaggaggctgctgttagcatggagcttggtttaatcaagtgagatgggaaagcactttgcaatttataacattgtggaaatattagcagctattgcaatactagttctgatttaagcgttcatgtctggttcagaattgcacataggccgcacaactataatcccagcactttgggaggctgagatgggaggattgcttgagcccaggagttcaagactagcctgggcaacatggtgaaaccctgtctctccaaaaaaaaaaaaaaaaaaaaaaaaaaaaatcagctgggcacagtggcgtgtgcctgtagtcccagctacttggtacgctgaggtgggatgattgcttgtttccaggaggtggagactgcagtaagccgagatcatgccactgtactccagcctgggcaacagtgggagaccccatctccaaaaaagcacataaatacaattctattgtgaggctgattagggactggattcgcccaagctttattaactggtatccttggtcaagctatttcacttctctaagcttccttttaatcactttaaattggaataagaatacacacatttttaaagatgttgtgaagcttcaatgagatggtccattaacatgatttagcccagtgcctcttggcccctaaattagtattcattcatgttagctactatttttattaatgtctctgatcttcaatttcttcttcagtaaaatggggcactaaaaactactctgtaaagaacttaacgtgataaaatatgcaaaaccctagtccaacaatacatgacatccagtagaaactcagtacataggagttcataggagtatctaaatgacatagaatattgtagctagggacaccaatgtcctagctgtcactgtaactactgttaagtgtaatgaaaacagaaaatggttcacattttataggccagatttacaaccacattcttaggacacaaaattttcttctagtaaattaagtgtattccaatgacttaacatagataatatgccctccttcccgtcacacaaaaatagaccttcaccctcatcagaatccagtctgtcactatgtatctgcacagacagaaaacataaacgttgcagacattttggttttgagttactgcctgctacttccctgtgtttccgctgctgaattcaaaatctgtaattatcatcaagaataaaaaccaaaacaaagccaaaatgaaaataattacttgcaaggagtagagagactggaagaagacagccttaatcactgaactttatgtccaattcattaagatggaaaaacccttcctagtaaatggccaacaattccagaaggcaaggattacatctgtattctttaagtaattaacatagtgccttaatccagtggggggacccaaatgcatttcactgaacaactgaatgaatgaatatacaacttcccaattatgtatagtgcatctattgagaccactacccaaacttgtccttcctgcttcttcagggtcttttcctgtgacctcatataacaaacacccccaagagttgaacagatgttctcttggtactggattctgaaggagttatgaaagtcaataaataattcaagatggctaaagggtgggtcataaaccatctccatcaattggtggtccctaatacaggtgtgtatcagagtgaactgggtggtgtttctaactacccaaggacaggtctctggccagatttattgattcagaatcccaagtgattctgatgcaaatctctggtttagaactactgtttcaggattgtagaggttgccagggatgtgagactagtaactggtatgtgtgccaaaagctctcctgcacccacgacagacagtgctacctgatcagtacagccttattctctgagcctgcagtcactcaaaagcctttattgtttttattgtggtaaaatatacatgacataaaatttattttaaccatttttagtgtacaatactatggcattaagtacattacattgttaagcaatgatcaccaccagccagctccagaatgttttcatcttccccagctgaaacctattaaacactaattctccatttcctcttttcccccagcctctgtcaaccaaagttccactttctgtctctataaatttgactacgctagatacttcatagaaatggaatcatacagtatttgcttttttgtgactggcttatgtctctgaatgtcttcaaggttcatctgtgttgcagcatgtgtcagaatttcctttttatccattcatccattgctggacacttgggttgtttctaccttttggctactatgaatatatgctatgaacatgaatatatgtattagtccgttctcatgcttctataaaggactgcccaagagtgggtaatttataaaggaaagaagtttaattgactcacagttccacatggctggggaggcctcaggaaacttacaatcttggcagaaggggaagcaaacacatccttcttcacatgatggcaggaaggagaggtgccaagcaaaagggggaaaagcccctcataaaaccatcagatctcatgagcactcactcactatcataagaacagcagcatgggggtaactgctcccatgagtcaattacctcctggcaggtccctctgacgacctgtggtgattatgggaactaagattaattcaagatgagatttgggtggggacacagccaaaccatatcattatacaaatagctgtttgagtccctgctttcttcttttaggtatatatccagaagtggaagtgctgaatcacatagcaattcaatgcttaattttttgaagaagttataccatttcccacagaggctgcaaccatttcacacttccaccagcaatgtacagttacaagggttgcaatttctccacctcctcaccaacacttgttattttctgctttgatagtagccatcctcacaggtgtgccagaattcttcttgatgcagcacttcaagcagccattgtcaatcgatcaaagttgacaaataagatgaaaaccatctgttatttcaaaagtgtgatcatatttctctaaactgattaagagagctcaacttcttttcaatgggaacttataactgtaactgtaggatttaccaggtattgatggtcatggtgatattggggttgttcacatggctgattgtaatgggggcagtaacaaggacaccaggagaaaggacacgagggctgccaatatgcagaatgagtaggcagagatgaggcctgagaggcactgcataaggtagcatcgaagacagtccaggcaaaacaccaagtccaggaaccaggcaggacaaatgatgtccccacatcctgacttaagtggtaatgggattttttttttccttttccttcctctggtttcctttctctgtcctttacttctctattgcctgtgaatccatggtttgaatgattaaagtttttgatatttccccaagtgcagggttccaagcatgacttggaatactattaacactgtggtccatgtgaatgacactgcttggacttgtgcaatgcacaacctgtagagcaatatgggccaggcatgcctagtgaaatcgaaaagtaaaatgtctatcaatatggtagtggttacacaaattatagaagatccatacagctttttttttttaaaaagagaatagcactttatatactgatacagaaagattgccaagatattgttaaataaaaaaaaatagaaagcaaygggtattgcgtgctaccatttttgtaaaagaggagaaattaaatatatgtacactaaacatacaatatctgcttgtatgtagatgaaatattactcaaagtagacacattaagtacagacacattaagtactcccttctgtggaacgggaattcggtattaggagatgagatgggagacaaatttattttttatctatagttttatatattttttattaaattttcaaccatggaaatgatggaaatatgttctggctgggcacggtggctcatgcctgtaatcccagcactttgggaggccaaggtggttggatcacgaggtcaggagttcaagaccagcctggccaagatggtgaaacactgtctctactaaaaatacaaaaattagccaggcgtggtggcatgcgcctgtaatcccagctgcccaggagactgaggcagagaatgcttgaacccaggaggcagaagttgcagtgagttgagattgtgccactgcactccagcctgggcaacagagcaagactccgtcttcaaaaaaaaaaaaaaagttccatcatctttcccatgtgcattcctgagctgtagaaggctagcagcttcttcccagactccctgcacctgggatggagaataaggttctacaaactggatgtgcgttgaagggagctatggagtgggaggtgggagtgggcgaataccatcctcctgccactttgggctgtggttgctggcaagcaaggccacggatgttgataggcaattgtgatgcaggcccagtcaccagcttcctgggtgctgctatgaggcygcacctcatagagagatcgccattatatttcctgggagctccrtatctcatggagataacaggtcctttttgattctacttgckgatccctggattgcagctctcatgctgtttacctcaagagcttcgctcacagccccctaactccctrtattcctgcttacagcacaggctgtagctccccaggcaggtcagtgctagaagttgctggggcattctggaatttgttcttggacacctaccaggagtgcactcctctcacccttccaacagattctgtaagcattcagttttcagcattatagccttttctgcgtaaaagacctacactggtttctagttccttcaataaccctgacagaattacacattaaaagtttaaatagatatgatccttgtgtagtgcataagtgtgatgactgggttttcccactcttgtgaggtgtgcctcctgcaaatcttatgatgtctgcatatgacttgtttgacatgggaaataaaatttacataaatataaaaagcgaaagtcatcactaagaaaaaacttaattctcagaaaagatttcttgggcagtgtaccactatagatacttggttttttcaaaaaaattcttattatcttggtaaatcatcaaatatttaatgaacatctactgacttaatagatgagataatttattataataatttatcttatcatattagaaataaacayctatgtgaatgtgtgagaggttttgtgtgtgcacatatgtgtgtgtgtgtgtaaacagacagatacaaaccatgtttccartgaaatcttaggagaagacaaactcaaatgtttccttgttctgtttttatttaactccaaatagctaataacataaaaacattttaaaaaaatctcyaatacccaactattacttttggttgacaacatttgattatttagttcttgcttgtttcccacatgtagtacagaatctatcataatattttaaaagtttgcagcaggcttaaaacctgaatatttagatcctaatcaaaaaccatgatgtagttattagttttgattttaaataccttgctcccacagaacttactaaaacgaataaccataaataggctagctattaattagatctcaatgaaatgcccacatacagcacatacatataggtagtatatatgcttttatcctttactactcaaaggatgatgtacagtggagttatatcataaacacatttaacttacattaactcaacaaatgaggtcagtgaaaaggaagccgtaaggaaaataacatgaaatcctgtggcgatcccacctaaaatgaatgcacacccttgagtaaacccaggtgggtgctgtccatccgctgggtgggcgcttcactccttgtcagttcacatctgccactagcggggcaagcatcttgcgggctgattctagtgttaaaagttatgtgcttttttttttttttttttaacaaaatggcccctaaacaaacaccaacaacttcacttggtcttcaaacaaagaaacagtctttttttccaacataggaggaaaagctacttgttgtggatgtacaggtttccaacatggcacccttctaaagggctttcaaggatcatcctaatagcccattttacctatgtactgaccttggaagctaacccctgagtatgatgcaactccactctaatgtaaattaaaatgccatgatcttaaaaatgccataatattgtcagtataatttaatttccagtttagttccatcttcacatttagcagtgtgtgtctgtggccgtctcctggtgccagcatttcagaatgtactatcacyggctgagaaaatctcacggygagaagagtagtgtgtcataagatctgaacaaaaaagctaccaaagttgatcagtctcagtatgattcaggatatgattttcaattagcaaatggtgcgactgaagcagagagtggctttgttttgctacacccagtgctcccaggaatctcctgtggcctccttttcatgggtttctacgctggcagctacactctacttcttaaacacttggccttagcctgaccaccgccccggttcagtttctatttttaagagcaccattctaatggaaatgtccctgccctgaattaagctgggactgtgcactttaccactagctagagctgttatatatcatagcrtttaggttaaattggtaggtattgatttccttgactgtgacttcgaaacttgcttctgcttcttttagccatgtaggatttctacctgggctgtagatgagggtaaaatatcccatggaggactccttcaataaccacatttggaaaatctgaaaaaaagaaaaaaaaaaagaaaaaaaaaagaaaaactgcttttcttatgtgaaacaaaatataattgcattctgtagaatggaacaaggcaatgcttacggtaaacacaggaatctgcatcgccaggcatgtgcctggttgaggatgtgctatcagtcatgctgcttcagcctaaagccacttgagcacaccaccaggcgcggcaggaatgtgcggccagatttgtagcttattgatttaagggatgttctaacagttaatgctgctaggcctcagctctttatctgaatgttttctcaaaaggaagatggattacactggcaattcaatttctaacaaaatctcaatatacttgaaggaattccaagatttctactgggaatacctcactgcagtttttccattgtggtttacagtgcatttagtccaagttgtcctgagtctacttgttccattagactagcttcgaaagagagcagtaagatgggggtcagtcttcctaacttaaaagggcaaatttccaacagaagccatcctgccaaacttgaaaacacagctccattattataggagacaggaagggaggccaggggtgcaaagtatgttacagcacattccagtcattacagtaggtaaaatgtgaatggattacttgaatgggaaccaatctatctcatggttcagaagtttaatttttaaactttaatctgtacataatgatatccaggaactatcctaaagcactttaaataaatatcattattatgtaagaaaataaaagtagtccaatattttaagaaaaaaaatatgcatctagcctctattgtctactgtgtaaataaaatcatttactaggggattgggcctcatcagaggaggcagaaaggctctcagaggctaggggtaggcagagggagctagccaggtggcaagtctgtggccagagggagcctggagggttcagagacctaaacgaaagccaacatagtgagaaaagtgggaatgaggaggctggagggcacggggtgccccatcacacctgggaagaatggataggagtttgggctttatctgaaactcaatgggaagctactgagggagtttaagcagagtgggacagagttgaactgtgttttgaaaaagatgattctggctgccagctggagaatggactggagaagttcaaagcagacacaagatcagtttggagactactgcagtagttcgagagggcaatggtggcagcccaaacgaggttgaggatggagaaccatggaggaattctagagaaatgaaggacgggaccaagtgacaggttagatgtggctagtgagggaaggggtgaagtcaaggatgcctcctgggtttctggcttgcataatcagagggtggtgggagaagacccagaagaggagtaaaatagaagatcatcaactctgtctggaacttgtgtttgaggcacccgtgagacttgccaaaggggaagtcaagtaagtgatagaatrtggtgacaagtttacctcaacatatatttattgagaggcctctgtttcctggatcgaccacttaatacctgtgtgaccttaggtgagttattgaacatctctgtctctctctttcctcaactgtgaaatggatttcataatagtatctaccttayaggctgttttaaaaattggggagacaagcgaatgaacacacaaactatrtcttagaaaatctctaatacatgaatatccagttatttctggttgatgacacttgatttttttagtgcatgcctttccccaacatgaagtaatggtttttcatgaaatatatctttgaaagcgtgtgataggccttacacatgtatatttagagcccaataaaaaacaataatttagctaagttaattttaattctaaatgtatttctcccacatagaaggatattaaaatcaattgccataaatagagctgttaattttctaaaagatactcaaataggacatattacatgacggtggcagacatgcctttattctttgccactcacaatatagaagtcgatttgaaggtcagtgaaattacattgtaagtatatttagcttaaaaggattcaactaaataagttaagcaaaaaagacataaaggaaaataacattacatactatgggtaactctactgcgctggtaacatgttaagcagtgacaagaacagggcaaggagaaaaatacagcagggcatgggctggagagggcccagagacagggaagtgagggaagaatttgagtgatggtgccatttgggtgatgacttgcaggaaggaacaaagcagcccgctgggagggtgtccgggagaagggcattcctggcagagggaacagcaagtgctgaggctctgtatgtatgtccaccaagagctgaacatatgctagatgctggggatttagaggacaaagccaaagaacaaagataagatagtctgtgwccattactatgaaggaagcaaatagsgttctctgacaaaaagtgaatgggatggaggtgttttaaagcaaggtccaccaactagcgatcagaaataacataatcagggttttgggttgttttytcatccgttccactctactttaaactgtggattttggcttcatcatatgcatgatttactacaatgtccattattgccagcattactcagtaaactgtccttgactttgatwctcattgagaggtgatgagaaggaaggtgatttagggcaggttttgctgttatttttgttggtttttgcttatttaatgaacatgtattgtgaatkggtagaggggctcgtggagagggagaatcagcacaggctctctgaagccgtggcattcaatgtgagccctggaagatgagaggcagccggctatggatggagaaaacaaggctcacggtggaggaaacagcacatctgaggcccagaaagaattccagggtggctagggcaaagtgtatgaggaggtccagtaggaacatgagcctggggcaggccacagagggccttgcaaacaaaccacaggtaagagtctggagctcccaggacagagttgagatggagatacaatattgtgactcaggtgtayacacgtggtaggcaggccacacacaaggagattatctgaaaggaagtgtagtgagaagaggagagggtctatgacagcattctggtcagctgctagagagtggaaggaagtgggaaagccaaggggagacactgtttgaaggaggagaaacagatcaacatgtctaaagtccatgagaggccaaggaagatgaggactgaaaaatatccatgggcttcagccacactgaaatcactggggactttggcaagagttgttttgagtttcccaggaaaatcaaaacaaagaccaaaaggcaaatgcttttcaatctgttaagagagtactctcctgatttctaatgttaaaagctaagggatatttgattattagtattttataagaggataatgcttaaatgtcagatctttgaagacagacactcctctgactttgtagggggcggggtcagtacatctgtgaagaaatttccatacgcaatatcctctggaataataaccttaatatcttgctaagaggcatcataacaaaaatgtgatgcaagtaaagtttctctttaaattaaatgctaaagatttgcaagaatatatcattagtataacacttctaagatcacaagaatctgattcgtgaaactggattggtcaaaattccaagaaaacagatctggtgactggtccttccatacctcccatcccatccatcaaacctgtgatccatttattctcaaacaggagttcccttattttgcaagtcttcatccatattaccatgctaccaatgatacatacgttttactctttccaattcaagacatttacccctgatgtttcttcccagaaagttcctcctgttcttcactgtccaagccaggcatagagcacatggtaggcactgctcaataagctgtatgaattggatttaaaggtcataaaatatcttccctcttctatcaagtatcttggctattctagtccacagtaaccatttcactgtctacacttctgcaggaatttcagtcagatgcatgacatatctgagcataaacaatacatggaaaaagtgcttgtggagccatttttcaaagataataagaataatttataaaactatctatttaatctatattagattgcattatgaatatttgttaaatatgatattttaacatgacatcaactaacatgtatatttgttaaacataagaagcaaacgttacagagagaaagttattcttcactgcgaggatcttataggaaaaagaatatgaggtcatattcctatacagcaaaggcagctcactctgatcggggtgctactaggaagggtccctcaacccttcctrgggaggagcagggctgcgtcctggccacccttcttcaaactgacagctaagtgggtgatgtgagtacgtgtatccttgctatagagagcagttccctttctcctgctcataaggttttattgtcagaaacagggagggtttcaatggattatttatctattactatttagtgactcccagaaacaagattcactatatgcaaagagcacagaaggaatacataggcaacaagaggtccacccatcaaccatctgagagtggacaagtcagggacttccctggaccccaattttctcattcagtcaatgataatatctgccctgcttagttcacaaggttgttaaggaaattaaatgagataatgtatgcaaatgagctcataaagagatgcataacagaacactttgagagggactctgatgaatttaaatttctttgcacagagaaaagactcagtcgaaaatattgattacaattatacttagatcaattaattgtatttaaaatatgcaacttttaaaaatatatagtttgccatcaaagatgctgcaatgtatatacacatagtttcggggaagaggcttttttttgagacggagtctcgctctgtcgcccaggctggagtgcagtggcgcgatctcggctcactgcaagctccgcctcccgggttcacgccattctcctgcctcagcttcccgagtagctgggattataggcgccggccaccacgcccggctaattttttgtatttttagtagagacggggtttcaccgtgttagccaggatggtttccatctcctgacctcatgatccacccgccttggcctcccaaagtgctgggattttaaaaatgcctggccgggaagaggcatttttaaaaaggactagagccttgaatttgaaccytggcatctggacaaaaacaagcagaggccaaaatgacatgatcagaaaaattaaggaccataaataccwttcttccttattactctaattcaaaatagtctggtaagagagaaagaaaaattacatttcctcctgaaaggccagccccaattaaaattctaagtgtcgcttataccaagagcactggtttattggcagattattaagcccgggaccaatgtcactctgttagacctgtattaaaaacgtggtttatgtggtgcagggtcagatcagtaaagagctgttagcagatgacaggtttgattaccgctggctgcaggcaagacatatggatccctgaggaacagcagcacaggctggtgggacagtttgctggaaaggtcaagaacaggcatgtcagcatcaggggacgatggtaaacagaaaacactacaaactagctttgaggggatcaaactgctgtgcggggacgtctcaaggtttatgttctaacagtgtgggtgaataatagcacgcagagtaagagtgaacaaatgggcactgctctcatcttctaaacatttctttgtggaatttgaagcavatatacaatctatacaataaatcattgctgaaacgtgatttcctaaaaatcttgtaatacgattgttgataaaacattctgattacttgcatgaaacaatgtagggctcttattcctccactcttaattctaactggttactcctgtaattccctatcaaatatttataatcttaaaaccaatttccaaacaaaggttcttaagaaaaacataacttgaaacacatcgtaggtgattaaacatttagcaaaaccataatcctattcctggctgatgaggattagtccttaccttgactcttcagactctgtttcatcaaaagatctaaaagttttgaaaaaggaaaaaaacaaaaaaaccacatatgttgagtcaatgtttatgccaacaaaggaaaaaatacccaatattattagatgactgaattggtagttattttttaaaagagctgtgagtttccactgagccacagcatggctatgccccattctaaggaatctgaagactggaatattctttgatttctcttaagattacttaaaaatcctcaggttttattactacttttgggcttgtataatggagaaaacatttcgctcactgccattgctaatgtctattctaaaaaatacataaacatatatgaagcctaacctgcccgtaaatacatacaagttggaacagaacacactgacaacacagtatttgccaagtgtataatttttgttatgcartaagtggaaagtggctctgagtaaacagtgctcatgaggagctgtgacaggtgtttgcagccccatcatccagcagatggctggggtttaacatgactttgggtgtggcctgcttgattttcttgtagttaagtgtggttccttcaggcagcaagaaaatgggtaaacctctctcctgcatggattttcagagagtttgtgatgattttttcccctgtaaatggatacagtatgccatggatgttcctgaaggccttctgaggctagctcagcccatgtcatgtgctgttgctgggccagtggcttatttcagagttaattcttcgggagagcttttcctaattgctgatgatatcaaacctctgggtccttgggttaggaccaatgggtttagaccaatagatagggattaggatttgtagtcctgccactggaagttcctgagagaggcagctggacagtagaggaagagggcttgccttggaaggcctcggttctgcaagctacaaggcaagagatcttgggaaagtcattaaattcctgtgtctctgtttgctcaactacaaaatgagaggagttgcatcaaatcatctctaagatcattcataactttaaaattatatgaatgtgtaccaccaggatatgaattttgttygagtttccactaataaatgagcccataacaagttaattagattcataattcccatcaagtaacatcattctatgtaacagtgtaattgaaaagattgattccttgagtctaaacatgggttaccgaaccatggccatttggccgcaagatgggcataaggactcagaggaattcttttaaccaaaagcagggggcgagcgagtgctgcagcaagccaaaagagtgggcgtggccggcaggctactcgggcatcactctgggctatttgttagatcaattggtcattgaagagtaatttaaaatacacatccaatatgcaaacatgattcttacccacaactttctgcctttggtagagagggcaagtgtcgcacatttaggaaatcaagaaacagtttgggaagttcttcattttctaaaatgacagcctgtgaaagcagaaaacagaattcgaaactgaagtgaagtttgctaggtgatcaatcaaatgaactatttcaaaaagtcataaccgtccatcaaagttcttaccagcaacattcctcacagtcaagatgaggagtggtctctgttttgcccaccaggaattcgggctgacacacatgctagggattgccggcaaatcctgcagtttatctgttctttcattcaactggcatttatagagcacctactatacactagatgctgactaggggacaagacagtggggagccaggtagaaatggttcttgccttcatggagattctaatccagagtgaatatttcaaaayctggcaacatcaataatactgttaagatatgtatatcaaattttctttactgagtgataaagtggtctgatatacattatgtatacrkgtgtgtgtgtgtgtgtgtgtgtatctccccacaggagaccactactatttaggaaataygataaattattttttaactggaagatttagtcaagaaccctcaactatcacctgttttggcattagaatcaactgacatttattgccatttggacagctccacttaaagggtcagtaacaactttactgctaagtgtaaatcagtgtacatgctgaaaaaaaaatctatagagttcttccatttagtgagctctgctacatagctggcatgatggcataaccatgtcagtaatcagagatccagattatgcaatgtcaaggagaaatctgacaaagaagtatgtatcttcttatctatgtatttttaaagtctaccagagtgtgtgaactgaatataagtttgccacctccccctccccctccccctcttctaaaagaccacaggagaaaagcatcaaaggttttatcataatctctgacttcaatacaactattcttaagggtcatttttcataacttatcatgggtaaattttgtccartaagtacatgttgtttaaagaactatgagaatcagtggtgaaatatcactcacacaactgatcaggaatactgtgtaagggtggtgcataagatacataacaagtaacaaaagtgaggtgaaattatgtaccttgtagatacatagttctatatcacatcttgttcttagccatggttcacatactgagtggccccaattcctcatcaggttttgtaatactgttacccagttcaggtcatacaaatgaagtgggtaactatacaggytgccagtcctcctaggctgccctctgtcccacactagagcagaaccctcctggtgttcagtccctggagaggggtcatctaaagagccacttccactgggggctgctackgttctttacacagctcaccattcccatggaagcttaaggaataaaagatagaagaaaaaattggggtgttatactttattcactaaataataatttcctgggcatctattatgttaggcactgggacatgatgataaatcttacaggtccagtggagcatgggctgaagaaagctagcaatgaacaagtaaacacacacactaaacaacaacttaaacttgccttagaatatagtgagatagaatcgaaatagcgtatcactctctaagcgttttcccatctaccaatgcattcatccgtccatccctctgtccctctctccatccatgtgtgtgtatgtgtttactttctcctggttataaaaatagaaaaataaaaagttcagaaaataaaaagaaaaaaaaaacctcctttatccagaggcataatttcattactatttcaattaaatttccttaaatcatttcactttcatctcagtttttacctattcaaggamattttttaggtgcccagaggtcattatttcagtgcctgtaactcaaaaagttctaggcgtcatcacacatataaaactccgaggtattttggctatgacacatgtttcaatgattgtttttttttctagatatctgtttaagaggatgatacaatacttatttgaataataaagcctaatgttgtaacacatgcagacttgttaccccaggcaatagttttaattatctgtacaagtggttgctttcagatttwaaaaaagaggggagggtataacattcttatctccacccccaccttcttaaaataaattaaatcaataacaagtgtgggacacttttaatgacctgaactacttaatttccaggatctttagacatgtcatccatcaccgcagtatggaggaagacatctcttgagtgttcagggggttacttaggtttattaatgcaagatttagggaattttaacaaggtgaattgtttatttgccttgacagatcggcttacaatgcactggctacatctacggcatgatcattaatgacaaaagacaggaaaaaagctatttacactgcaacacagggacgggaattaatcctgctcagcytccccaaacagagttctccaaacagatgatcacattgctttacgtaagatatactggcaaaagcactacagaaaactccagaaatttgcatgaatttactttgctaaattttcaccgaatattctcaaataatattttccataaaacaatgaccaatatgtactttgggatttatagttttagagaaggcagcattgagagttagttaagcatttagttatgtgggcaggaatatttcctaagctctgttttaaaagcttgggagaaaagaactaatacttcagagacaaagtaaaatacagaagaatttacctaatgtaatatattatgtacaaatgactgtcatcaactggtacagagatacaaaagaggaattaaatctttttgttcatacacacatgatcatattcatgagaaactgaacagtaaggctggacctcacaactgttccatytacaacttcttcagtttcttgaaaggcttttgctctgaaggaaccaccccttcttgaagctgtaccctgggtcatcctatagaataaatgtcagttgggtttaaatctctcaactttgctcaacaataagctcctaagttttaaaaaatcaaatttttgaatatcaaatcctatctccctattgttttagattgcttatctttattttttattaatatccaatggttaatcgctttcattctttagagaggcagtgtggagtaggaagtatgtgggctttcaggaagacctgagtttgaatcctttctctttctatcttaaaattaggttattgtgaggattaaatgtctccaagaatctctgatacacaatcagcgatggatagatgctaattctcttttctttgagtattgttgttgtattaatttccaacaacctattttatccattttgaagtttggataattgttcatcgagcaaacagagcttcttggccctctatatttcagggatatttttgagtatcagataaaagctgagtatcctgcttgctggaaaacatacatacatctataattgtrctttcagtggcagggggtttgcagacccctgacagcccagccaagaacacctgcttttagcttagacagggcaatagcactcactgctgggctcacttttctttggcctggagcctgatgcactgtggccggtgctgtgtgccagctccccaaaggacacgctggccttcttgtttcagttttctatctctttgtcaattagaatcccactggagggtatgctgccttgctattagaattcattaatgccttcagctctgggctgagttgaaaacgtttggcattgaggctactgtggtaaaggattctttctaatacaccaaaatctattgctgcaccgattctagagagtaattcatattcatgatttccatgtcttctatatattattctaaaatgcagcagtcagtggtgtggagggctcccaaaattaacaaaacattaaggaaagtatgattttccactctatcgttgctgggttagagtacagctgatgaagtactaccatgctgcccctgttataagaggggcattctgaactgcagggtagcgatgggatcaggcccagtgctatctacttaattacccagygactctggtggtgaagttctgatgctgctcatcccattcctggatgcaagttggcacacatggcctgtcaactaatttatgcagtaaaacatcaagaattcaaaattaatatgacaagtttggacaaaaagctagaaataaatcccaataaattttacaggtatacacacagagtgaaatactgtgagaggcagaattaattacccagatgcaagacagagagtagctgtttatgtgcgagaatcatgggtctcaaattgtaggtctgcaagaagtgttccttccacatggtgtcaaatgmgctgaacagttctctcaccccacttaaggcaatattatcaagcaccccctgccaccacaaaagagaaataagaataaacctaggaagagctagaggcaagcaatgaaaataactaaaagatttcaaaatagtttccataaaaacaagtcatccaataatgggtaccaagaatggaaccaggcagtggaaagtcaaggggataatgatcttttaagttaactaactgttctgttaaggagggtggccactggttatccagcattttcaaagctgctggaagaagaagaaagtactgtcaaaactagcaaggaaggagtcattttctaattgaagcgtgtgcaataaaagtagtaaaagtgacatagtatgaaaagaataggcactgaagagcatcaaaatatcctggactctttaattgacttgcagattggagatggtatagaattaacagagaaatgcactaaagaaatttccatccaatctgtcatttaggaatataggcagacaaaaatcaggttattattatggtgcacgtaggaaatggggttaaatgaaagaactgttacaggtgtgtgacaggctatttgactcacttcgatattactacatccaactctgataaacagtaaaactgggcaatagagtgtattttgtaaaaaacaaaaaaaaattatttttctttacacaatgttactcactcttgtaagaataaatgactttctctaaagcagaccagatatttcttcagaaatatcactttaaatgaagaatttttaaaaatgtaaactctatgaaagcatttataaaaaacttcctgcatggggcagaaaaacaacagcattaccaccaacagcccctgtaagctcaatgtttacttcagaagaaatgctctttttattgaaaaggtacaattatcatcatgtaacacaaatcacaaaatcccaatttttctaccttatcagctttataaaatcatgttcccaaaggataccattgattagttgcacatgttctttctgtgacatcccaaatacttaattgtcagttatcttttcttcttcagtaagtaaaatgtagtcacaaaattacagagggacttgttctgccctaaccttcgtgagatgccatcatgcagtggaaaacactggtaaaatatcacaggataacgccgtccgacaagggagacatataaacactgtaatgatttcccacgagtttccattttagaaaattgtcactaaggcgagcataaacggtgacacatctccactgagaacacagtgaaatcgaacgctggcattctagttaggtccaaacctacccagcagccaattataacaggaatggaacatcttgttgaaaacttggacaagaccactttgctaaccttctaagatcatagcacagggctgtgttgttttcactgatttgatccttttattcccttttcaaaacacatacacacacacacatacacacacacacacttctttccattgtctatcagggttgttataaactgtagagaacctctttgtcacaaaagctaaggtactgaattaagtcaagaggtttacaagagcactttaagctctttctccattccatctagtttggtttgaaatgtccggctgctggggtgacaaagttcaccactgaagcttttcttctcttcaccaggaaagatgcttcataccatatctacttcagagatacggctaaaaacaaggagggagaaaaatcaatacctcctcactgcagtaaatgggctgcagtgtcactgtcctctgggacccaaacctaagagctcacagaggctttgtagtcctcagtcttctacttaccacttccctgcacctggtcaaaatttcacaaaatgagccataatcaggttagcaaaggaacacttttaaaaaggcagccagtaggccgggcatggtggctcacgcctataatcccagcaytttgggaggctgaggcgggcagatcaccaggtcaagagatcgagaccatacctgctatcacagtgaaaccccgtatctattaaaaaatacaaaaaaattagccaggcgtggtggcaggcgcctgtagtcccagctactggggaggctgaggcaggagaatggcatgaacccgggaggcagagcttgcagtgagccgagatcgcgccactgcactccagcctgggcaacagagcaagactctgtctcaaaaaaaaaaaaaaaaaaaggcagccactaaacagatttaagaaggatcctgaccacctgaaaaataaaaatcagatgtgctctgaagaacccattgtaccatgcatccccctttttgtgtgtgacaccatttgcaagatgtgtctagcctgtgccttggtaaaaactgcactactcaaggaattcaaatggatatctgctatggtttcacagggctttatagagtatcttgcaagaaatctgaggacctgcactaaacgctgaatgccgaaaagggcccatttaaaataataatgaatctgtgcaaagaaataatataatttggcttaagaagatttgaaaaaaaaaaaaaggaatacatttctgataatgtggctaaaaggaaaaactaaccagggaacaaaagaaattggaaaatcaatagtctttggagctattttaatatcaaagcttacattctgtgtttttctggaatccaatcatatagaagtatttgtttagcacctactaactacaagcattatgctggggacacaatggttagcccaacaaatatagtcctgtcctcccagggtttaccattgggtaggraagatgaatgctgattcacagcaatgaatgtgaaattacaaactgaattagtaccttaaaggggagtagctagtttccttgatcattagtaacaaagcacccctattaacctgtagggtgaaggaaagcttccctggggaagtgacccttgagctgggagttgaattagctaatgagaataatgtgagtaggatattccagcttgttcaaaggcctgtggaaagtagaagcatgacattaaaaaaacccttaaggaaggtcacagaaaataataaagctaagcaatgggggcacctaacctggagaggttaggaagggcttctggatcatgtgaaggatttttttcttttctctgtagacttgggagtcattgagtgatcttatgtgggtgggtggtagatggggtrtctcactgtacatgacacaatctgatttgtattttgactacaactacaacatatgtagtagtgttcatcagatccagggaccacgcattaaatcctctctttggctatctctaaactgcttcttaactaactcattgagctaattttaatgactatatgtttcatttcatattaggtgtctctagcttcaaaactactgttcgaattatgtatcatttcagcgtcattcattcattcattccccaaatatttactgacatttactgcatgcataatagcactatgctacatagtttaattcttttcttatttaattttattggaatattttatctttcccaatatttttctattatatttataaacttaatttattccacagatatatttaagggagccattgaaattggttcaattaaaacacattcttgattttccttggattttatcttaacatctcaactaattcttacaaatatataaagactttcagactaagaaaggcaacacattccattaatctttctattaaaacaacaacaacaacaacaacaaaacgactgggtgcaggggctcacacctataatcccagaactttgggaggccaaggcgggtggatcacttgagggcaggagttctggaccagcctggccaacatggagaagccccatctctactaaaaatacaaaaaattagctgggtgaggtggcacgtgcctgtgatcccaactactcgggaggctgaggcacaagaatcacttgaaactgggaggcagaggttgcagtaagccaagatggcatcaatgcactccagcctgggcgacagagcgagactctgtctcaaaaaatggaacaaaactaaacaaaacaaaaaacaaaaggatctggactcataacatttcaaaayctgtttgacaacttctgaacagctcaattcttttcagcaaataactgggtacaattactttaaagtcacatattatacatatttgatccacttaaattacctgtgtattgaataaaaatgcacttcaattacacataatagataatgccaggatttatgaggcattttctggatgatggaaaaaaaaaatccaaataaattttaaaaacaatcataggctgggcacggtggctcacacctgtaatcccagcactttgggaggctgcagtgggtggatcacttgaggtcaggagcttgagaccagcctggtcaacatggtgaaactctgtctctaccaaaaatacaaaaattagtcgggtgtggtggtgggcacctgtaatcctagctacatggaaggccgagacaggagaattgcttgaacttaggaggcagaggctgcagtaagccaagatagggccactgcactccagacaacagaatgagactctgtctcaacaataaatacataaatatatacatacatacatacaattataaactagctacgtacctgtaagagaaacctaagatcaggagactacggtatttaatattagtgttttacaacaagcgaaccaaaacagatttaataattcaaataatayggtaaggcatttagttaaatacaaacaatagaatggaaatgctgttttactactttatagaagaaacagtaatcagaactaggcttataaaatgttccctacagacagccttaggagactggtttttaataaaagatttacaattagcacagcccatatgtgttgatgaattgatgtttttaaagtgtttacggtgctttaaagcaatttgctctctcaggccccttaaacattcccccaactacctagtttattcagcattctctttctttacatactgtacactttgacccagctccagcacagctggatttcaagtggtatagtctagatagatgaggactttctaggtatatatattcttactgtactatagtttagacatagtatactaggctaacatcatttttttaaatgaagacttccaacaccattttatatttgttcrgttataasaatatatttagtcacctgtttaaatgctacagtaatgtaattgatgctttacatgaatttaggaaccctcaatgagcaaacttcaaagtgcacagtacttagtgggaaaatagtgggaaatggttagagagtgtgacaacagacttataagatgtgtagctagtcctcagagaaacaatgtatgaaaagtggcccttgtggagatggctcataggctataaaataaaaaacatatctataaagaaagttaggaggaggggcttggcctcttggctgcaacaacaacaaaaaacagtcaatgaagttgttcactaaaatacacaggtaggaatagtagcctactgggacagaacacaatagcaagaaagatgagaaatyagggctgtctacacatggctggtaaggactacacagggggtccaagctggaacctgttctctgagttcagggaaagaaraacatatgtaccctagcccttctcccaaatctaacattgaaatgaatccttctataacttgggagttaaattacagacatttgttcagggacctatacacaagaatgaatatacccttttctgggagttttccagattacaccagtctttttgcatctatgcaagatccagtcttcccttcttctttactaatggaataccaattttcttggggtatgtggcaagctgccaagctaaaaataacaaagarcaatatcaaaaactaatgaaaataatataccctgccctactcttccccaacatttcccaataacacctgcccccgcccccccacccggtcccttagcatgtgacacagatctagccaacaaaatgtcagaagaagtgactggatgggaaaagtcaaaaagcttccttaaagtgactggtcaggctgcagtggcccccatctttttgctcatttctccacccctttcctccttcctcttggctagaatatgggcatggtctttgrgcttagttgtcatcttataattatgaggaaaaggccaaaagaatcaaggaaatgcaatccctgataatcttgagccagtgagccaaaacccacaactacctaccactttccttctgagtgcttaaggttaaaactcacttttagttaagtccttggatttggctttttatctatggtagaacacataaacccatactgatagagccctcatgcttctgcagattgtaaagtcctgtttttggcccatagaacagaatactaagtagcatgattgctataaaaagagagagaaagagaaaagaaaaagaaattctgatattctatttttaatttactgctttagtactgggtagaacayktaggggaaaaaagaaaaaataacgttgatatgctatttttaatttactactttaaaaaagtccataacacaaataatagcatatgaaaaataaaaaagcaattaggttcatgcacagtctataaaaagaaaaggcctaatacataaaaagtttgtaaacctaactcagcaggtgccaagaacacccattacaggacagtaaagaaatmaagaatataggtaatgagatgaacctaaacaaagaaaaatgtaagctgattatctagaaaaatatcctcccaaatttggtcttttaaacaaatcatagactgtatccctatggaaatggagtgttttgttaaacttactttacaaaagaaatggccaaaccattgtagaatgagccacagggaataatttagcattggctggtggaaaaaaaatacaattctactttaataggtctttttaatcacaaattttatgatgatttaacagccttccattaagagcaattaaagggggatagcaagaatttacactaatattctagcaagttaaaatgtctacatacatctttgagcaaacgtttcctatcttgaagttcttagctgagtttgagggagatatactaatttaattaaaaaataaaaagctggacgatgtgcctctggtatctcargatcaagtttttgaattcacttctcctccctgcctatggttatccctagtacacccccgactaaggagccagacatcactggggctgggcagaagctcaggagacacaaaggtactcctaaaaacaacagataaaccaacaacctagatagcttgtcaggcctatttaaccactctagttggccagacaaactgtaccaggcagtggtctactcaaccaccctcacctcagtctgttccaaccgtgtcctggaaaggggggcagggaagtacctgggaacacctgacaggcatgctcctttttcctgaataatttaaagaaagagaacattttcttacatggttttatttacattatgattaacttctctttaaaaagcttgtattttatatgtaatccacttgtgttgtaacttcctagccccttaatgcatgcacacaggccaaagaaagtatttgttctatagacttggtatgcaaactcatttaytcagatctcaaaaagcactatctctgtgggccaataagttccaataaaggccttctgtgcaatggtgttgccccgctactattggcgagacttccaatctactgacccagtactttctgactcccattagmcccctctaaattttctgccctcttgtccagcttaaggagctgtgatctaccatcagaatcagtcccctgaaccacctccaaacccatcagcctctctccctctgctgtactcgggacagctcagttctggctgaatcccagcaatctctcattcatgcctctacccaagctgctaaacactgagaaaaatcacagaatacaaaaaagactggtttcactttaaatttaagctcttatcctcaaaatattgtccagaaatcttgttacttttctctagaacagtagttctcaaaytaatcagaatcgcctagagggcttgttaaaacagtttgcttggtccaacccagagagtttctgatctagctggtcttgggtggggcctaagaattttcatttcaaataagttaccaagtttctaggtgatgccgaagctactgayccaggaaccacactcgaaaactattgctctagaagaatcagcctttacccattttcaaaacttatcctcttctcyttttatctccctcatcccttcctccaccctctctcccagctgataaccacgcttcacacttcagagaatgcagaagccacctggcttgatcctyctcatctttatcccaacaactctacctatactgcacttccatcgatcttctcctcctcctgctatagcggagaaaacgtccctccttccatcagaagccaattcctatatctctgctctggctctcaatccactccttgactttctcaaatattcatttctttagttattttgctcttctttctcctagttattcactagtcccatccatccctccatccatccatccatccayccacccacccacccacccatgcatttacctatctgtctcttcacctttccatctctgctgaatcattcctatcagcacataaacatgcactctcactataaaacaacaggaaaaaaaaaatcccttagaggctatagcccatttctctgctcttcatggcaaaagttttcaagagtgttcaaccgatgctgtttccctttcttatctccagttcattcactctttcatgctctgcaaattggcttcggcttccaccatcctcagcttgccatggccacaggttgcttttgrgttgctaaatcacttctaacctcactttactcagcttctgagcagtcaccactcaccctgaaaaccaccctcccacttctcttttttctgtgactctttgggtttgtttcagatcacattctcactctcctttgtagcctcttccttttctatctgaactcaaaatgttgggacttttcaaggcttagccagcatcctctccctaagtccactaactgccatggattttaaaaccttaaggctgatgaggtgaaaattcacatctccaggctagacttcttgtctgggatccagactcatcaaaactmaatacctatttaacatctccacttgaattkcttacagacatctgcaattcaaaatgtccaaagcagaactcagtatttctttgaacaacaataaaaaaccctgcctctctatgacccatcactrtccactttcctcatctctgccaatgatagccacatccacccatctgcttcctttctctcacctctgacaaccaggctatcacagcatcctctggagctcctcttccactcattcttactctctgataacctctttcttgctcccttatttgtttccttcagagtgctagcaattatttccttgataggtttacttggcttctgtccactgractccagctccaagagggcagggctgagtccgcctcatcatcactgtatctctgcagcaaagaaagggctctgaacgcatgagggttgttccagaggcagaatcagggccaagaaaggttaaatagtgagaaagcgaactttggcttagtataaagagaaactttatgctgaagtctcctcatggaatgctctgctttggaaggcaatagatgccaccgcaacaagtgtctgacccaaagcagctggaggcccagttcacatgaatgctgaagcaagaacttagagactgataggaaattaagcaagggatttgctgaggaaacaataataacatctaatatcttcataacgttttatggcttgctaagtggcctcacatataatgggtcgcttaatcctctcaactacctttgaggtagataagctcaagagcactttacagatggaaaaactgactctgagaagttaaatgacttgcatttcttcctaataaaccaagcccagatccaccaagtggacaatctctgtgtctttttgggcaggagagttgagaatccaggtcttgaactctccctgaagtgctcctaagagtccttctctcaccaccttctggtccttcaatggtcagctgttccccctcatcctctggcccagggcaggatccacagtgcctctctcaagctctggtgaaaggtcatgctgtggctgactatgtacataagactcaaccaaggaggatgccacagggaaataaataaacacggtcatgacatgagatgatatggttataagttaccacaaaataagccattgttcatctaaatcttgggaaaaataatccaaacagaacagtaatgctctcgctttgtatcaaatggactctgctacccaaagaagtccctctctgacctctttattatggctcattacaatctcaacttcaataaggacaaaaaagagaaactaaaaacagcttgttcactatacctttttttctttttcgttttttcatttgttcactaaactttttaatgcataaggaaaaaagcaggctaaaaattaggttaatttgtctttagtttttaaatcctattatcctaataagtgctaaaaactcatgtcaaaattgcaaacatttcctgactttttttacacagyccactacgtcttcatttctaatagaggaaaatagctactcactaaagcaatctgtcttgagtacaattttgcaactggaatataactgagtcagacagcaacctgaactctgttaaagcataacttcaaataatgcagtgagaagaagcttcccaactgcgataacttttcttgttttgtctcactgatatttccttatgagggtttttgggtcagagtaaactcctgagggctgattgacattctctttgaaactaattacattaaacagcagatgcccacttcaagtttgagcaggagagtayaagacgttcagggaattcagtgcagttggggttaatgctctcattttttaggagcttctttaagcttagacatcctttgctccattaactgtgtcatttatgtaaagaaaaaagaaggatcaatctgatagattgaagtttaaaagtataaaatgcagtggattttttttttctgtattgtagctattctaagaatacagtctgaaatgcctacatacttttaattacataacatgttagctaatcatattttcagggaaaaaatctgctattcaagttacagcttccaacagattgctgtgatgatcatatggcacataagaggggagcaagctacagagagaagagtgatggatctgtgtctgtgactgaactctccatcagtaaacccagttttgatagaataggcatttcttcactaattaatactaatgattactctggaaaaaaacattgatgctgatgttacagtaaagcaacaaatatcaattattctttagtggccttctgttagtaatctgatgactatcacaataatatgaatatttagcaaacctaaaagtacaccttttcaaacataccaacttcactctaaatataaatagaagcaatacagtcatagttttaaaatatttgctcattgtctgggaaacacatagtgagacctcatctctacaaatttttttaaaaattaacagggcatggttgcacacgcctgtagtccccacctactcaggtagctaaggcgggaggattgcttgagcctaggaggtcaaggctacagtgagctatgatcttgccactgcactccagccagggcaacaagatgagaccctgtttcaacaacaacaaaaatttttcactactttgttggttatatgtgaaggattttgataaagtctgaatagccagtcattctaacactgaaagctaactctgagtcctggctaagtctgctctcatcagtgactccaatggagttgattttgagataaacagagtctaaggtaaatggtttatattttatgcagatggtatatggtataggtaaatattcaaaaatgcttaaaaatcacaggttctaagtgtcttaagacagagaaagaacaaaagagaagagaaattataaggtgccttttagttatgcaaaagtaaataagaatatgcaaaatttaaattatattccatttaagagaaaaaaggaaggaatagaaggaaagaataatcaaaatacaatctaaattgttgcacttgcaaaaaaaaaaaaggctgaaaaatctcacttgagaatatgtctcatttacttccatctttgggactaattatatmattattcacttaactattgagaataaaatattacttactgaaaaatagcaccagtggtcttatttcctcagtttcttggtgaattaggtgtgttttagaagcagatattcaaaattctatttggagaagcagatcaataactacggatagcctgcattattattaccagtactaatactattaatactattcaaatgttttttaaaaaagagttaatattttttcaaataaaatatccaatgcctacacaatatttaatgtattatccattatagataatacaagaaaatctatggacagacttaatttttattattcttttaaatttaatrtcagtttttattctactaaaggacttygctgaaagcaaagtaaattctttgagccacctacaaarcaaagcaaacscctccccctttagtaactgtatcactgtacatatttctttcaaacacacatattacattgtaataatctgtttaggtatctaaaaggccaacctaaattcctcaaaggcattatgtgttaacaacttgttctgtgctgggcagctgccacagtagmtttctcaatatctactgaacattggcatctttctcctaatttgttgacagcatgccctatattstgataactacaaaatttcatttcataaaaaatgctttttatatcagttttcattttagattacccataggtcccatttttttccagtagcacaaataattaagttgattataattctaaattctgtaatataaaaagtagtttaatttgtcacaaaatacattttacatgctaaatgcagaatatgattaaacatgtgttcaaagarctgctcaaaacagaggctgaataaatagcagtggaatatgatacaacagctccttcagtttaastcaagtccacacaggaagcactggcatgcccttgacataggagatgctcaagaaattgaggttctccttccttttccccctagcattcactactacagggaatcagggacaaaattaatacagaaaaggcttctattatctaccagtcattcttccctggaaaacaaatgtgtgtgccaaaggaaatgacaaaggcacaaacagaatgaaygttacattactctcttccgcttcctgccttctawctttttctcttgactatctggaagggcaggttccaaaatccacattttaagatatagccataaccttccaaggtggtctatattccaaggacaagccaccttccaaacctgaaatggatgagtgagtagagtcaaagactaatggataagaaaaggaaggcactaccacttttaatcccagctacttgtgaggctgaggcgggagaatcacttgagcccgggaggcagaggttgcagtgagcagagatcgtgccactgcactccagcctgggagacagagcgagactgcgtctcaaaaaacaaacaaacaaacaaacaaaaacaaaacaaaacatgtatttgattttttaaatctcaagtttataatggaaatttcttaaactgtacagacaaaaaaagtagattctatgggcatgaggcaaatattgaggctgttataaataytctaaaactatattgtactgatggtcacacaactctgtaaatttcctaaaaatgatttaatggtatacttataatatgtgcattttatgctatgtaaattatacctcagtaaaacctttttaaaagtacatctttttcatcttctcactctcctattgctgatatttaagagtcaagttgtcagaggatttggctaaatactagaagatgctgaccaaatttttcctgggtcagccaaaagactgttaaatatggctaatactcagtgtagggtgttgtcaagagaatggggaggactttttctgatgaaaagctaattaagcataccactttaaatatatctaattttatgtcagggtagaaatactacttatctactaaaaacatactaaattggcacaaataacatatgttttgcatgaattaagacaagttctaaccttaataattttgctttaatattttcacaatcaatactttggcatgcaaatggagtgctgggagcttggtttagaagtattcaagtatattccccacgatatcatctgcactttaagcttacggattccctttgacctcatggacacagctctcatttgtatgggacaaagcatgagcaccggcaatttcagaggcaatggctctctgttcccatacttgaactggtcttccaccaacagcaacctgtagagtgaaggtcttctttcttttcaacttccttttgagtctgacaaggctgatgccaaatactcttttcccaccttggaaatgaaagctcatatttcaggggcaaagcatggagtaggtattctctgtcacactagatactggaaggggcacagagtaagtaaattagtcaaggcacacacccgactsagcacaccagcatttcaagtgtgcctcttgcaccttaaactccttctgcttgtcaagactgtctcttatgtgaaaaccttgagaaattagttgagttttctactactagaagaagagaaggtcaaaaatatgaaatgcaacttcattttrttatagaagaaagtaaattaaatttcaaccccaaactctttattgccagagtaggagtggatattgggaagagacaaagctaacatttacttgggatcaagcaaagtgaacttgcctctctcctccacaaacaagaaaaatagcatacaataaaacatttccattataaggaataacagttactgaaatgcttttaaaacaattatttgttctaacaggttggttgtgagaagaacccagtaaagtagatctgcagagttctgctattatgggcaaacagcttcatgataaattttttgttacttatatttaaaattataaattgcaaaaaaaaattgcaaaaaattaaagttggctaaacttgactaatgtgtgtattactgaataaaatgtatgttttatgatgtaagtatacttactatttcttcatattgtttttgacaaaaggacttttgatatttaatgagtgtggaaaaggaaggaaaaaacccacaatcggtaggttagcctacctatcctagtttttgagatataaagtcattgttggacacagcttcaaggaaaatgtttataaattcaacatctgcaactacctattaaggaaagtcattttaaaaacaaatgtggttgctaacaaaagattcgggtggaccgctgaataaatggagatggcacaactggtaaacatggaaaggtgggctgtcrrcacaacttgtatattcatttttatttaaggccagaatgctcaacggtgggcattatgtggtgtatctaaagattacctaattttaccccgaaggcaggaggagaggttttatttagttttcttcaaatatcacatgcttaaaattagtattctctgattattactgtatttgttattcactggagacatctgcataagtgatgaccacaaatgttctttctttaaaagcaccagggcataaagtggccctatcacatctaattatgttaattcaagttttcatttaagtaggtatgcacggtttccaaacaaaatttttttctttaggatttgggggtgggctcataagcccttcttggcttccaccctggtccccagatctacacccyttttcacaatgcagtgggcatgccgggttgcaggctgctccttaactatggaagcaaatcaatagcagctgaatgccatctgcttcgggccgcagaacagaaccaaagtgtaagccatgcatcttcccttattgaaaggttattttatgcaagtaaacaattcatcgtcttcttgcacgcttgatgctcatttaccactttgatcaataaaatatgcaaaacaacaaaaaaattgaatcctaagagtagttctgatgccagcgtgatagttaatcaatacccggcctctgttcatgagggcaaatggtgggggtactactattgtaacctgtgaaatccagagtggtagacgtagctctttcagaaaagactgttttagaagggatatattacatttaccctgtagattacacagaatacattctcattgaattaaatcaaaacagtaacatcaacaggcttgaatgttactgattcaaggcagyagttcccaaagcctgagaaaaagtaattttggtttatatgccttttagaatttcaaagacaaatattggatgagatcactgacatgggcctttggacagcaaccttttcagctctttctcagctctgccttattaagtcttggttttcaatgtattcatgtttcaggtgaactcagtttttcttctaaaaacaaactgctgtgggaatttcttgtgcactgtgtttctttcagtcataccacaagctgccttattacattaaacctcttgacaattgattcaagcagaatactttctcccaacaaagaaaactatatcatctcacagatgctactgtataaaagccctcaattgaagactgtttcctagaaaaactgaaaacactaaaaaagctgggaacttttccattttaactggatatctccagctgaactgtgaattctagggtagcacaggaataaaaataagataaattaggtatctttctagaaagtctaacaagaagtttgatagaaaaaaatatacactgccatgtgaaattagaactgcccctgagaagacggcttttgttttagcatgttttcagattttctgtatgctataaagtgacaagagttacttattaatcaaatactctttacttttccagataactattacaaaacagttcaaaacctaatcttgttattctttaccctggtctactaaatttatcacacttgtaaacacttctctaaacattagatataattcgtgttattcaatgaacatattttgtcctagtttttcaaatgtataccaaagtgcattgttaaagattaaataatacatggggaaaatgagtaatgctatttgttatataggagaaaagaaaataagtatgaaaagtcttaccaggatatcttcaatatgaaaaaaaattgaaacattccaccaaattcttatcaatgtttgtatatcatttcacatcaaagactattacaaatatcttacaaaatatttggctgagactaaaattttccccaaagttctccattatgaaacaggctaaattttatggtgaytgtgggaagtaatttccttgtgatattcctatcatcataagaactcaaacaatagaactctctatttccagctattactttaaaatcataatcttagaagtatacctaattcctctactctgatgtttaaacactatatattcttaacaatttaaatacttatttaagtcaaataaytgtgatgaaattaacagcaacagcatgactatagaagtgcagtagctttgagtcaaccagcagcaagggtataatttaaaggcagaaatttccagtgcatgcaccgttagccacagtgaacctgttactgctctaaagggaattgtttgcctcttattagattttctacagcacagccataagtgataaatgtactgctgtactcactgtcaagttaatcaatgctgccaaagttttgttgacctaacagtaatccataaagtgagcagcattttctctatccctatgacatctcagtccacagaagggctacgaatccaaaagtagcttcttatgagaaagtgtatgtattgggaaggggtgggggtgggttggagcaagagagggttgatagattgggtgatttttaaaattagcaggtattatgggtcccctgttccgatgaaaaagcatttaagaccacagccacaagtaaaaattcacttttaatgtttaaaaccctaataaatgaataactctatgaataaaagatggtttcttccacaaccccatttcttcacttcaaaggaaaacaaagtacaccaacccacaccttcaagaatctcaaagcaaaataaccattcctagtgtatggtctatgcctgtctacagtgcaatrcactaccaaatccagtacagggcaccagtaataagaatggtaatgtggataagaaaaaaaaaatccaaattttgctccactgtaaatcagagaatgtgaaagacataccattagaaaagggaaaagaaaggaaacaacaggagaggaaaagctgccctgcaaacaaaccgctgccatgctctcacaagcaatyatagacatatgaaatatgaattgcaattgatttttcttcctggggtcactgtgctctgcgttttacgcactctaggcatttatttgggcagcaaactgacaagtttttgtagaatgccctcagcagtgtaatctttgctcaatcacggggacttcatcgtggcttctcttccttgacacttgtccctcccaaaaactcactggcaagggattccttgataaagacatggaacaatacaattactggtgtaaagggctggcagaacctgaccaggggatactagcaaccttttgtgtgccaatgaaaaataaatagcatcaatctggaagagtgactttcatccttgtacttctacagcaaattctcttatttggctagtgataatatggcacaattactaaactcatgttatttgtcttgctaaaagaagaataacaacagaaagttgtggctatgagaataaataacacaggtttcttacacttaaacagcactttaaacaactccaatcataaaaagataagatctttttgcctgtttkttttttttttttaatgactgagtgattacaagatttcccacattttggtcttcacggacctccaaattgtgaatgttactgatcagaagacaaacactatattaaaaaaaagtgtctctggagaatttcccatatttcttcctatatcagccataggtgttggacatctttccttatcagaatacatacatttaaagcattctttggaatttccatggagcattttgtaaatctttccactatatgaatattccaatacatttttaaccaaatcccctcttattgggcaatgttaataattatattgcaatgaaaatgccttacatacagcacggccaaattatgtaagaataattgtaagacagattcatagagagggaattgtcaagttggtttctcaaaaggttgctacaatttcagttcccttaaaggtatatgggaatgattattcctttgtacccttaccaatgatgggcacaaatgttttgttttaatctttgcagatccaaaagttaataccttatctcatttaatctaccatttcttgattaatcaagtatcttttcccatttactgatcatttataatgatttttaaatgaatgaattctgccaattttcttattagattgtcttcctcctaatgatttgtaaaagctctttgcatatcataggaatcagatctttgtcatatgtcttgaatatattttttcagtctttttgtcttaggatttgaatttgtggtgacatttttgctgtacaaaatttaaaaatttttatgccgcttaatttcaaaagttaaatatatcaagtaatacagaaatatccctatcaatgtagagaatataatacaatgaaatactacataatgaaatcatgcagacatgactcattgaaatataggattatgttccaagctatcaaagaacaaaaaaaaaaccataaatttattttcagcaaacaaaaagaaggattaaaataatatcaaatatcatcaaaaccaagtatgtatctggcagccttgggacaacaatcaaggaggattgagctaaagttaggtgacactgtggggagcccagatgggtgacatacaggactgataatctggtgtggagaactaagaccaataccataagagctataacagaaggaaaaatgtgatggggtaatggtcaactaaagtgcattaaggtttaagaatagcacacctggatgtggagaatcaagaaaagtctgagctgacattgattccagagggcccaaaacatcattgtggtcctccagttaaagtaggggcttacggaggtcaggtaattaatggagttttaggtccactgattccccggactcatcctgtggtcatttccccaatgccagaatgcagaattggtatagacatgattagcagctggcagcacccacacattggctccctgactggtagggtgagggcaattatggtgggaaggccgaatggaagccgttagagctgcctctacctagaaaaatagtaatcaaaaacatcacatccctggagggattacagagattagtgccaccatcaaggacttgagagatgcaggggtgatttccaccacatatccattcaactctcctatttggcctgtgcagaagacagatggattttggagaatgacagtgtattcgcataagcttagccaagtggtaactccaactgcagctgctgtaccagatgtggtttcattgcctgagcaaattaacacatttcctggtacctggtatgcagccattgatttggcaaatgcctttttctccatttctgtccataaggcccaccagaagtaatttgctttcagctggcaaggccagcaatacaccttcactgtcctacctcagcgtacaacaactctcgattttgtgtcataatcttgttcacagagattttgatccattttcccttccacaaggtatcacactggtccataacactgataacattatgctgactggatcctataagcaagcagtagcaagcacactggacttattggtgagacacttgcatgccagaggttgagaaataaatctgactaaaattcaggtaccttctacctcagtgaaattcctaggggtccagtggtgtggggcctgttgagataytccttgtaaggtgaaggataagttgctgcatttggcccctcctacaaccaagaaagaggcacaatgcytagtggacctatgtagattttggaggcracacattactccagcccatttattgagtgacccaaaaggctgccagtttcgagtccagaacaggagaaggctctgcaacaagtccaggctgttgtgcaagctgctctgccacttgagccatatgacccagcagatccaatggtgcttgaggtgtcagtggcagatagggatactttggcaggccctcataggtgaattacagcaaaggcctctaagatttttggagcaaggccctgccatcatctgcagataactactctccttttgagagacagctcttggcctgttacttggcttttgtagaaactgaacgcttgactatgggttgccaacttaccatgcaacctgaactgcctatcacgagcaggatgctttttgatccatctagccataaagtgggtcatgcacagcagcttttcaccattaaatggaagtgatatatacgtaatcaggcttgagcaggtcctgaaggcacaagtaagttacatgaggaagtggctcaaatgcccatggttcccactactgccacccagccttctcctccccagcctgcaccaatggcttcacagggagttccctatgatcagtggaagagatgactaggtcctggttcacatatggttctgcatgatatgcaggcaccacctgaaagtggacagctgcagcactacagtccctttctaggacagccctgaaggacagtggtgaaggcaaatcttcccagtgggcagaactttgagcagtgaacctggctgtacactttgcatgggaggagaaatggtctgatgtgtgattatatactgattcacgggctatagccaatggtttggcttgatggtcagggacttggaagaagcatgattggaaaattggtgacaaagaaayctggggaagaggtatgtggatggacccctctgagtggtcaaaacctgtgaagatatttctatcccatatgagtgttcaccaaaggatgacctcagcagaggagcattttaataatcaagtggataggatgactcgttctgtggacaccactcggtctctttcctcagctattcctgtcattgcccaatgggcccatgaacaaagtggccatggtgtcagggatggaggttatgcatgggctcagcaacatggacttacactcagcaaggccgacctagctatggccaccactgagtgyccaatttgccagcagcagagactatcactgagcccgtgatatggcaccattccttggggtgatcagccagctacttggtggcaggttgattatactggacctcttccatcatggaaaaggcagaggtttgtccttaccagaacagacacttactccagatatgggtttgcctatcctgcacgcaatgcttctgccaagactaccatccatggactcacagaatgccttatccacagtcatggtatttcacacagcactgcctctgatcaaggcactcacttyacagctaaagaagtgcagcagtcagctcatgctcctgaaattcactggtcttacaattttctccatcatcctgaagcagctggattgaccgaacgatgtaacggccttttgaagtcacaattacaatgccagctaggtgacaatactttgcagggctggggcagctctctaggaggctgtgtattctttgaatcagcatccaatatatgctactgcttctctcatagccaggattcacgcgtctaggaatcaaggggtggaagtggaagtggcatcatttaccatcacccctagtgacccactagcaaaatgtttgctttctgttccctcgacattatgttctgctaacctaaaggtgtcagttccagagggaggaatgctgccaccaggagacacaacaatgattccattaaactggaagttaagattgccatctggacactatgagctcttcctacctctaagtcaacaggctaagaagggagttacagtgttggttggggtgactgaccaagactatcaagatggaatcagtctactactccacaatggagaaaggaagagtatgagtggaatacaagagatccttttggatggttcttaatattaccatgccctgtgatttaaggtgaatgggaaactacaacagcccaatccaggcaggactacaaatggcccagacccttcaggaatgaaggtttggatcactccaccaggtaaaaaaccatgacccactgaggtgctggctgagggcaaagggaatacagaatagacagtagaagaaggtagtcatcaataccagctatgatcacatgaccagttgcatgaatgaggactgtaactgtcacatttcctccttatttttaacagaacatgtttgtgcaagtatacacttaagaaaatatcttcattttatttcctttctttttcccttatcatgtgatataagataaatggatttcttatcagcatttaaatgttaactttatgtaataacatttaggttaagattagtgagcttctgrttgcatgaagaatagctgtattacgttacacataattatgacctcattattgtctttatttgaagattaagtatgatttcaggagatgtgtatgggttcaagttgacgaggggtgggcttgtgatggttaatactgagtgtcaatttgactgggttcaaggatgcaaagtattgttcctgggtgtgtctgtgagggtgctgccaaaggagattaacatttgagtcagtggactgggagaggcagacccaccttcaatctgggtgggcagcatgtgatcatctgccagcgcaaccaagataaagcaggcagaagaaggtgacttgctgagtcttccagtcttcatctttctcccatgctggatgcttcctgcccttaaacatcagactccaagttyttcagcttttggactcttaaagttacaccagtggtttgccaggggctctcaggcctttggccagagactgaaggctacactgtcagcttctctgcatttgaggttttgggacttggattggcttccttgctccttagcttgcagagagcctatcgtgagacttcaccttgtgattgtgtgagtcaattcatcttaataaactgctcttcatacatacatctatcctattagttctgtccctctagagaaccctaacacaagggtgtactggaaataagcctgtggggtgccttggcaaacagagatgagaaaagaggagggtacaggtacagggtctataatcacacgggccaagtcaagaggttagttagtaaactagtgtggctgacacataagatttgtgcagaatatggccaggcgcagtggctcatgcctgtaattcyagcactttgggaggccaagacrggcggatcacraggtcaggagatggaggccatcctggctaacacggtgaaaccctgtctctactaaaaatacaaaaaattagccgggcggggtggcrggcacctgtagtcccagctactcgggaggctgaggcaggagaatggcgtgaaccctggtggcggggcttgcagtgagccaagatcatgacactgcactccagcctgggcgacagagcgagactccgtctcaaaaaaaagatttgtgcagaataaggctggaattccgaatacctggcctaagaatatcacaattttgtagttggcaaggagccaygaaaggttttcggtaggtagttatcacgatcagagatatataccccacaagcaagagtatgccgcattctaaacgggaaaggactttaaaaataaagtttttagaaatagagcagttcatttaataaactataaacaagtagtcyaggaagaatatcttcaaattaaaaagttcagtaggtagtttggtaggtaggcaactagatatcatgaaaaggaatatccacccagaaactctgagagtaagccagaggacccagagcaaatgagaaaactgccatgatgatcttagaggaaaggaaaaaagcagtaaacaacaacggcagcggcgaggacaaacaaggaaggcactcttttgactaatcacaaatagcttccagggcacagtcatgggcctgagtttagtgaagasagtagtttttacaaaagaactaagaagggcccagatttttccaaaatagtacaagagaggcccgtggagaaagtcttgaataggggtaggtgggtgggtggtgcagagacaaagaataataatgcctgaaataagcaagcccacaagcagcaccctgggtgcgacggtgctgaattcggtaatggatgtggaatataaagaaggtctcactggggcaagagggatccaggattagtctcctatcgtgaatgttttaaaataataacagaaacagatgatcagagttccaacatcatatccacactgctctgatgtctttccggaataatactgtggaatatcctctgatattccaggtgtatgagagataaaaaaagaaatgtcaatttatttgtgtatcagttacatgaaaggcactctggaacaagagatgttacgatttcatcctgaatcctscaagggtcgggaaatagcaaaaatggaatactagccacaattccctctcagaacaccaccatcctctgtggaaaaagtaaagttttttttttgaaaaccaatatctgttgtctaaatggagacaagaaaaagtagagaaggcaaaaccaggaaatgttttagaaagtgttagactttcttaagaccttaactccattgccacaactagaattcactctggwttcagctatgtggaagtgaggcccttcatctagcctgaaaataacccaccacttacaccccacaagcaagaggtggacacattctgaatgggaaagaacttttaaaacacagatttttgaaaacagagcaccttatgtaataaattataaacaagttataaataaattataaacaaaaagaatatctttaaataaaaaggttctacacagtctgttactacactattttacttaaaacctagagtaggaggttccattcaggatggaacagtgttagaccagtattttccaaacgttttttatcatacacttctccaatgtaaaagaaccctaacatatttaggttatttatatttaacatatttagcatatttagtgcatatttaattatacctgatatcaagatactactgtgccaactagataccgtataaaacacatacaaaaagatattttaaaataatatgaagatgaagtaataaacaaattttattttatygtatctattactggtacaaaaaaccctgctgttcttattctaatatgagtagtgataatattttaatttgtragtactgtgaatagatatgctctattaggttgcaacacagtgattgctgttgcttgtgttcaacagtgactgaaaattcagcttatctcatcaatacctggttttaatgactgccattgtcaaaatatcttatgaagacaagtagacccaacaactgcacttgctaaatcacaatacttattctttcaattctgtccacctaaaatacaaagatttcctgatgagatttggtcaggaaattgcccttcttgatgtcacacagttgttctttacagaacaatgggaaaatgttgcatttaaaacaatttgaggtcaaagacccacccaaactcttcctatgaaacattttaaacaggctaaaaattctacttccaagttttttggtttttgtgttttgagatggagtctcgctctgttgcccaggctgaagtgcagtggcatgatctcagcttgctgcaatctccgcctcccaggttcaagccattctcctgcctcaccttcctgaatagctgggattataggcgtgcatgccaccacgcccggctaacttttgtatttttagtagagatggagtttcaccatgttggttttgaactcctgacctcaggtgatctgcctgcctcggcctcccaatcaagttttaagggaggtagagagaattttataggttacacacattcattctggcaacaacatcccataataatagacatttttaaaaacatccatgttcaaattattctctccaagatttgttttctttcaaaagtcacctactttcccacttggtgtccsaagggcctttactctgaagggtcagattaagggagggctgcagagaactttcaggaggacttgcagaagcgacagcgcaggtgctactgccattcacgtgagctcgtggtttaatcttcaaccggtggtttcccagcaggactcctggtaagccatgtgtgccttttgtgaggtttaggtgaatgcagataatataactcataagtccacctatcaggccccacaaatcgcagtgggctctaatgaacaagtcaggcccctggttgtggggatgcccgtatcaaatgtgaccccaggcagtctgacatttcaacttgtgaaagtactgttatcggtctaaatggtatattaataaagcttaatccacctttttatcagagaaaaataaacagaatggcaagtttcctggctgctttctgctccccaggggatcattgtacatggtccaccttggagacacgctagtgagagggcagcacgtgctgcccctcaggtaccagcttcccacaggcgctcatcagatcggctcccttgaacaccagggtctgaaagaggttcaaggcaatttcagtgtggttgctaccacgttgtctactgaggaaaactgatgtattttacagataggcttacacctgtggttttaaacaaaatagctcatatttaggcagaccgacttccaataccasatgctgctgctgagctagtatggtggtgagggctaggagataataagggtaaagcacctgcagagagtctggcccagcacaggttcttaaaagacgtttattttatgaattaatgaatgcgtgagtgggtaaaagattccatcagaactttctagtcataacactctgcatcatctttaaaatttctgccttgtatattcctaagtagcattttaaatcagtcatggttttagtcagtgagatggttcctgaaagaatattttcaaatttaattttcatgactaaatacttaagactgggcattaacctccagactccttgaattcctggggacattctggggtttgaggaaaatgaggaaaaaacacacaagctaaatatagcccagatctgaggaaaaaatggtagctactctttattgtatgcctgttatattttaggaattagatgatgcttcatgtattttagctaatttagtcatcattaacaactctatgtggtatatctttttttctctctagtaaggaaaggagactagtgctcagcaaggttaagtaactaccctagtttatagggcagagtggagactcagggctctgaatccacatcttccttatgctgggccttgcttttccattcaagtccttactattgcctatctgcccaaactgccaccagcctctagtctaggggtcaattacagcctaacagccaaattaggtctggctgctgcctttgtaaataaagttatgtttcaacacagtccatctcttttctttatgtatcatctatggtagcttttgcactacaatggcagagtggagtaattgcaacacagccatatggctcacatggcctaaaatatttactatcgaatctttcacagaaaaagtttgctaacttcaaccaacatggcacatgtatacytatgtatcaaacctacacgttgtgcacatgyaccctagaacttaaagtataataataaaaaaaagaaaaagtttgctaacttctgcctagtctagacattcttgtgtttgcaagtctatcccttcctattagagggacaatatgtacttctttttaatttaatcatttcctcttttccaaatacaagggtcaactctgattcagaatatggcaaatgtccttcttatataactgtagattttggaaaaaaacagtttttggcactaaaaatcataggaaatacgataacatttaatcaattttcctttttgatatgccagaggtacaaatgacacagttaccatgccataaacygcaagattcattaacaatgttggttcacattccctattataagaaatctagaactaattgctctccattaatctggctccactctttgatagcttatttatcagattgggaaagatagatttaatagcgcttgcttgaaacaggttctttaattggaaacatcacagcatttagttcactttgtactctagtaattaagaacaatttggaaaagtgttgttgattttttttacaccattgtctccttgattagatttccgaaggtccagacaaaacaaatgacaacactagctagcactatcggtacaaataaaagcccaacagccaaattacttactatgagaaatgtgagccatccccatccatttcgtcactgtcttacatttatttccccatatgcttgtctcttgtataggtaagtggcaatttctcttataaaaggcatcattttgcacctacctttacacaattatcttttctccaaataagccaaatcaacagaagaaattatttttcttgattaagcacccacatttctcttgggagggaacaaaacaaacaattaatctttccttatttgttctcagaagtccctgmctctttaaactcaggctatccaggtacctgtggcagccagtcggcagcaattaggcctgagtggaaaatgaatgcactccaggctgagggcctaatctgctgagagtctgtgtgagagggcaaggttacaccaggaaaattcccttgttgttggaacactgttcaaaattactacctgacttcagcataattaaccaggcttgggaatttatatgaactaagtaattggaaagaattagcaagagatatgtacattaatctttaccagttacacagtgtttaatgaaattaagggtcctgtgctcactcttgacttgcttagtttgcacactttctacttcacctgtagaacaaggagaatatgctacatgaagattaaaacaaaaaaaccaacacctccaaccaaacacaagaaaaaaattctaggagaactagaaacaacctaaaaaattcaatagcagactgttaaataaaatataatgcatccacagtataggatattatggagcctttgttagaattgttttacaaaagaatcctattaccaaaaaaatctattaggaatacatgctaaagtattcatggatgaaaatatgatatttggcagcttcttcaacataatatggagggaataactgaggaatatagaaaagatttcctgagttgatcattgttgaagccgtatgataggaatctgagattttatttttatactttttatatattgaaaatttccataataaaaaagttagtatttaaaaaccttatcttacaaggatatgtaatacatagtaaatgcatatggtacatttttaagttaaaagaggaatttacaaagcattatagatgatataatatttgaaaatatattattataaacatgcacgagaaaaagacaaagaaggcatactataattttgacattatgggccactattaatatttattagttaggagctggcctgtgaattgtgaggtgtttaacagcatacctctacttactacatgctagtagcaccccatcctcagctgtgacaaccacaagtgtctctagacgttgccaaatgttccctgtgaggcaaaaactgtccctgattcagaactattgttctttttttttttttttttttttttttgagatggagtcttgttcttgtygcccaggctggagggagtgcaatggcaggatctcggctcactgcaacctccacctcctgggttcaagcgattctcctgcctcagcctcccaagtagctgggattacaggcggctgccaccacgcccagctaatttttgtatttttaaagtagagacggggtttcgccacgttggccaggctgctctcgaactcctgaccttgtgatctgcccacctcagcctcccgaagtcctgggattacaggcatgagccatcgcgcccggcccagaactattgttctaagtggatgaattacagaaaattatttttgttgtttgttttccaaagatgttggatatgtgcatatatatgtattacatagtgagaacaataacaaaaaagttattaaaatatattaacctgcaaggagagaattttaatgtctgtgaagaaagagactacttacattagaaagtacatgactatgaaatagacttgtagtgatcttccttggattaaactggagtcatcaagctaaaagtgaaacacactacaaaagctagttcttttaaaactcatgattccatcacacacaaatctgataaaatactaatcaaaaatatctaaaggatgtctgccttcctaaaatcttctctgaatggaagattgcagtactgaaagagagtagagcccacagccaccttaaaaggactaatattcacagaaayataatgccaactcagggattatgttttcatcagataaaaccatctaccttttaagagaagtctgagtgtgaagaaaaggtaatatgtggtctttctgtccatataaatgaaatgacaccacctgtttctaaaaggggctttgagctggctttctggaaattagcacaggtctgtgcaacatcaccccacawcccaccagtcttctttctagaagcagcatgcagctgtgagccgccaaacagcatggccagctctagaggagaattaattaattaattaatttttgagacagtgtctcactctgtcacccaggctggagtgcagtggcacaatctcggctcattgcaacttgtgcctcccaggttcaagcgattctcctgcctcagcctcctgagtagctgggactacaggcgtgtaccaccaggtctggctaattaatgtatttttagcagagasgaggtttcactatgttggccaggctgatctcaaactcctgacttcaagtgatccgcccaccttggcctcccaaggtgctgggattacaggcatgagccaccatgcccagcctagaggaaaatttaacccaaaacattcaccttattaatagggggctctaggtgaggtcattgaacttaatgactgctgaaggtatttttaaaaatcagtatgcactgtcaaaccaggtggtcaatattgtataattcataggtttaaaactcccaaagttttatgttttaagcccaatcaaagctctggggccacaatccactagagttaatatttttattcaattcccttctctcacacaaatccctctccatgaaatacctatttttgatatttctaattgccattactgatgcctcctccactggcctatgccacctctgaaggatcattacccatagcttggtaggcttggctttcatcaggcttgtctacccaagatgtgcaagaatgcattatctgaatttttaaaatactggtttatttcctagaaaagagagtgtactgttttcctttaaagaaataatacgtatagatggtttcagaaatttaaaacactgctctgcactaaaaattattttaagtgaartacatatcatttaaaggtgatatgtcatatttaaagtatataccatattttgagatcaatggaaagcatgtaaatcactgggaaaaataaartgtatttgaaattaagtagtacaattctccatggttataatgcaagccttaaaaatatgaaaagaaatatcatgcattgttctaagaaattatttgtagcactaaaattattttaaatgaagtacatatcattttgagataaatggaaagcatgtaaatcactgggagaaataaaatgtatttgaaattaagtagaacaattatccatagttataatgcaggccttaaaaactatgaaaggaaatgccatacgttgttctaagaaattatctgtagccttcataaagagttttcagcttagcacaaaaaaagtcttatagaaytaccataaaatctacaaatctataggtcactgtctacaaaaactaaatttacaaaacaaaagcttctaaagtttttttcattttcatattttgtgaatactttcaccaattatgatgacaaacttgtctgctaaatcctaaataagtagttagggtttttctgtatgaaaaaccaaccactgaaactaggttayaggatttctaaccaggcacaacagaaacatgtatgtacaacagaatctgaaaacacttgctagcaatgatggatttaagttattaacagatcaaaaagagatggatggtggtttgcttttcttaatctatatcatcatctagatctatttaaagatatgtggcacactaacaaacttggttaaggtttcgataaaatcagtaaaaataatctgcccccgttacattgagtctgtatcgatcaataaaatcacttgtagaaggacggtactgttaagtactgacaatcccagccattaatattatttaacacactgttcacaatctttaacaagaacaaagaacagtttgtctcatgttataagcaggaccttcatagaaactgtattctacaggcttctatggtgattttataaagttcaaattatacatccctcttttatcaaccctcaccccctcccaaatacataggtcttgttctttccttcagatgcagtttaaaggaaatccttggtaagaaccaagactgccatggcaaatcacttcttaatctaaaacttctaagaaccctgagttgtcagggttagggtggcaataaggatagacagcatggggcttccctgctgcattccaactttactcagtttcatcagtgccttaaccttgtcagatgtggattaaaggagaaattttcaaagaatcctcagccagagttggatggctagaaacagatatgttcatgtctgaccatgtttgacttaagacmacaaaaatggaaggtggaaaaaaagaaagataaacatattttgcrtaagaatttttttacttatatagacatccataattatatgaatgatgagaaaacaccattaagaagtaaaactaacttaaaaacaataataattctaagayagtaattagatactgttctaaacttaaccattgtagttttcatgactcaaaatcctagcagccttttgagtcttttgaaatgtagtagtttgtgagtcttttgaaatgtagtagtttgtgattttgatgagatgagcaagagggaaccccttctctggtaagtgaacctggaaagcgctgaagacctgagtctcagttgagtttaatctgttgctctcagctsaattacggcttctctacaattctcatgaagtgatttaaacaaataagaacttgggggtctgcacaggacttaaagaaaaggctccctaaaagaatattaactgctagcactatttaaagaaaggagaaaaaggtgaaaatatgtacttaaaaatggcttgtggccataaaatagaaattttaggaaatttaataataaaatgtcaaatttataaatagtttacagtcacaaaaaacaagtccatgagtacactctagtatggatgaaaatgtggttcacaaaatagtttagggactaaaaattttgtagtttagtgctacaaactagcagttttgtactagtattccaactagtacaacactgcttatcaagtgacaaagagcaccagagaaaacatcacatggtgataaaagacactccctgcctgacacttaatgaccatttgtctcaggaggcagatgggatgttgtttaaacattttcatgaagcaatagtgataaaggcagcaaaacagctacygactcaacaattttcaaaataaaataccagtttttactgcatcatggggaaggaaatcaagttactgcagaatcttttctttaggaaagtgaagaagctcacagaaaagaaagataacaggtggaaaacacagcccgtgtagggaggggaaggcagcctacttyggaggaaaatgttttcttaaacaacaggggtgtttgaaaagggtcaaaggcagacacagagactctatcattcagagattctgctattctttagtaaaccccatgtcattaagcctctatgtagagtgagctgttttcctttctctttcttttgcctatcaaaacctctgctcctaactcctcgtgtgtgtccatgtactaaattttcctggcatgagatratgaaccccgagtatttaccccagacaatgtagctgcttcagttcctttacaggtgtgtaacctaaattaatgcaatcagtgtgatcaaaaaaataaaaaaaaaacccaaaaacaatgccttaagaaatctcagttgatagtcttcccaaatgaccagcaaaagcaaataaaaattctctcagtaaattcagttcaattctagccacaaaagctgcatgaagataaagatcctaggaaattaggctgggtatagtggctcacacctgtaattctagcattttgggaggccgaggtgggcagatcgcttgagcccaggagttctagaccagcactggcaacatagcaagaccttgtcttgtctctaatatatatattatgtattttttattatatatatrtaaaataaaacattttgaaaccccaaagctagcaaraggaaggaaataaagattagagtagagataaatggaatacaygaaaaaaaaaaaagaaaaatcgtataacctaaatgaaatggacaaatgagaatttgcccattctagaaagaaacacaaaatataccaagactaaaccatgaagaactagaaaatctgaacaggtctctaactagtaggatatttaatctatagtcaaaaatctcctgacacagaaaagctctggacctgatggcttcattaaattctatcaaatatttaaggaactgacaccaatccttttcaaacttttccaaaaaatttaacaggaggaaatacaccctaacgcattctaggtagccagcattaccctgataccaaaggcagacaaagacacccccaaaaagaaaactacagacaaaaattcctgacgagcactgatgcaaaagtcttcaataaaatactggaaatcaaattcagcagcatattaaaaagactatattggccaggtggggtggctcatgcctataatcccagcactttagaaggctgaggcaggcagattgtttgagctcaggagtctgagaccagcctgggcaacatagcaagaccccgtctctactaaaaatacaaaaaaaaatttaaaaattaaaaaataaaaagactataaagtatgaccaagtagggtttattcctggaatacaaggatggttctacatataagcatcaatcaatgtaatataccacactaacagaagagaaacaaaccacatgatcatctaattgatgtgaaaaaaaaactcttggtggtcaggcatggtggctcacacgcctgtaatcccagccctttgggaggccaaggtgggtggatcacctgagatcaagagtttgagaccagcytggccaacatggtgaaacccygtctctactaaaaatacaaaaattagccgggtgtgatggcaggtgcctgtaatcccagctacttgggaggctgaggcaggagaatcgcttgaacctgggaggtggaggttgcagtgagctgagaccatgccattgcattccagcctgggcaacaagagtgaaactctgtctcaaaaaaaaaaatttttttttgcaaaattcaacacmctttcatgacaaaaawattcaagaaaattggaatagacaaaattacctcaacataataaatgtgatatatttaaaacccacagtaaatatcataattaacagtgaaagactgaaagcttttcttctacaaccatgaacaaaactatgatgcctgttttccccatttctattcaacatagtactcaaagtttaagccagagcaattaggcaagaaaaagaaataaagcyatcctaattggaatggaagaagtaaaattatctwtgtttgcatgtgatatgatctcacatgtagaaaatccttaagactctacaaaaaaactrttataactaacaggcaaattcagcaaagtagtatgatacaaaatcaatacataaaaatcaattacattttgatatactaacaataaacaatccaaaaaggaaattaagaaactatttccattcacaatagcatcaaagagaataaaatacttaggaattaacttaaccaaggaggtgaaagacttatacaatgaaaactacaaaacatgtctgaaagaaattaaagaagacacaaataaatgtaaagatatcccatgttcatggattaggagacctgaaattgttaagatgtcactattacccaaagtgatctacagatttaaggcaatccctattaaaattccaaagaagtttttttatttttgcagaaatataaaaatccattcaaaaaatcatatgaaacttcaaggggccctcaaatacccaaaacaatcttgaaaaagaaaaacatagctggaagactcgcacttcctgatttcaaaactttctctaaagctatagtaaatgaaaacaggtggtactggcatatgatagacatatagaccaatgtaatggcataaacagtacagaaataaatcctcayatatatggtccaacggttttttgagaagagtgccaagatcattcaaatgggtaaagataatcttttcaacaaattgtgctaggaaaactggatgtccacatgcaaaagaatgaaactggatccttacctaacatcatatgcaaaaattaactcaaaatggatccagagcctaaatgtaagacctaaactattaaactcttagaagacagcacaaagaaaaagctttgtgacactggatttggcaatgatttcttgggtatgacaccaaaggcatgaaggcaacaaaagaaaaaacagacaaatggcacttcatgaaaatttaaaattttctgctatcaaaaaaggcaatatataaaatgggagaatatatttgcaaatcatattacataataagggaagaatatccagaatatatagagaactcttaaaactcaacaatgaaaaaaaaaccacccaattaaacaatggcaaaggacttgaagagatatttctccaaaaaagacacacaaatggccaataagcacatgaaaagatgctcaacatcagcgatcattagaaaaatgcaaatcaaaactacagggagataccacctcacacccatcagtacgactaatataaaaaacccagggaacaacaggtgctcrtgaggaggaggagacattggaacccttgcwcactgttggtcggaaataaaayggtacagccactgtagataacagtatggtggttcctcaaaaaattaagaatggaattacatgatcaagcaatccacttctgggcatacaccttaaagaatcaaaagcagkatctctaagagatatttgtacatccatgttcacagcagcattattcacaaaaactaaaacatggaagcaactcaggtgcccactgatgtacagctaaaaaaaatatggtggctgtgtatgtgtgtgtgtgtgtgtgtgtgtgtrtrtatatwttwtttttttcccaagtgttttaaaggttttatttttacaaattacagcagatggacaactaagccttccctgcagagactgtgttccaaatcaggcctgggacactgttcactgctcccaggaagcggctggcaccacatataatagaacgtctgtggcattctattatagctgcagaaaataaactaagatacacagtgatgaattttatctttcttggatttttgttttgccttatatatcgcagacttggagctgaaaaggtggcaaccaggaaatgcccagagatagagaaaaaaaaaagctgcatccaaagcctgttctgtccagccatagaacacagagaggggcagcctagcaagacggaaaatttgcagacactaaccattctactccagccaaacaccatggaagaaactgtggccctcacctctactcatggcagcagaggcatagtgggaagcctagacttccacccttataaggctgtaatgaggtgtcgatgagagggtggtaacagagacagcctcgtaagggaccagggctttcaccacttggtaatgtgccccctcttatggtgtcagcggaaaccatgtgaggagcttagatttccagggccaatggcagtaacgaggtactcctccctttctcttctatggtggcatcagatgaaatctagcaaagaactttctacatcttaatggtaatgaggagcaagccttaccctccaggtmtcaacgagggccaagtgaggagcctaatcttctaccttaacctgggaaaaacaaggtaatgtcttccacatcccatcttcccctgatggagctgttagagaaagtcagctaaaatagaaggtataaataagagccagagtctcataattataaaaatgtataagattcaatcagaattatccattgtaccaagaaccaggaagatctcaaagtgaatgaaaaagctaatcaatagattccaacattaggatgacagagatgtaaagattattggacaatgattttaaagcagccacaataaaaacttttcagtgagtaattataaatacatttgaaacaaaacaaaagagactcaatgaagacatatataaaatctcaggaaggaaataaaagatataaagaagaacaaatgggaattttacaactaaaaaatataataactgatacaaaaaccttaagttaagggttcaacagtggaatgcaaggaatcaaggaaagaatcaggaaactgggagatagaacaatagaatttacccaccctgaccatggagaaaaaaaaaaataggctgagaaaaatgaataaggtctcaggtccctgtgggtctataataaaaaatttagtattcctgttatcagaggcctggaataagaggagaaagaagaaggagctgaaagtgtactcagtgaaataatggctaaaacttttgaatcagataagagacattaatctacagattcaagaaaccaggataattcaaaaggggaaaaacttaaatacacaccaagacacatcaaaattaaacttctgaaaacwaaagacaagaataaaatattgaaaacagcctttttaaaataacaccttaaatataggggaaaaacaatatgactgattttttttaaaaatcagaaaccacgaagacaagaaagaagtgtcacaatattttgcaagtgctgaaagacaagaactgtcaacccagattcctatatctagcgtaaacagagttaaaatattgtaaggcccttgtaatgttcaagaggaaagtaaagataacaggtaactattaaaaaaacaaatataaacaaatgggggaacaatagaaagaaaaaaarcagtattggtcaccaatccaaaagcagacaaaaaaaaaatcatagaaaaagatggagtgatagcaccgatggctgaactaaccccaattatatcaataatgataagaaatttaagtgggaaattttaacacatctttgttcttatagattgagtggccaagttaaaatacaagacatttaaacagaatgctttcatgtacttcataaatatatacacctactatgtacccacaaaaattaaaaatataaacattaataaacagaatacttaacactgatctgattatatgtattttatatataaaactatatatatatagagagagagaaagttcactgcatttgagaatttaagaatacacattttcaagcacatatggtcaattttagtaactgtttcatgtacaactggaaaagtcaaagatacaatactctttgacccactgtggactactgacccaacggtacatatcatactgtataatttaaagaatgaatgaagggcaggctagtcaagtaatagggtcttgtgaagacagtaactcaggggcatctactattatttaacaagccagcctcactctagcttcggaagtgttctctacaaataaactgtttaaaaaaggatttgtattattagcttagattatccttagtcttgatttctgtgagctatttctctttagctcttaatactaactatacatttaattactgtttacaaaaagaaaaaaatataaacaagaactattattctcaagtgatataagatgtacctttctcagaaagataaattccacgttattgtaataaatggaacaagtaacrtatgcacaactccaygaaaaacctttgtctaaatattacgccagtttacaagttaatgtttctactgaagaayggagggatgtacccactaaacaaccctcaaatgaagaagtgaagccatgactgaagctcaaccttgcccatcgtttgttttttttttttctggaagattatggatcttgtctcaaatgtactgaaatatcactggctatgtctaggcattacaaggattctgtcattctttgttctttatcctcggagcacctttcctatttaaatgctgatggctaggcaaagtagctcatgcctgtaatcctagcactctgggaggccaagacgggaggatcayttgaggtcaggagtttgagaccagcctggccaacatggcgaaaccctgtttctattaaaaatacaaaaattagcagggcatggtggcaggtgcctgtratcccagccacttgggaggctgaggcaggagaatcacttgaacccatgaggtggaggttacagtgagctgagattgtgccactgcactccagcctgggtgacagagcaagactctgtttccaaaaaaaaaaagaaaggaaaggaaaggaaagggaaggaaaaaaggaagaaaggaagaaagaaagaaagaaatcgcttatattgtgtaacctgaggaagttttcaactatttttccttctattattccctttcctacttgtgtattgtacctcccatcccctttccttctgggactccagaaagaagtaggatgttagacctggmttggtcctctatgtcttttgtttgacgtttctgtatctgtgctttatggaacagttttccaactagagagagcatctactgaatgttttcagttggataacacacttaattctaagaactctcatgtgttcttggattrttccttttacacagcatcctattgtaatcttaaggatgtaataccactctgaagctctctggatttattacatcaatttttgagatatattttatgtcccaaattatctctttcctgaagagtcagtattttagttcatcttggtctttttgttcatgctacttgttttcttcaaatgcctgattatcatcagatcacactgaagaaagtagcccgggtggcttgggtaggtttcctttgctagtatgtcagcagcagtgcttgcacaggccccttgcctgagtgcaaaccgtatgagtggagcgygcagtcaggtgggcttttccctggggtgagtgcgaagggggttgttaacttgggggccctactatccacattagaagacttagctcttcccagccattctgtttacttttttgttgttgtattgttgtttttaaaagaaaattctttttttaaaaaattcatctggtcacaaacatcaggctgcacgtattctgcatagaatgagtagcctaggcatgtgttccatgcagacattgcttggatagcccttatttgaaatgcttgggaccacaagtgttttggatttcagatgtgttcgattatagaatgtgtgcatatacataatgagatatcttgggaatgggacacaagtcttcatatgaaattctttatgtttcttatatatcatatacacatagcttgaaggtagttttagtcaatattttaaataattttgtgcatgaaacagtttatattaagttcttatgtagagaattttcctcttgtggcgtcatgccagcactcaaggtttcaaatttcggggcattccggatgaggaayactcaacctgtgccctgaatggatctacttgttttcagcttccctgcgcaccccatgctctgccttacccgcagactctgagcctagaagctctccagcactgcctgcacaggctgcctcccgcctccacaacagacccacaggactgagttcggactgctgctttttgtgctctatccactcacatgctcccaccacatcctatcttcccgaaggttgttaacattgttcttcctttgatgatcttctcttttccttgcccatctactacttaactgttggagtttattcattcttaagtttctgtactttcatttcagtggagtctcagggaagacaggaagtcatctcaaatcaggaggcaaaactatcatataaactgtgtttgatggtcaaatcaatttgggaaactgaaattattcttaagatttctgcttttcagaaactggtaaacactatgagatgctaaattccttaatggtctagctcataacttcattggtaattaaaatttttagatgtaaaagtaattgtgttaatgagcaaatattattttatatttttaaaataaaaataaaggtaagaaatatttctggtctttaagtcaaaagtcaaggakatttatgactttaaattttcttttctttttytttttttttttttttgagacagagtctcactctgtcgcccaggctggagtgcagtggcgcaatctcagctcactgcaacttccatctcccgggttcacgccattctcctgcctcagcctcctgagtagctgggactacaggtgcccgccaccacgcctggctaattttttgtatttttagtagagatggggtttcaccgtgttagccaggatggtcttgaactcctgacctcgtgatccgcccgcctcggcctcccaaagtgctgggattacaggcgtgagccaccaagcccggcctgactttaaattttctagaagctttatctatctaggaaagagccttgaattccagtctcaggaaagtccccactttttcataaccctgggcaatttactcaaaatttctaagcattatcattttctctgatggtaatttgctggttgccctccacgccccaacccacagtgagaatattcccttttcttttaccaagaataccctggttattcattagggaaatcaccccttctccctcatcttcaggagcaggctttgattcacttaactcagtgggatggttggccgtggtgaggttcagaagtgggcatgcacacaaatataagccaatgagatcaggaaaaacatctgcaggactcctagtgaaagacactgcttctttcttctgtgaaatcttactgaaagaaaaccttcttttcctctgtactaggctatgtgctaagagtaggtgaggtctggaactgttgcagcccttttgtaccactatgggggccagatgaagcctgcaccatggaagcagagaggagcgacagagaaaataactacagtagcttaatttgggctatggttcaaggtatctctgaagctagatctacccttctgcctcaaacatcataggtgcttgatgagtgcttatcattaagcaaaactatacaaacacacacacatacaacctttatyggtaaattaatatcaaatattaacttgcttttatcttcaagttaaaacatcctccaaagtagatgaatttctagtttatataatttggaaaaataaaagtttaayagaaaactctttatttggcatagaccttttactgagatgaaaaccaactgattttcttccactcatatagaaaggtactgttatacttaattctacttttacaggagatcgatttcctcattcattaaacctcagggagttttcctggagtatattatttaaggggaaagaggtaagwaaacataataatagttaattgatttcttattcaataaacagaaaatgattctaggaaataaaattaaggttcactgttcatcaggtagactgccatacttcaaattactcaaatgccaaatataacttctgatgtctccctgattaattatagattttgattctaagatactatacgtacttggatattcagctagggtttttcgtttttgttttagaatttgtttctaatcaaatcatttgaaaatttaagtaggaaaataataatggttcagaaatgtacttaaaaaattaaaactcacttatgtaaccttcatactattgtttttaatctccaggcaagtaacactaaatagactttgctgtaattgctcaactgttagactctgcaaatatgatcatatggaaatctctagamcggcagaagtttttcaaggtaaattcactgattagaacctatccataaattatttacactgtggcaattcattaatttgaataatgtgcttgcttttttccccttaagatctgaaatttctatttgaaaataaagtggytttttcaaatacaatgtaaaatatttttaagaaacctacactcaaaaatatacactaggaaaatttcctaatttagttattttaaactaaaattacttaaattgaatagagatgctaaaacataaaagaaaatatgtatttataaattgtatcttgaagactaatatgatatgtttattttcaagttgaagaaagccaaataaatgctaactgtaggcttttttgcctctcattttcattagttttatttctttcattaatttcatttattggtgaccagcaaaggaataaaaaacagttttaaaagtacagatgccaaaacaggttgggtttcctttgtttaaaatctcagatagaacaaaattaattttgaaaataggtaatttgacctttcttgtttttaagttagcctcttacktaaatacagcacagaaaatgaaagcatatgcatagtttttgctattcaagttattgatttaaaaaatcatctatctacttatccagggagttgggggatgatagtcaattaggcagtaatagtttatgattatcaggtcttttcctttatctgttagagccttatgtaaagctrtatgtcaaagttgaaaaatttctcctgacttagaaaaatccacaacacatgaagaaaggagcccatactggatgttaggaaactaaaattccattcccaactctttaactaatatattgcaggaatgggggcaagatttttaattccactggacctcagtttgtccatctctaaaataaaagagcagtgtgtgaccaccttaggaaatgtgtggggttgtactcacccatggtccagaatgtactagttgccccttggatggcaggaagagttgttttctctgaccccctcaagagctgatctgcctgtttatgcgtgggaaattgaggccagagggatgattgtgaaatagctgaaggaccggactatgtaatgtctaagttccttgtgaacttaagatgctatggcttggaggtattaccactttcttaggttcatgggccagatcaggaccatactactggcccttaccaagacaggttagtggcaggatgatacctgctgagaaagtgctggtggcatccactccctgggtttcagactggtcctgagcatgaatggattctagctggtgtaatgtaagcaagcagaagaaacagtaatgctgtcttacttctaaggagacttgaaatgatcaagaaatgacacctaggctaggatttgcatttcatttaagattaagtgttcaggcttatctttgcaacttccatctacctcccattgcctgcaaatagaatcaagyggaaaagaaaactaactcccttaaactcctgggggaattaagtgacaacaaattgactattaaatgcacaacaggaagcaagccmtctgagcccttcgaccacatctttcaagccttatttctgagaatagaaaattctaagctcaatttgagtgtcactataaactcctctctgtgccagatgattttatgcacatatttrtatccgaagtacaaacaacttaaaatgtttacactgagtagtaatggaaatcatgtgtcaaatacaatgaggggaacagagtagagctttcttcagaactaaagcttgaagatatacaatatcatggaaaatctggcttacaaataagaatgcattgtttacctattccatttaattatagagaacatgcatttttactctttgcatacaatttctgaagtctaattttttggrggggtttgttttttgctctgcagtgttgcctgaagctatggaaggatcatagctcctcagtctcaaaaaccatggccacacacattcttgtgatttgtaataatccccatttcctttaagmtctcacccccagagagagacagtgaaggattcttctaccaagttcaaaagcaaaagagcaaaaacagtaaagagagcctgcctcagatgtcttcagggkccttctgcatgtcagctttcctattagagcactgtaaagaccaggaaaactacaagggccaggaacggaattctggcatctttctactgagagatagtcctctgaatttctcactaagtacaagcctgaggagtcagcctcccctcatcttctcatcactagtggttcagggacagccattcatagagctctgtagaagaaatggcatactagctccacagtcctcagtttccctcctcaacagaatccaccctagggttaatgcttaaagggccatgaagatatcaaagggargacacagtcatggctgctgatttgtttgatgtaacgtgtcttagatgggtcaatcattaattcatagctcttaggtgggagtccagctcttttgttttaagagccaagattcccctgcccccagccatgttcactccatcattctcatgtgtcgcttctccagtggtgccagggagggaccatactactggcccttaccaagatgggttagtggcaggatggcacctgccaccttaccaagatgggttagtggcagaatggtactggctgacctcagggcctgcccaccccagctcctgccctgcacagtgttctttggacttaatgatgactacactgagtactcgcctggggccactagttctttttgttttaaaactcagagaagctgatactgctctaccttctccttttgcttcttctgtcacttggtaaagagacggtctttgtcctattctcacttaggcagctctgcttgctcctctcagctgcagaaaagagtgtcccagtgcattctttctaaattgacattcgaattttcaaagaggttggcacttcatcatcggcaatttttatacattccttttcaatttgattccaaagatacactagccaggcccgctgtgagttcagtttctctcactaccccaaccagccccgcaaaactcaaaacgtgaaggctgggattgctataaagaagcaaaaaaaaatcttgaaggaaaagcaaaaagcaaaaaacaaaataatttgtagagttgaattaaaaaacagatcctctcctcaacagttttcacctttttattgaaatttcacttccccaatacatagaaccaattttaaatagaaccctaattaaagttacaagaaccaaccaacaacatatctgtaattttggacttcctttaatttagaatctttggctgcttaacatattttacattgcactcacatgtcctgagaaaaagtggtaagacatatgattatttatgttatataaaatgaggatctaaacatatcttacctgtaagtatgtttccaagccttgtcgtcgctgttccaagactttggggacccagttcctaacatgtttagaagggatttctggagtttttatacatttcttaagctataaagacagaataggaaaagaaaaagaaaaaaaaaaacagagatgtctgttaattatagtgatattatttggggaaaaaaggccaataaaagaaartgaactactgctatctgcaataaaaaatagaggaaaatataattacactgcaattttgtcaaacaattctttatttaggtatcttgactgttcagttttcagaataatggttttctgttttggtaggtattattgttgatatttcagattgaaatcctttttcctgaaaaattaaaagcctaataaatgaataaaaatgaaagtaaagaaatttagttacaaaaatcaattaatacaacaaaattttacttggatgaaggactttgctgataagaagtctttctacatgtttttcatataaagaaatcaaaacaaaatgcaactgtatataagtattgtccctagaaatgccattaactagaccacatcatttggagagagaacttaaaaacataaaggcctaatcttttcaatgttcctaacaattactttccaactccattcatgaaaactgaatgatagttctcagctaagccttttgggacagcagttttaggggataatataaataaacaaaaattctgttggaagttgcattagagctgtctgtggtaggcagaataatcctcctttctcaaaaataaccaaatcctaatcctgtggatgttaccttatatgccaaaagggactttgaagatttggttaaattcatggtcttaaaatgggaagattctcytggattattggggtgggctcaatgtaatcacaaggatccttataaaagggaggcagcagaatgagttggaaagagactaggagaaacaatgtctctgactctgacgatggagaaagaggccrcgagccaaggtgacctctagaagctggaaagaatggtttctgccctagakcctctagagcaaacgtcatcctgctgacaccttgattttagcccagtgaaacccactttggactcctcacatcaggaagtgtaagacaataaatttatattgttttaagccactacatttatggtaatttgttatagcagcaataggaaactaatgcactgcctctttaagtgcaatgtgcttaattgctaattaaaaacttgaaaaaaacctaccaacgttactcctttactacacatgcacagaaacagcatagyaatgaataagaaaattcatacaattaaacctgggcagctaaactatagtaaaaaattctttccatatgtaagagtatattcacccttaaccattctaggctgaaatttgttgtacatcacgaagaaggggcccatgtactggctagagcagagcggccacctttgcctctgaggtagaagtctcgcactgagaatggtaaagcagcaagagcctgggtccctgatgatcatgaaactgccacaccagcaccagacattttatgaagggagggtccaagttgtatctgttaatgtcaccattattttggttttagagtcacttacagccaaatctaatcccacatgaataagggatgtggctagcactgctagctgcttagccaatattcatttcctccttctttttttggggraaaaaaaatcaatgtcattcagagggctaagatgctgagctataaactggttttccaggttcccttttaattagggtgaccaggtgacagagttaccaatatgtgtacatgtctactggggtagggctcttgctttcctaacaaaaagcaacaggctcttcttgccagaaaatgcagaagccatgcctggaagaataggagctatgttgtcaccagaagtgtgaaagtcacatgctaagatgaggacattaaagcagggagacacaaggagcctggaacatgaatgttgtgagatgcgtgcatcacctggactgcctgtttttagttttcctgtaatgtgagaataaaaaatatcttaagaaatctaatcaagtttctactacatgcaatcaaagacattcctaatataaaggaatcacttgttctattttaagtcagagatgctcaacaggcatccaagtagasatgctgggtaggtagttgggtacaagtctgtaaatgtgggrgtcagaatatataggtaattagagctgtggaaatagaggagatgacattaggagttaggtacagatagagaaaaagggctgtgggggacagaatcctaaaatggtcccctggtgtaaatgccttgtatgatcccctcctcttgagcatgagtgggacctgtgactatgtcaggacagtcactccatgattacattgtgtattgtatgatggtcctagcagactgctggctttcaagtaaggtgtcatgtgatgagagagccacatggctaggacctgagggtggtctttaggagctgagggctgcctctggtgttcagccagcaagaaaaaaaagggacctcagttctgcaactgcaagccactgaattctgcctgaatgagcttggaagagggccccgagcctcasgtgagatggaacagcagggaggagaagcagggcaatcactgggggaagagggggagtagcttccatcaggaaagtgtttcaagaggacaggcatgatcaggctgtgccagatgatgggaagtcagtaacgtggggtacagagagaagggcagtggggaagtagcagctcctcttctaaggcgttctactaaaagagaaggaaggagtacaacgggatgagcacargagggaagcatggggctgaaggcaggctttattatgtgaaacagaaactactgcgataggttcatatagtgatgagactgattcagtattgagggggaaactgataatgcaagggagagagaaggaggggaatttagaattgcttgcaggggaataaatacatatttaatctctatactgtccgaggcagttctccataataacaaggccaaaatgctaaattattctgtggtaataagcttaagtttcactttaaacataaagaaacttccttttgaactattgaatcacaacatatatttcagaatagaaaatcaactctattatatgtctctccttttaaaaaaaatttagaagatctagcaactgaaaatatttttccttttttatttatgtcaggagtactgaggaagcgkatgatcatagctgctgggatccatgacagcayttgtaggtgagtaatgaattgctttagatgagagacaaacccgagacaatatgtttccagtagggctcagctgcttacaagataaatactcctctgtcacttcatccgatgattaacggtcctggccctgctgtgtccaggcaaactgmctgtctgatccacgcagataagtaccagattccacgataccacaaacacaatctccttttcctggtgtgaccactcccttttccttttttatactgctagaagaatttacacagaacttattccacacagacctaycactgcatacattggttatagtaaccattttccacaaagaagcagaaatacttttcccaagtacatgaataaaaagaatgaaaaagaaaagaaaagttaaagaagcgggaaacacttggggataaaatcccatctttccccctgtattgccaccgctacttcctcagggttccctttgaagagaatgtacagggtgctgtgctactggtttgaccccacatggcaggtttttggttcttattgtctacttcatggaattaaacacaggaraatgaagtcttttattcaagccaaaggtagtcaataataaaaaatgaagacagttaatttaaaaatgaaccagcaccatatttcactgaaacctttgtgaataaaaggatgggctgtgactaacagaaagcagctgggaaggcatgaaaataaaatgtgcttagcagtttgccacactgaaaagacttttctgcccatacatgcaatttttggcctagggaggtaaagctcttttcaggaaccaccatttaaaatagtaaagtatttggccatagtggggtgtggacaggtgtagccaaggcacacaggaaagcactcataagcctgaaggctcaccctgtcacaggagcctgtgcctgggccataacaaggctagcatggggttttgttttcgttttggtgcggtcatggtgttcttcccacctagtactagcagaggagctacaaaggtatcagggcaagcagaacctggggttaacagagaatgcaaactcccacagtagaaactgatcctctagtaattcataaatatgcatgttctccaaatataccatttgccaaatacttatttaatacctaatatgtgcccaagactctactagacactctaacagtgtgaaagatatgmaagacaggacatggtccctacttttaaaaaagtaccttctaattagataaaatttagggataacagttttatctcatatgtttccaaaatttaagcagaaatctgtattctaaatggacaggagttctaagaacaaagagattagggaagaaagggagctaacatggaaaaaggagaacttgmaatgtcttggtttgaatagatcagaacacacaggaaaagacattcgacatggcaaagataggtgggtagccatttttacctcatataatgaggtaatgggagatattggctcagctgtcactgaagagctcttaggaggagtraaaaataaagtcggccagtaaaggtgttagtagtagacagaataatggttccctcaaagatgcccaagtcctaatccccagaatctgtgartgtattcgcttacatgggaaagggggctttgcagatgtgattaaattaaggattctgaaaaggggggttatcctggattatctgtgtgggctcagtgttatcatgagagggaaggacaaggaaaaggggattgagtttatggtgtcatagcatctggtacttatctgcatgaatcagaaaggctgtttacacaaggtgtcaagtcagaggagaggtgatgaaaggagatgttatgatggacacaagctgaagtggagtgactgctagctttgaagatgaaagaggccacgagaygaggaatggtggaaaaggcaaggaaacagattctcttctagaacccagaaaagactcagctacagtcaggtaataaattttaaggctggatgtagtggctcacgcctgtaatcccaacactttgggaggccaaggcaggtggatgtcctgaggtcaagagttcgagaccagcctggccaacatggtgaaaccctgtytctactaaaaatacaaaaaaatagctgagcrtggtggtacatgcctgtaatcttagctactcgggaggctggggaagaagaatcgtttgaacctgggagacggaggttgcagtgagcttagattgcaccactgcactccagcctgggtgataaagtgagactctgtctcaaataataataatacataaattttaagccactgtatttttggtgatttgttacagcagcaataggaaactcatacaaggtttaagattattagccttgagggtcaatatctatgatgtggtggacaayagagacccgtttcagtgtatttgagtaagagaatggaggtaaaaatggtgttttaggaaaactggtctgcagcagagaatggataaggatctgaaatggttaaagtaatactgatatatagtagtaatactctggactgggawggtaggaatagaaaatgaaaaattagtctgggcgcggtggctcatgcctgtaactctagcactttgggaggcagaggtgggtggatcacctgaggtcaggagttcgaaactagcctggccaacatggcgaaacactgtctctactaaaaatacaaaaattagccaggcatggtggcaggtgcctgtaatcccagctactcgggaggctgaggcaggagaattgcttgaacctgggaggtggaggttgtggtgagctgagactgactgagccacttcattccagcctgggcaaaagagcgagactctgtctcaaaaaaaaaaagaaaatgaaaatgaaaaattaagtagtgtgtattataagaatttggaagataatgcaaggtaacagaaaagtaggaacacacttgaaggtttaaaaccttgagaygtgtggttctaagctttgtaacttcagtgtgtgtgatggaggtaggttaggaagggttgtgtctaagtgataatcatactatagaaattctcaaacttcaacaggcattaatcatctggggtactgcagattattgggctccatcacaaagattctaattcagtacatctagggtgttgcccagcaatttgcccttagataatcaaagttcacattttgaaaaatacaatctasaaaaactaaaagaaaatggaatcaaatactcatcatagctcaagaagaaatgactaattttaagatagaatctgaaagggtaaaaacagacacatcagtaaacataaaaatttaaaacttgcatacatttagaataaatgtcataaccaaaattaaaaggcccttgttaaaaaatgcttccagcaaatggctaatattgtattaataggccacccaaactaataagcaaaaacaatctagacactagcagataaatgagaaagcacataaatagataattctattgaaagaggggctacaactcctaaacaaacctaagaaacacctattaaaacaaggcaacatacatgcttgctaataaacaaatctaatttttggaggggtaatatagttaaatatttcaagagaattaagtaacaacagatttaactacatttaaagggaaaatattttatgttaaactctaacattcaaagcatgtcacaagattcaaatatggaaatcgagggtaccaaaactgcaataaaagggtaaggttgttgatgtggcagcagcagtcagtcaagcctgagtactctgattaaatttttgacccatttcaacccttcttagcacacartcttacagtcaaaattacagatttatgtttatttttataccccatygttatttgtayttcattgccttttaaagttacctttttgccaaatcgaatacaatcacaagggggcaagtaaaggagacttctagcagctgctatccccttgataatacataaaattagacagtgtatcccaaataaaactctgctccacaaagctatttttatctctatgtccctgtaaagttgtctcaaatattttaacaaggctgccaacaatattcaaaattgagagatttgtgaatttctattctattaatgctagtagacctcattatataattataagaataggtaaaattattaatagagctgcagaaactgagagaagagagaatcctggaaaatctaggattttttttgaccatgaatagctaagaactgtccaaactcactggggagagggtcctcctctgcagaagaaaataaactctactagagcagagaacagggtgaacaagcctcgcctccagaagcacgggcagcctcgtgctctgggcaggcttaattggcagtcacccagctgtgcctggtgtggagctggttcctgagtatccggagagtacagctgggctgtgctagggtcatggagtcctaggtgytgacttgggaggttagcaaggggcctgcatgtgacaggctgcctcctctagactggtcaacagaggctgggcaaggcagggggtgctggttttaatcccacagtagggacttatttcatcaggtacccaraagaaacctcactaggatctgtttcctcccaaaacacataaacaaaaacacacttccctgggaaggaagtgagccccagactccaggtttgtttctctttggagcaccctggggttggtgcttttgtaaagtcactggcaacatctggtctaaatctgtgttcacctgtactgtttattttccaagtcaacctggattgaaaaagtgctaaccagagaactagatgtggattatcccttgccgtcctaacagaaaagtgtaccaataacttagagctcccctttaaaagaaaagagaaggaaacagtctcactaatctctcactaatatcctgttaacgtttataagtttatcctgttaacgggatttttctgggcaatttcatgaggtatttctagatattaaaataatttcagcatgccaataataacttataatctagaaaaaattaaatttaggtagaaaataaagaagcatttactcttctgtgctttaataaccatttctccccaaagctcttccttttgcctttctgtttcgtttatctaagacttttaaagaagtgtatcctagtgctgaaacatcagttttgtaaagtggccctttacaattcaaaaaaaggctaagagcctcttttaacttgtgttcccctgtctttgaatatacaagtacatgyatatgttactttgaatacagaagtacatgtatatgatcttttccaggtacatgtaagtrtaagttgactttaataagttacttcctgtaagataatcatttgctttttctcccctgtctgtaaggaacattaagtgcatttcatggataaaacagagtctgggttttattctttctgaacctgtaacatcgaatgcaacatactgcaaacagcttgcagcctgagatttttacatgcaaatgattttaacagaaaatctacctattcagaaagmatacctttaaggaactgaataacttattccaaaaagaaatttacttyatgataaaagaaaatgtatatacatacacaagaaatatcaatggtcttagaaccacagaaaggagtgttagttaacattataccatctgccacatagagaaaagacaaaaaaacagaaaacaagttacctttttgtgcaaagcatgaaattcgctgtatctcttttcaacaaaatgttttcttccattcattagcacttctatcttaaacacctgaggaaaaaatttaaaagattaattatattagttcaaaaccctcaattgtctgatgtggtaagtttgtgaccatgatatatttcatcyctttaattacagtagcygatcccccaaaacccagaaggctcaggasaccctggmccaacagcactgattaatgagcactcgaaycaaaggctcactaacaaagtgtgacatcctccaaaaacctgtctaaaaacaagggaaacttaaatgcataaaaaaaaacctacctaattttttaataaaataatatttcttgcttaaaatgatttcaccaagtgaatatgatagcattgaaacaatactctttaccagagtattrcaagaggaatactctggtaaaaagctcaggcatgtggtattccattatgggcatttcaacgcaggcagtactgtgtcatctataagacaatcatgcaaacagcagtgcattttaggttaatttctttctaacctgcatattcatctctagtctcagctgggcttattctgctgtttgcaaaacaggcaaaatgtagtaaaggctcattttccctgcatgatacaagtgacagcttgtgctcctagctccacaaggttgaaaggccagatgaaaaggttctctgggtgcactaattagtaggcactaacatgacattttcttgattcttgggtcagtgggtcaagactggaaacaagggatgagaaatattgtgaaatgctcatgaaaatacaattttaaggtcggatggggagggatggttagcaggatctaaagaggagctctgtcattccaaaagtttrtatttgacttgtgttttgctaagtgagagtttataaacactaagatgaaggaatattgtttaattacttaataagcctaattttctatttcaatcgcccttctgaaaaaaatacaaaactgtagagatcacatgacactaaaaagtattaaaagcatgcttacttttagtctaaaaataaaaactacttaaatttggcatatgacatacaaggtcgcacatcttcattatgaaaatagattgctatggctctatatttctgtcttacatgtaagtatgactattttagaaatccagaaacataaaatctgtttgcatttttgtgcttctttgaatcagaaacaaaatcttctgctgcatgactgagtttaagaaacctctttttastaagtggtaaatttttaacaatttaatcaatattttatattttgtttttcaagaaatacccctgaataaatactttcctttggtgaactattagaaatattttcttctaaaaccatatgcatatgcttcaaactctcagatattcttagattttttttaggaaaaaaaaaatctgtttattaattcaccagagaaaattattcttcttcaaaggtcttgccagaaatagaatcaggaaaacacctcaagaaaacaaacaagagaagcacagctttaacttgggggtttggttaataggctacagagccccttttttactatcagtcccagattgaaatcaggacgatatgtagcaatgaaagtagtttccatctgctgagctttatgaaataaatgaggttatgttctgggtcttattgtttgaggctttatcacaaaaccaccaccttaactggcacattacctacagaatctataaaacagggagacggttgaaaactcggcaaggctctacctacttgctcacccctcaaagtgcccccccttgaaggccagggtaagacaaattacacaatggctgcttcatggaatgtcatctcttctactgaccagatggttccattaccaagttccacagttactcttcacaagcactaaattcacaatgaagggtgggggagggtggatgttccaccacagcaaagtttgygataaactttaattcttatattttataatgttacagttgaaaaaacacacaatatgcctaatactatcaagactttcttctaaattctgggaaaacatcttggaaaggaagttgttcatcaggattttcaygacaaagtgaagaaagaaatggagtcaatttaataaatccggccaggcgcaatggctcacgcctgtaatcccagcactttgcgaggccgaggcaggtggatcatgaggtcaggagtttgagaccagtgtggccaaaatggtgaaaccccatttctactaaaaatacaaaaattagctgggcrtagtggtgtgtgcctgtagatccagctgcttgggaggctgaggcatgagaatcgcttgaacctaggaggcagaggttgcagtgagccaagatcgtgccactgaactctagcctgggcaacmgagcgagactctgtttccaaaaaaagaaaaatttaataaatcctattttcctgaataccatgccaggtcatttttgtaaagtctttccaattttcctacatatgttgtccctgctgcctggaaatatcttttcttgcttggctctgctggtaaactcctagtagtgattaggcacctcgtgaggtggcggcctccaggacggcgctgggaaagcactcagcacagaatgcaccattcatctgtttatttattcaacagatatttactgagggcctgcgagccaggaagcccaggggttgttctaggctctgggattcagcactgaacaagacagacaagaggtcagcctttatgggggctgagacgggcgkatcacctgaggtcaggagttcaagacaagcctggccaatatgatgaaaccctgtctctactaaaaacacaaaaattagctgggtgtrgtggtgcgtgcctgtaatcccagctacttggcaggctgagrcaggagaatcgcttgaacccaggaggcggagggtgtggtgagcagagatcgtggaaaaaaaaaaaagaaaaaaagagttgaatgtgttgcctctggaatttcagactggctgtgggtggacaaggactgttttcaytcctattgaaaaacaaacaaacaaacaacaaaaaaaccccacacactttaaggtgaaaaccaaggtctcttctggccaagatagagtaacaggaaggagatgtagcctcccacttgaaactgggcaaattaaataagtgcacaaaatatgtggaaaaaatggctctcaagacattggacatcgggaaatgaaggaaagtgagagacaggaaacaaggccatacctactattacctcagcttgctgcccagagagaagctacgcaggcccagggaaggggaccccacccaggcagagccctgtgatcccctgagtttaaggaaagggagctgggagtatggagaacagggagctgcaccctgggtgaatgcctgcagctgaggaggcctccctcaagtattcaggtgaaaaccaatcggcacgtgagattgggtaaactacccaaggagtgaggagggctcagagctcacatgcaactggcaatggtgcctgtgtccaaaagctggggcagaaaacttcataattcacgaggcattagttacagtactctgaaggttcttgactcagaagcagggaaaatgaactagattaaaagctgttttagtccagtttaacaacacttcaaagccaggtctgaagagatcaaattgtttccaggtaacttaaccacatgccagaacaaagctcaagaatatttttaggactataaaaatatmtagaacccaacaaggtaaaattaacaaaagataaattaccaaaaatgttgccagatttcacccctctaatgtactaagttacactgttatgaataggaatgtctggcccatccttgtcaacatagtcctactytggccaatctggtgcataaaatgagaatttttttttttttttttttttgagacagagtcttgctctgtcgccccggctggagcgcagtggtgcartcttggctcactgcaagctccgccccctgggttcacgccattctcctgcctcagcttcccaagaagctgggactacaggcgcccgccaccatgcccagctaatttttttgtatttttagtagagatggggattcaccggtggtctctatctcctgaccttgtgatccgcctgcataggcctccccaagtgctgggattacaggcgtgagccactgcacccggctaaaatgagaattaattgggtatattttgacaagtatgtatgggggcataagtttccattccaaatatctcacataaaattacatataagcctgacctacctgtttatttttattttatttatttatttagctatgttgctgaagctggactcaaactcctgggctcaagtgatcttcccatctcagcctccagagtaggtgggattagaggcccatgccactgcgcctggctctgacttgcctgtttagttttctattcctagagacatctttcctcagagttttccagaaatcccctctgtataaagtaagggaagctgcatgtaattaaataaatgtattaaggattccattcaggtttgcataacaaaacaaaaatcattctgttcatttgactaaatttttgccacagttctagaaacattattaagtcaatagaattcaaattgaaaaggaaaacaaatgccattactttaaagagaagaatctgatccccaagtgtggtttttattacatgtcagagccaactttttttcttttgtggtaacatctctgaaattatactagaagtcaaggataaaatagttcaaaatgtgggtttataccccaattttcaggaatatatctaataaataaaataaacttaagctaaggaaggacttaacttatatttcaagttgaatggtctctctctttcagaagctcatacgttacaaagtgatcacttctaaagcaaaaaaaaaagagaaaaagaaaaaagaaaagaattctctataacagattaaaagtatctaataaataattcaagtgcttgccaaatacagacrggggttctatatacaaataaagatttaagcccaaggttccaagtagtttaggtcagtgtatcgttacgctgggaatctgaaatatacatgaaggacaactatctgcttagaatatgacttttcataaatatatatacatatacatgcatatatatgtatatttaatacttgttcattagaacaagatgcaccaaatattaaagccaggcttgaaatcaacattctccttctttagcaggaataaacattcaagataataaaaaaggttgttattccactataaaaagttgaatctctaaaagcgccatttcttgtgtgcctattgtcaggtgctcagcagggtattaattcaggtacttagcaaggtattaattcacaacacatatagtttttatgagggtacaaaaataagaaaacatttaattgtaaagaattattatgatattcgatttctaagtacatttacatttttaaaaactagcacaaaaatttgatttgttcctactttgagcctgaagtcacgtttcctctattttaagatgccacattgataaagcaagagaaattactaatttaatcatactattttgggtaggggggaagaagcgtttttctcatatttcaaaaatatctaaatttcagaaattttaaaaagtttttaagaaaaacacatactgctacaaaccaaccactacttcaaaaaacaattctctaaatatagtaagccctcacttaatgttgcagatagaggtttttggaaactgggacttgaagcacatataacaaaatcaatttttttcctcatcaactttttaacaaaacgacatgattcaaggacctgctgtatgtcatttcacttcaagttgcagtttccaagaacctattgatattaggtaagaacttaccataattgccacaacaaaatacctatgtaagagttggacgtgattaaatgtatgtgtgtgtgtattgatatgattctgctttcgaaagaaaattcatgatagcaaaaagaacrtcaggaagatcatggatgaaagagaataaatatccaatctacaatgagaagaatccctgatgaaagaacaaaaaaattagaacaagagcaaaaatcaaagacaaaagaaatccaactttcttaagctggaaagatcaaaagggtttatatatcccagggaaaaacaagacaaggatgtccacacctacccaccctagaatttatttttaattacaagcataaccaaaaaccacttctaatrtacagaagcaaaaagcagaaacaaagatcaggatgaccctaaactttttctctgacatgctaattgccagaaaaagtagagcaatgcctgcggagttttatcagaatattatttaatagtcatctaaattattattcatgtataaagacaacaaaaagtcaatctcagtttgcgggaaaactcaaaaaacaaataacccaaacatcttttttgaaaaacttactgaaggtgtagaactgccaatggaaagatagatcaaaagcaaaaggctgctagtcaagaaaaggctgacaaagtgcccagcaggaagcacacaagggcttctaggccacttggaggcatcttctcacagcctgctctgttgctgtcctctctagaaagatttgtggtcaaaggtgcttggcacacagagaaacaaagraatccatagaaaacctgttcaaaattttggctccaaatgtcttcaaagtttgatagtgtgtgagctttaatgcagaattccatgtctagtcaaatcttccaccaagggcaagggaaaatgttattttcagatatgcagaagcacaaatggtttattatatacacattcaggaaccttctttgaatattaaaaaaagaaaaaaaaaggaattcacaaaagaagccaagactgtggacctaacctagaaacaaagtagagaaaaaaaacctaaaatgtagctttgcgatcttaaaagtgttcaaattagaataaaagccagagagctccaagaagaatgccttcatggaaaaaaaaaagatatgattaatacctattataatttataaggttttagtgatagtgtcaaagcatttgtctttctctgtcaagaaaaaaagggacttaaatttttcaagataaataaacaaaactatatacaatgtaaaggtgcaaatacaaagcggaccaaatgtactatgatttggtgcagtttacagaataataagaaaagaacgtccatttggcataacacttgaaatatttcacactgagcagtacagacttagtaatttataaggcaacgttgtctctaaaaaaaaaaggctattggagctatactcaatataaaatgcttctttttcccctcaaatgaacattccttggaacagttttttaataagagagggcaaaatttgctctcagggacctgggaagcttttcctaaagagctgatgcttcagactacagggaaagcaggcaaagaggagggacaagcactgtgggcagagcatgtgcaaaagccctgaagcagcaggtgagaggccggaagcagctgactgtggtacagccaggcagtgaagagacacctctgaaggaggctggagagggagcaaaaagctaactccactcttcttctctgcaagtattaatggtctaccaagtgccaggttcagagctagtcattggagatacaacaatgaacacagacaaaaacccctaamagaccttacttacattttaatgagggtggagggtgggacaatcacacaaattaacagatattagtgtcacagagaaaaataaaccagggtaataggacagagagggcctggatgagtatacggctataattttgggtgaggtcttgatggtaaaataatacttgagcaagaasagaaaaccatacaaggtctctgctcaagtattattttaccatcaagacctcacccaaaattatagccatatactcatcacttatctcacagtactacagatcagaagtccaatgggcttggttggtttatctgttcaagtctcatgggctaaaatcaaggtactggcwggggtgtgtgactgcagaggttctaggtgataacaggttcctgcaataggatccctgcagttgtgagactgaggcccccacctttttgctagctgtttccagctcctagmagccacctacattcctggaatcatgagccgctttctccatcttcaaggcctgcaacagtagctcacgcccctcccttgtcatatttctctaacctactcttctgctttccccttccacttataaggactcatatgattccacttggcccacccagataagccaggaaaatctcccttatctcaaggtccttaactttaaactcttttaccaagtcccttctgcatgtaaggtaacatattcagaggttctggggattatggtgtggacattgytgaagatccattatttcattcactacagacctgaatgacagragggagtgagtcctgagtctacctgggatgggaggaggttggtccaggcagatggaagagtgaatagtcacagaatctaatttaactttcagcattaccattgtgtgccaagagttatccagagagagaacagttagagggaaggtctgagtggcagtgggaagaggtgagtgaaagtagaaccaacaggataagcygatgactgcatgtggaaaaatgtaaaaatacataaaaatgttatgtaaaagtacataaaaataaaagggagaaagtgagagaatgaaatgcaatggtgaggtttttggtctgagcaactggaaggatggtgatgccaccatcaactggctgcggacatctgcatcaactagtctgtggtggcaagttaagagctcagcactagccacactaagtttgagatgcacattagacatgacgtggagatgcttcagaggactgagttgacaactctggtcttaactagagatataaatttgggcattattagagtgtgaatgaagactagatctgatcacctagaaacagaagtcaaataggggcctttagatcatatcagggtgtatggttttatcatttcagcaacaagaagattttgcttcaytttaaatgcctttctcttccaaattaaacttttctaactcctatacctgtctttcagatgacatggttttcaggtcttacactataccttctagaataaaacacagtctgtcaatgttctccctaagatgttgaatccaggattcaaggaaatactggcattccccaattaataaatgaattgtgtccccaaaatccccttttcagatggtttaaaactcagcacaaattttcccacagaaacagtataaaagataaatagcctacaaaaaacctatttagtcccaamtatgcacaaattacaatattgatatcattaatttaacccataagatttgcagtataacgcagsggttaggagttctagttcttgaatcaaactccttggatttgaatcttatgtcttccattgctctcttctgggctctgctaatactctatgatttggagcaagttgtttaacctgtacaagcctcagtttcctcacctataacatggagtttataatggcacctatcacataggtttgttgcaaggattaaacgtaattatccatgcaaatcattaaaacactatctggcatttagcaagaatccaaacaatgctacctattcatattattaacttctaaccattgctacaactattcctttatcagtggaggggaagctgttgataggtagggaaaatgatcacgagagtaacaatgaccacattcatacatctctacaggagagaaggtacttctctctccatcactagaggtggttgaccctgtaatgcatgcatgcagtgggctgctgcactcacctctgccgatgcccattcataggcctggattcctgatgaggcctgatgagcacacggtccagtggaaccctgacctcccatgattctagcttaagcttctgtatctgcaatctgcattcacctaaatgttttggaaaccatatctcactgttggctaatgatgcctttggaatcaaacaaaacccccaagtcttccccaacagttcttaaacaggcaattttcagatctgaggttaggctttataatgacctgttaaatattatcatgttaattttgactctaatactagacaaggctgttgaaacttttctggaaattgattctgtcttccaaaacatgagccagtgtttttgccaagctttgtgtcatgtgtaaatctgaagtgtcttccctctgtgtcttcacccaggcctcagttctcactctacaacctccctgctggtctccctgcttcactcctgccctgcagcaatctatatttcacagcagccaaagtggcccttttcaatcctctaacagatccttcctcacttcctactccctctcactcaccctggtccagccacaccagcttcctcaccggcaactataataggcacgttccctcactgccacctataacaggcttttgagtgcttctycctctacctagaaagcttctccctcattctgttcagttgttgttccaggtcatgttttcagagaggtgttatctacccaccccatctaaaacagcaactagctcccatmattctctatccccagacctggctttacttttcttctgtgcatttaccatggtctggtgtgtgcatgcacacacacacacacaaacatacacactcacatacacacaccacacacatacratgtttgcttgttggttggttggtttattgtctgtttgtctaacaaattataagctccataatgataggaacttcatcggttttgttcactgttaacakcctcactgccttaaacattaccttgcaacacagcaggttgaatccatgaaaaataaggaaggagcagaagaaaaggtgagcaggtaattgacagctggacaacaaattgggaagaatatgtataaacttcagtccagctcagtaatctaatagtggaaaggtaaaatgagttatttttgttagaacaaccaataagttagacataatagaggcagactgtgcaatataagatagggtttcttatagaaaggaagttgtaaatagtcaaagaagactgttcatgagggcccaaaagctatgaaaataaagaccaaggcctgacacagtggctcacatctctaatcccagcagtttgggaggccaaagcaggaggatcacttgagcccaggagttcaagaccagctgggcaatatagggagatctcatttctacaaataataatttttaaaaattagctgggtatggtggcaygtgcctgagatccagctactttggaggttgagtgagcccagggagctagagcccagggggttcatcacttgagcccagggggttgagactgcagtaagccatgatcatgccagttcactcagaaggaaaggagaagggggaggggaagggagggaagggggaggggaaggaaataggaagggggaagaaggatgggaggggatgggagggggatgggaggggatgggaggggcaggggtaagaatggagaagggggaggaaaggggaagggaagagagagggaaggaggagagggaagaggagggaaaagggagaggggagggaggaggatgggtagagaatgtggggagagaaggagaaggggaggggaagacgaaggggaaagaggggagaagggtgagggaagggaaagggaagagtrgggagggaaggccaggcctttaatcaataagaaactacccgtcttaataattagtgctattctgagaagctacatgatatggtagaaagagcaccagtctggacttagacacatccaacacccagatctgctacttcctggctgtatttccttacagatgttgcttatcaactctgagccttagtttcctcatacgtaaaacagagatgataacgcctactttcttaggtctggtgatggagtaaataaatacgacaaggtatataaaacccttagcacctagcctggcacataactggtgctcaatgcattctgttatcctcctgaatatagtagtccccccttagctgtgatctcagttattcatggtcaagtatggtctgaaaatatgaaatgaaaaattccagaaataaacaatttgtaggttttaaattgcacactgtactgagtagagtggtgaaatcttacactgtcccacggtgtcttgcccggtcccagccagcacacgagccctccctttttctggcagctttaygatgtctgcacccccacccattagtcacttaactagctgtaggagctcagttatcagatcgactgttgcagtattgcagtgcttgtgttcaaggaattcttatttgacttaataatggtccaagtcacaggagaagtgatgttggtgtattgctataattttttattttattrttattgtaatagttattcttgttaatctcttattgtgcctaacttataaattaaacttcatcacaggtgtstgtatataggaaaaaacatagcacatataaggtttagtactacccatagtttcagccatccactgggggtctttgaacataacacctgaggataaggggggactactgtattatttgctttctcagaaatcaaaatggaatccaaagcaattaatagccatcatttcttcaacacaccatgaagtactatgatatgctatgcttatttctaaaaataccacattctcattaaaaacctatgtaattcaaaagatcaaaaaactttaaaagtgttttctgtctctctcacacacatatgatggatgaatggatgaatcattawttttttaaccaaaagaagggtaaagygtaagctcgggtggatgcgaattttcttgtttcattcctaatgagtcaggctcctttctatgagcatcaggaagatgagatccaagattcacctgtgttctttcaaggctgaaattatggtcctttttggaccccaggaagggaaggttgcttgggaacagcatctgccagcttcaaagctctgcagctgggctctgaaagatgggaaaacaagaagtggagagggacaacctctgtgtccgtgaaagaacgcaggccatttcgtaaagtctactacaattaaagaccctcctcatagacaaaggccttgttcctgtttaagaatgaaactttttctgttctatgaacagatgtcagagagcatcaattcagttttaaaatccccacttacaagaggaaagtaagctcctaaagatcacagaatactcagccttctttcaaaactcagaattttaattcttctttttttttttaattttaatttttttttttagagatggggtctcactctgtcacccaggctgcagtgcagtggtgtaatcatacctcatggcagccttgagctcctgggctcaagctatactcccacctcagcttcccaattagctgggactacaggcacatgccaccatgcctggctaatatttttagtttttatattttggtagagatgaggtcttgatttgttgcccaggctggtctagaactcttggcttcaagcgatctgcttgccttagcctccgaaaatgctgggattacaggtactgagctatgatgcctggcttaattcttcttctaaaaaaataaagatagatagatagatcaggtattttactttcccaggatatgcatggtttaaaaatagttgcactgtaaaratgtgattactcctttatccaagtatttttgagcacataccatgtgctagaccctattcaaggtgtctgaagtctatcactgaagtaaaatgacaaagagttctgtcctcatgaaattacattccagcaggggagacagaaaacaaataatgaatataaaaactaaactcacaagtaggttttagaaagcgattacctggcatggggaagggggagaataaagccgagtaaaagaaagtaggaccactgggggaaaaattgtaattttcaataaactgctcagagaaggcagcattgagaggatggcaactgcagaatatgaagttataccacggaacccaggaatagcctttattgctattttaaatttaagttaacctacttaaaaaaaaaaagaccaatgccaggcgaggtggctcacacctgtaatcccagcactttgggaggctgaggtgggtggatcacctgatgtcaggagttcgagaccagcgtggccaacatggtgaaaccccgtctatactaaaaatacaaaaattagccgggcatgatggcacgtgcctgtaatcccagctactcaggaggctgaggcaggagaattgcttgaatctggggggcagaagttgcagtgagctgagattgcaccattgcactccagcctgggygacagagtgagaccctgtctcaaaaaaacaaacaaacaaaaaccccayaaaaacaaaaaaacctgcctgatactttaaatactaagctttaaatactaaagttatctgatgaaaaatttacaactatatttctgtattaaaccaactactacctcttctagatacatataaccaacatcagtgtcaaagattttcagagagcagttaggaatctaacaaggtcgggcctcagcatgaatcactgtcattcttaatgtagaatcagcatttctaaaaccatacataaggagccgctaaagagagagagagaaaaaggacattccaagagcttcttgtattgatttcttttaccccaaacaaagagattctsctagttacatgatataccataatcacgtaatttgtttgactgctttaaagaaagaacaatggattcgagaaaaggtgttgacttgcaaaaatacaatcattttgcaagcttttttttttgttaccatgggttgctttcccttagtaatataacatatgtggtctctatagaaaaactgaaaacgcaaagctctaattcatgccattctcaagagccggaactaaatctaaagcatccaacatctgaaaactcttacattgctaccaatgtaggaagaataaatcttttttcaagccttacatctaggtttcatgtattagactttcaaaactaaatcccctacatcacctggatgtgaattttttttctttctctccatagtgtttctttacagagacagtacagctgtggatcttctgccaagcatttttccacaagtcaggacacatagacttaaaagaaactttttgaataagaccttttctgggcttctaaaaatggttcacaagataaggaactaacacctccaaccaygattagtgcctttattttccaaatatttgctctctaggtgaccaacccctctatccctcaccgtggctttgccaaagctatccttttacaaactaaaattctcagtgtcaaatatggacacataagaaaatttcagagaggcaagctgctgggacctcagggataaatagtacatccaattgaaacacagcggagagtaggaaagatatgcttttgttaaagttaaaaaaaaaaagcaggctacagagtccatttttgttttatttagtaaatacatgtgcataatagtgatgtatgtgtgcgtatatgtatatatatatattctttaccaaaaatgctgrgagaaaaaaatgccaatattggctgggcatggtggctcatgcctgtaatcctagcactttgggaggctgaggcaggaaaatcacttgacgttaggagtttgagactagcctgtgcagcatagtgagatactgtctctactaaaaagaaaaaaagttaatgtttaagagggattatgcacaatttttcctatttgcacatttcatgttttcccctcagtttttctgcattgaacatgtatatctcattttttaaatttttgagtgaaaacattctataatgagaaaaaatatctgtgaagcacaaacctgagttccagatccctctttgacacttattagccacacagataggaaaatcacttttcagctctatggctgtgcatcatctataacatctgrggatttgatggggttgaccagattgttttctagagtcttagcattctacttgcgtataacaactgtgtattgctttgtcatgtatattgctctgcaactccactgtaagatagagatggtgccatatacacatactgtgtgccacactttatatactgtgcaggataaacaaatgctaactcattcatatcgaaccatgcatgcttactgtaccattcaaaataattattttcaggawcagattctgttcagttagttgtcttagtctgtatctctcttaccaaacagcaaattcacttctcaaggcaggaaaaccctatcctctaccttacttatgctaycttacttctctatcctttgtgtaatttctgatggtgaaatcagagagctctaacaaatttaaattccaagttaatctggccagacaacagttctcaaaaaggcttcaccacatgccctctgctcatttcacatgccttctcatccaactggcttttccaaacttttcacacctctctctcccttgacctgaaaaagaaggcaatcaagcctgtacatgacaatctacytgaattttctactttctagatgtttcctcttgccttggagagacacataaactatcccacctctaaacgttgtaaacaaacacctgccctcattctcaggaaaggatgaagttgctcaacaggccactattagaacaattcagctatccatgataatgtgacaaataaattgggcccttttaaaggcatttttctaaagttgttataaccctgtgcctccacagtatgggaagagtttgttgggccctgatgcatgtgaaccgtgtagccagcacctggtttgggaggggagctagtgtatcagcaggctacctggcctgtctcctggcttactgtgcaaaaacacactgtctctctgacaggtgaataagaggcatcagtgttgcttatttcaattaatatcattatattttagttttaattattttcctaacatgtaaaaaatcctgagttaatccaccattgggayatttttaatatgctttctgaaacgcaaaaaaaaaaaactaaaatgactaatttttctgaccatgaagtcaaaacaccacatcaactactacagaagctactataatcttcctgcacacgtttctttttgactgcaagatatgaccctaaatgagttttgtactttttttaaattcaaagatattcccacttcattaacacaattctttatattctacttctttgctagtaccatggagaaattccaggctttaaaagattcaaatgacttgtatctaaatcagacctggactctctcttcccaatatgccgatttacatgcaatctcttagagtttctctgcttccataaaatrcggaagccactgcccatcaggcccaggtttgcctctttgcacaaacagtccaaaacagttttcctgatctgtttcaacttgaagtgttgtcaatatatggattgtcttgctttctaattcagtgaaaaatctagttttccattagtctctgcctttctaattttcgatacagctttactaaatgtaattattaaaggcagattcaagaaagcaattactgagctactggtttgtatctctgaagtcttaataagcgacaaaaagttgtaattgcactaagagcataaaataaattttcatacagattatatatatacacacttaaatttgtatatggggagacatatttaagacagtatgtaaggaatccccctcttaaatcacgttttagccctcayttaaactttattcaaaggcagtgcagtatgttgaaagagtagaaaactacatttcataaaggccacattctgttctttcttaggattctgtgactttggtaaaccatctaacttctctgcatctctttttttgttctttccatcaataaatatgagaatgttaaattagatcatcaccacatactctttgagctctaaaagtctatacattatttattaaattcctaatctatgctaggctgtgtactagacacaggacagagtaagatattttacaaattctaatccacagcttcaacaggcttcaacaggcttaaaacttagcaaagaagacaagtaaatatgattacttatgaagcaacacataaaagtgctacccaatgttataaagcaaattatctttccaaaagtcctaaggaakagctgtacatgtaaatgggggacgcaactcccttggtagtcatccaaattatataatttggccttcaaactacaggcaaataggagagtattcattatatggtcacttaacaayggtcttgggcaaagaacaaactctgtgtatggtgtccactgccctgttataaactgaactgtgcaccccaccaccaccacctcccaattcgtatgctgaagctctaaccccaatatgactcctgacctcaggtgatctgcccacttgggcctcccaaatttctaggattacaggtgggagccaccaggcccagcctgttggcattattttatttatttatttatttgtttattattatttttgagatggagtctcgctctgtcgcccaggctgragtgcagtggcrcgatctcagctcactgcaagctctgcctctcaggttcacgccattctcctgcctcagcctcctgagtagatgggactacaggcgcccaccaccatgcccggctaattttttgtatttttagtagagacrgggtttcaccgtgttagccaggatggtctagatctcctgacctcgtgatccgcccacctcggcctcccaaaatgctgggattacaggtgtaagccaccgcacccggccggcattattttaaatagtgcctactatttaccttgaacaccatgaagctagggcacccacttataattctatcttacatttacttagttgacaggtgaagaatgcagttttatgatttctgtgctaacagattttgggcagggtccttacacaaaggcctaaaattttatgacgcacatcaccaccaccrtggtttgaagatatagctgcaaacttaaaaccaaaccacagtggctttcttcagatcctccgtcctgaatgtttgaaaactgaatctgaagaaggagagaagcgaggaacagaaccaggcaagcaaacaacatgcttattcctttggttccataaagaagtgaaaaacctgtatactaggtccacactgaatcatttttggatgccacattttaagaagttcattgtcaaatgagatagagtattttccatggagaaaccagagcagggccagaggtcttcccctttggcatttcagaagcaaggagagatgttgaggagcagtcttttttttctttctttttttttttttttgagatgaagtctcactctgtcatcaggctggagtgcagtggcacaatctcggctcactgcaacctccacctcccgggttcaagctgttctcctgcctcagcctctcgactacaggtgcacgccaacacacccggctaatttttgtatttttagtagagacggagtttcaccatgttggccaggatggtctctatctcttgacctcgtgatccgtccccctcagcctctcaaagtgttgggattacaggcgtgagccaccgcgcccagcccagtctttaagtattttcagcacaaatgagtagaaggaatgtagtgaggttttctagatctcaataacagaattaaagccagctaggaagttttctgaacagtctagagctcagaaagaagaycatgacagagtatgccatgcaagcataaagagcccacatcccaaatcacaccccccgataaggctgaattgacagtttccaagcagcttatgtaaagaaagattatcattcaacctagtctctggtcagagattgtattttgggaaaacagacaacacaccactgttaagtaaacagcctcttcctttaaagtgagtcagtaagggcaggggtgtcatcaggtatggaagtaacaaacacagaatttgggatgcagaatgttaaaaataaaggtyccaaatggactgttcaagcttaaagtatttggtaaggaagcatcaggatcaaggctcagaataaaagcatctaagataaaaaaagcacaaaatattataaacacgaaatccaaaatagtcactttaaagaattaagaaaagtgagaaacgttcaacttctagctttatgatgccaacagaacaaagcaggccccccaggataaaccttaagagggggccaaggaaatgtaccagaaggaaccaactccacagaagggctggaaacaaaaagcagagatccaggtctccctggaaacagagtcaaaagcacattttcctcatgcaatcagaatgaagaagtctcctatgcagactcagactactaataatgaaacaaaaaccagatacagtggaaagtctgtgtgttttgtcttaattctgatattaagtggccatgctatctyggatagatcatttactctcacttctagctcacgttactttatttattcagtgaaaaattattgatcacttttatgtgtaaacatgtgctacaggatgggaatacagtgaactaaggacacaatsaatcatcttcgccatgctatgaggggaagataaactactgagagggcatgaaacaggagagcccagccagggctaaatctctgaggaggccatgacgaaacaggcctgaagcctggggggagttgacggtggatatgaggacaaaacaaagaggaaaggtcagtttaacaaaagaaacagattacctgaggaactgagactgtgggactggagctcaaggcacaggagggctctggagcagctaaggtaggcagagggcagaccacactgagggcctcacaggccacactaaagaccagcttttaccttacaagaaaggagaagccactcaatgatttttaagtgggagctgatatgatcagatgtgcactatgaaaaaaaaattttttttttaaacagacagggtcttgctttgttacccgggctagagtatggtgacgtaatcatagctcactgcagcctccaactcctgagctcaagcaatcctcccacctcagcctactgagtagctgggattacaggtgacaccaccaggcctggctaatttatttgctcttttgtagagatggggacttgctatgttgcccaggctggtctcaaactcctgggctcaagcaatcaccctgtctcagcctcccaagttgctgggcttacaggaatgaaccacagcacctggccatgaaaaatctttctgattgcaaaatgatggattctagagagctcagggtgaatagggaagatggagtaggaagttactacagcagaccagggtgagatgacagggcaatgggagggagagtgatgatggagatggagatgaaagtgggcaaattttaaaagatgattaggtggtagagtcaacagcacttggcagtaagttgagaccatttcagatttcagatttttcagatttggggcactcagccactaagtataatgcaaatattccaaagtctaaaaaamccctgaaatctgaaacatttctggtcccagacattttggatcacggacactcaacgtgcatctgttagtagcacttcctcccacctccacctcaactggacctaaggaaaagtggtcaggcatcatccaacccatagccttcatttttaaaagagccacatccatacctaaattccctctctcaactcactcatcaaagcctgtcttagctggttttttgaaaaaggatcaacaaaattgatagaccgctagcaagactaataaagaaaaatagagagaagaatcaaatagatgcaataaaaaatgataaaggggatatcaccaccgatcccacagaaatacaaactaccatcagagaatactacaaacacctctacgcaaataaactagaaaatctagaagaaatggataaattcctcgacacatacactctcccaagactaaaccaggaagaagttgaatctctgaatagaccaataacaggatctgaaattgtggcaataatcaatagcttaccaaccaaaaagagtccaggaccagatggattcacagccgaattctaccagaggtacaaggaggaactggtaccattccttctgaaactattccaatcaatagaaaaagagggaatcctccctaactcattttatgaggccagcatcatcctgataccaaagcctgacagagacacaacaagaaaagagaattgtagaccaatatccttgatgaacattgatgcaaaaatcctcaataaaatactggcaaaccgaatccagcaacacatcaaaaagcttatccatcatgatcaagtgggcttcatccctgggatgcaaggctggttcaatatatgcaaatcaataaatgtatatccagcatataaacagaaccaaagacaaaaaccacatgaccctctccctctccctctccctctccccacggtctccctcttcctctctttccatggtctccctctgatgccaagccaaagctggactgtactgctgccatctcggctcactgcaacctccctgcctgattctcctgcctcagcctgccgagtgcctgcgattgcaggtgcrcgccgccacgcctgactggttttagtaattttttggtggagacggggtttccctgtgttggccggggtggtctccagctcctaaccgcgagtgatccgccagcctcggcctcccaaggtgccaggattgcagacggagtctcgttcactcagtgctcaatggtgcccaggttggagtgcagtggtgtgatcttggctcgctacaacctccacctcccagccgcctgccttggcctcccaaagtgccgagattgcagcctctgcccggccgccatcccatctaggaagtgaggagmgtctctgcccggctgccccgtctgagaagtaaggagaccctctgcctggcagccgccccgtctgagaagtgaggagaccctccgcccggcagccgccccatctgagaagtgaggagcccctccgcccagcagccgccctgtctgagaagtgaggagcccctccgccaggcagccaccmcgtctgggaagtgaggagcgtctacgccmggcagccaccccgtccggaagggaggtgggggtcagccccccgcccggccagccgccccgtccgggagggaggtggggggtcagccacccgcccagccagccrccccgtccggragggaggtggggggtcagcccccgcccggccagccgccccgtctgggagggaggtggggggcgcctctgcccggccgcccctactgggaagtgaggagcccctctgcccggccaccaccccatctgggaggtgtacccaacagctcattgagaaccggccatgatgacaatggcggttttgtggaatagaaaagggggaaaggtggggaaaagattgagaaatcggatggttgctgtgtctgtgtagaaagacgtagatatgggagacttttcattttrttctgtactaagaaaaattcttctgccttgggatcctgttgatctatgaccttacccccaaccctgtgctctctgaaacatgtgctgtgtccactcagggttaaatggattaagggcggtgcaagatgtgctttgttaaacagatgcttgaaggcagcatgctcsttaagagtcatcaccactccctaatctcaagtacccagggccacagggtcctctgcctaggaaaaccagagacctttgttcacttgtttatctgctgaccttccctccactactgtcctagaccctgccaaatccccctctgctagaaacacccaagaatgatcaattaaaaaaaaaaaaaaaaacccacatgattatctcaatagatgcagaaaaggcctttgacaaaattcaacaacgcttcatgctaaaacctctcaataaattaggtattgatgggacgtatctcaaaataataagagctatctatgacaaacccacagccaatatcatactgaatgggcaaaactggaagcattccctttcaaaactggcacaagacaggatgccctctctcaccactcctattcaacatagtgttggaagttctggccagggcaatgaggcaggagaaggaaataaagggtattcaattaggaaaagaggaagtcaaattgtcccggtttgcagatgacatgattgtatatctagaaaaccccattgtctcagcccaaaatctccttaagctcataagcaacttcagcaaagtctcaggatacaaaatcaatgtacaaaaatcacaagcattcttatacaccaataacagacaaacagagagccaaatcatgagtgaactcccattcacaattgcttcaaagagaataaaatacctaggaatccaacttacaagggacgtgaaggacctcttcaaggagaactacaaaccactgctcaaggaaataaaagaggatacaaacaaatggaagaacattccatgctcatgggtaggaagaatcaatatcgtgaaaatggccatactgcccaaggtaatttacagattcaatgccatccccatcaagctaccaatgactttcttcacagaattggaaaaaactactttaaagttcatatggaaccaaaaaagagcccgcatcgccaagtcaatcctaagccaaaagaacaaagctggaagcatcacrctacctgacttcaaactatactacaaggctacagtaagcaaaacagcatggtactggtaccaaaacagagatatagatcaatggaacagaacagagccctcagaaataatgccgcatatctacaactatctgatctttgacaaacctgagaaaaacaagcaatggggaaaggattccctatttaataaatggtgctgggaaaactggctagccatatgtagaaagctgaaactggatcccttccttacaccttatacaaaaattaattcaagatggattaaagacttaaacgttagacctaaaaccataaaaaccctagaagaaaacctaggcattaccattcmggacataggcatgggcaaagacttcrtgtctaaaacaccaaaagcaatggcaacaaaagccaaaattgacaaatgggatctaattaaactaaagagcttctgcacagcaaaagaaactaccatcagagtgaacaggcaacctacaaaacggaagaaaattttcacaacctactcatctgacgaagggctaatatccagaatctacaatgaactcwaacaaatttacaagaaaaaaacaaacaaccccatcaaaaagtgggcaaagkatatgaacagacacatctcaaaagaagacatttatgcagccaaaagacasatgaaaaaatgctcatcatcactggccatcagagaaatgcaaatcaaaaccacaatgagataccatctcactccagttagaatggcaatcattaaaaagtcaggaaacaacaagtgctggagaggatgtggagaaataggaacacttttacactgttggtgggactgtaaactmgttcaaccattgtggaagtcactgtggcgattcctcagggatctagaactacaaataccatttgacccagccatcccattactgggtatatacccaaaggattataaatcatgctgctataaagacacatgcacacgtatgtttattgaggcattattcacaatagcaaagacttggaaccaacccaaatgtccaacaacgatacactggattaagaaaatgtggcacatatacaccatggaatactaagcagccataaaaaatgatgagttcatgtcctttgtagggacatggatgaaattggaaatcatcattctcagtaaactatcgcaaggacaaaaaacgaaacaccacatgttctcactcatagatgggaattgaacaatgagaacacatggacacaggaaggggaacatcacactctggggactgttgtggggtggggggaggggggagggatagcattaggagatatacctaatgctaaatgacgagttaatgggtgcagcacaccagcatggcacatgtatacatatgtaactaacctgcacattgtgcacatgtaccctaaaacttaaagtataataataaytaaaaaacaaaacaaaaaaaagtctgtctttcctcaggctgggccttggaggagcagtagggatgaccttaattttgaactattccctatattctaataacattggtcctgaaatgaagaggaaaagaatttcaaaagtaaaaatgaaaacaaaaggcagtagagaagggggtggctgtgaacagagaatagcctgggttgtagaccaagggattagccttggagarctgaggtctcaagacgtcctgacacacagcaaagcatacaaaccctgaacaccacagtggtaggattaaagttctaatgcaactttgttccattggatttttttcaattacatttccccaagtaaactttatctctggtgattgtcttaacttcctaatcttcttcttttaccactttactcctaataataaagtgatggttcactatttatagaataaactgatatctttctgccttgaacctacaagctctcaatctactctggcttcaaagttgcattcctcattagtgaaaagcatgcactagaaagaattattccattrggtagtttgtgaaagataaccacaccagtgaaatgtaatcttgtcattactacaagatctgcctgtagtaatggcgcattcctttggtaagtatttattaagtaccttccctgcatcagactctgagctggggctgagtgggcagcaaaagagacacggtctctgccccatggaaacctcagggatagacagwttggccaatggtaagcacatgactgacttaaatgggagctacaaagaaacayagacagtgccaagaagtcatcttaataggtaagcctggcagtgatgaaccaccctagggatttaacactgccctctactcttcacggcaggccaggttaaggcagctgtcctcacgggtatacacatgcttgggtgcttgtgcctgtcagttacagctctttccactctgatactcagaccctggacttatctttggagacggaaaacctagattcaaattccagctttcccacatactggctacatgacctacggtaaggttttaaactctttgagcatctgttttttcacctgttaaataaagacagtaacactttctccgtgaggacttaagttaacatttataaagcagagtacggtacctggcacagattaagcaataggtactatgtctaagtgtccctsaatcttagtcaatgacaataaactcatttaaactagcatttaatgagatttcaaaacccctcattctaacatatctgaatgcctttttcgctttggtaatgaagagtctaactggggtactctgagactgcgagtcccttgttaatgtaacaatgctgtacttctcatcaagtattcataygtggaataagtgcatgtctttttataacagtattttgaataggtaatacagtcatatggtttaaaaagaaaaaaaaagatacacagtgaggtcagtctcgcaatcacaacctttcttagagcaagtcccacgcttcactccccgctcaagtgctcaccgtaaggtcctttcagccttgctatgtgcacatttgaacagtcagtcttaagtccttcccttcaacacaagaggcagcacaggacattccgttccacctcttgctttttcactcagcagaggacsctgacgatcttcccctatcaggacatagaaacagtcctcttcttccttttactgctacataatattctattgcatgaatactgttataataaatgtctttaaggctacatttctttcttcactgacaaactttactaattatagttctggcagtcggtgttggaaaaaatgggtagaaatacaatattttcatctgccttaattgttcttagccaaaaactaacagcaactaattattttttatattttatacagtctatatagtcactatgctacagtttacaagaataatttttcccttaagttattttaaaacatctgcactgtattttacacataacaggataatttttcttcgtgtttatatgggaaaagtgccggctgctacagtatccaatyagttaccccaaggagatgtcagctgtcaaccatgtctattgtagtgatttccctctcctctctcccttccctctctgggtgagctgtcaagtttctagtttctgacgtgcatttacatcactcaatgacatctgacagcagtgaaaggccacagaaaactgcttattgatcagagcaaaactagttgacggaacagatgaggttgtatcacagaaatgcagccacattcaggtgatgacattttgctccccgtacacaagagcttaatggaatacaacttcattatatmgtgccacttgtgcttacagcaccaaacccatctcctgactgttttgtctatgtggtgatgaggacaatctatttgtgctggtttcaatgtattactaacctgatttgttcgtgaacacttgcaaactacttgtgaatctgtcctgacaaatataccagaagacactgaagtctcaatcttaccaaaatctaattgtgctgtccttaaaagaaaattaaaaaaaaaaaaaaattaccattcagtgagctataactgcccagttatacttttaaattgaaattttataccacggtgttaagaagtttcaatagatttttaattcttgtgccattatcaggaaaataaaaattgataacttgagatacaattcaattttccttataaacaggagaatttaggtgtttctaagaactaagataccagatcaagcccctctgcatacaaattgttcccttcagttataaagataacaatttcaactacttcccattcattgccagtgtagataaatgaccgcaaagtataaattagtacatgtctggaatagagatcattaagtcagacagactcctaatattttgccatgtgacttctcaaacagaagaaaaggaaaaggcagcaaatgggacagaattaccagccccgtgactcctaggtgaaagaatgctaaaactttaccctgagggccgtctggcttttatctctactccttaattcctcccttgaggagggagtgttcccccatattacaaattcccacactaccttcacaacttggccccatctgcatcctatctggacttgattttttttaatagactttttacttcaatatgatttaaagaaaactttacgtcacaaatagatatgagaagccagtatcacttgctataaataggtgagtataaaaatgaaatactcattttaaaattacatttcttgtttaagrtttggagcctgaagttactccttccttagagagataagcaaagtaaagccaagttaaagttcttggagaattttttagggtggtggagaaaatgacgtaggattaaaagataagtgaaaagggaataacgttttcmtttttgagtcaatgttattcaatgtctaggcaccacttaaatcatctcctgtggcactggtggcctgtagccaaacccagagaacacaagcagagtaagctgcatgagcaggggctagagtcacgctgctggggctcgaatcctgcccctgtcacttactctgtggccaacaagttacttcacttctgtgtgcctcactgtcctctcaactgtaaaaagaaacaccataggccaggtgtggtggctcatgcctgtaatcccagcactttgggagtccgaggcgggcggatcacctgaggtcaggggttcaagaccagcctggccaacatggtgaaaccccatctctactaaacatacaaaattaaccaggaatggtggtatgtgcctgtaaccctagctactcaggaggctgaggcaggagaatcacttgaacctgggaggcggaggttgcagtgagccaagatcgcaccgctgcactctagcctgggcaaaaaagggcaaaactccactcaaaacaaaaggaaataccaacagtacataaaccctaaagaactgctctgagaagtaaatgagattatgcatgtcaagttcaaaatactttcacttcatacactttctgttctaggcctacctggaaacaaaaaattgattcaaatcagacccactatgctgtactcacaattaataaggcacatgacaactattaaatacaatcttgtaagatgtttgtacaatgacagacaggagggcagcatggtggaacccagagtgagccaggtatggggtgctaagtggagagatgaccactgccctggctgttcccagacagcccaggtctactgctgttatcccagcacaaatctctatactaccaccttgtactttcaaaaacatttcagtttggatgccaagttgtatggtcaccctaagaatgcagaggaacactttacctgcaggttctgtggtcttagagctctctgtatatacctgaagtgcttgtggttgttttatttgtatttgttgatatacacatcctccacctgactcttagctgttattctgtctccagtgtctatttaagactttaccacatagtaggtacttaactgtggctgaatgtttaatcctgagacatccacaactcaatggattactataaaccttgaaggactgagttcaaccaggaaggtagtaaatggtcagggtcaggtaaaaatcatttaaatttgagttcccaagtagtatctctaaatctgcaacctgtaattataaacctactcttacagatggaagttatatctgagttggaaagagaggaggatcttgaactagtgctcaggaagtttggacagatctccaatcaggtgttcctagggttattacaggctgaatatcctttatccaaattgcttgggaccagaagtgctgcagatttagtatttgtattatacttactggttgagcatccsaaatttgaaaatctgaaatccgaaatactccagtgaacatttcctttgagcatcatgttagcactcaaaaagttttgaatttgggatgctcaacctgtataaattttttggatgcagttaagtagtaaattagcctgtatttcctaagcctcctgagtgagtggctgaggcaggccacctgtgatcaatacagtgaagacccaaaatcacagccttcagctcagsagtggtgggacctctcagggtgcgctggcagaatgaacccaactgtcagatactaatcgtcccacataccccttccctcctcccacctcccaatctcccacttcactccactctctacccctagctgataacctcaggatggaatcaggatccttacctaccctcaacaccccacccacaaaacctgtgaagtcaaatatgcctatttagtcttgtttcacatctacacagctggagtgtgggctataaaaacacaatacattctaacatactttcactgaggacattaaggacttgaagaacttttctgaatggacacatctatgttcttacacacttacttaaaaagtgtcctgggaaacaacacccacaccaggcctgctagaagctgactgtgtgtggtggctcatgagtggggaaatacgagacggccgctccaaacaggtctggagcatcaggctgtcttcctttcacatgggtctaaagtggtggcatatttttttcccagttaaactccatggagtttaagtgaaagccaaaagaacaattaatctcagatttattatcaatgtgaaacgtttagctttcttagttgacatgttccttcggtcacagttaacttwaagagcatactgaatagaataagacatattaagccgaattatctgatgatcatgtaaattattaatgagtctataaaatacagaaaaagctgtaactgcaagaaacatttttaaatactgggatcatgtaattacagatttgtagaaaaggctaggcatttaaagaacttaaaataattaaaaaataattttttttaaagaccagatataaacaaaggaaaaaacaaaagataaaaaggccgggagtggtggctcacacctgtaatcccagcactttgggaggcagaggccggcggatcacctgaggtcgggagtttgagaccagcctggccaacatggagaaaccccgtctctactaaaaatacaaaaattagcagggtgtggcggcacatgcctgtaatcccagctactggggaggctgagacaggagaatcccttgaactcagggggcagaggcygtggcgagccgagattgtgccattgcactccagcctgggcaacaagagtgaaactccatctcaaaaaaaaagaaaacaaaaaaaaaagactaggtattccactgggtaactgctttacttcaacaatctatcattctcaagcttctcttgctctaggggctaaaacgatgttaaacttaacccacagaacccaagaatttataagagctgaaaaaaaatgtaaggtctcctgtccctactgtgccatttaaccgtaggaccaattagacataacatacatttatgtttttaatattaatatgcattatatttatgtatcttttaatgtaattattgaaacatattgtgtacctaggaagaggcttagaacaaatctgtaaatagagtattttaattagaaagtagtccaccaataaaagggctttgttacatcataaatgtaacaaagcagaagcttatcaaaagtataaaaatttaaaaacatacccttctcaaacagattcatgcagtaattatgctttaaattacagaagcacagaatagatacaccacagtaaaccaaaacttaaggttaattaggaaacaaaactcaacattaagcacatggccaaaaacttcccagattttaaaactccattcaacatgggtcttcattcacgcaacaaagatgagctgagcagtgtgcaggtgcccagtccacaggagataattagatgcataaagcatgatttgcaggtcagtcagacttcacagaccagcggagggaaagacctgttcactggccaaaacacagtgcaaaagttggtatagaagaaacataaacagggtacattaaaagtgcagaggaggcgtggcactgtggctggctcaggcctgtaatcctaacaccttgaaaggctgaggtgagtggatcacttgagcccaggagttcaagaccagcttgggcaacatggagaaaccctgtctctatttaaaaaaatacraatattagccagatgtagtggcacatgcctgtagtcccagtgactagggaggctgaggtgggaggatcctctgagcctggggaggtcaaggctgcagtgagccaygatcgtgccactgcactccagcctgggtgacagactaagacgctgtatmaaaaaaaaacaaacaaaaaaacgtacaaaggagagtacaaccacctctgtctgggacatttaggcaatgattcacagaaatgcatgtttctgagtggggtactgagttctctgtatacagggtgaaaatgagactgaagaggctggggacgtctcaggcctagggaacaataagtagcaagatmcagatccagaattgcaatgatatatttgtgcaacagtggcagactaatatgagttgaaactcagttgagtctgggggaagacagtcatcaaaaggaggggaattgaactggctaagagaaggttaaagaggtaagctgggacaagacggggaaggggctctttttaaccatatgcatgataaatacacctgatagcaataacttaagcatgacagggtcaccctgaggatgaccctgtatagcagacamacctgaatgtgtgtactgggctagggaatccagtactggccaataggaagattctgttccttgtctgtaaggaacatctgagcccccatcccctcccatagaacataagtgtacagagaatcgaggccctgagtttcatctggaatgaaggttgccaggtggaggttgttagaggggaggtgttaagtggaaatgctatataaactgcatgctttttgcaagtggttgtggttttcctgcccagctctctgccactgggctgtgtggttatcttccctggtcctcttccatttcccctgtatgtaaacaataaaactccatgtctcctttgctggctctgcatctcttcttcagcctcttgaacctggtgccatcccaactggagttgaaaggggttcagcactacactacacctacaagtctgaccttcaggctatagagagccaagaggcaatagaaatattcagaaaggcaaactcagaagaggtatggagagacacagcagggtacagcctatgagaagagtgagtggcactgccaccatgagtacacagggaagatgggtgaacaaggaggagtgtgaacaagggccagaggccacagagattactggcaaagagctgaatgcccagatgaaggacagacaatgactgttcttatgttttaggttggaaaactgggcagatagtgaagctcagtcttagactcaaagatatataagacaaaagaatattgtttgtttatggaagagagaaagatggaacggatataatgcaatcagttttgggatatcccaaaattaggatgttctaccacaggatgtccagggacagacacccattaagaagcaagtcagagcagaatgattccaaatgggctgctgtggaggaggaccctaggaccaggcatctaccaggcatctctggtattaccccatgtccaaggtcaggtagaacatgtgtgtatgacacatccaagggagagaatggagggtcaagatcctgtaagatcaatctgtaaagtccaaggggcaatgacaggagacaaaagtcaagagtgagaggccaagtaaaccttcaatgggagcaggcatatggaacaaagggagcagaaaggcaacagtgtccaggacttaggcaataaatgagatgcccaaatacctcctgcataccagccccgctggacctggctgatcgttcctaaattcctagaatatttattatatctttgtgttttgtccctaaacataccctagttttcattgttgtttaactgcaatctattcacatagcctataaattccaagaaagatactgcattttataaatcttctacattctccttattgtcccccacagtcaatgcataaagtagaaacaaataaataataaaaagaaaacaagctatatttcaagagatccaaaacttaggtacagtgcaatagttcttcatcataaatatgagcaatattttgctttttttttttttttgagatggagttttgctcttgtcacccaggctggagtgcaatagcacaatcttggctcactgccacctccacctytcaggttcaagcgattctactacctcaacctcctgagtagctgggattacaggcgtgcaccaccacacccagctaatttttgtatttttaatagagacggggtttcaccatgttggccaggctggtcttgaattcctgacctcaagtgatccacctgcctcgacctcccaaagtgctgggattacaggcacgagccaccacacctggccatattttgcctttcaagacatataaatcatttttccctctgaaaaaggaacattacttataatgataactgaataaattwttggctcttaggtctttaaaaacattttatcctttccctgttgttttatttcttttttctttcttttttgagactgaagtttcactctgtcacccaggctggagtgcagtagtgtgatctcagctcactgcaggcttgacctcccagtctgaagcaatcctcccgcctcagcctcccaagcagctgggactataggtgtgtgccaccatacctggctgattttttatattttttgtagtgatggggtcttactacgttgcccaggctggtctcaaactcctagccttaagcagatcctcctgtcttggcctcccaaagcactgggatgacaggtgtgagccattccaccaggcccttagttatgttttctataccacaccatttttacatggccatatagaatgaaaatttgaatttaatttccaatgcacagacctgcatgttctctgttcttcatttttttaaaaawmacgttttaatagttcacattttaaaaattgctgctacacacactctcaaaattgtaactatgtgaggtgatagatatgttaattcgcttgattgtggtaatcatttcacactgtatatgtattatcaaaaacatcacagcctgggcaacacagtgagacctcatctcaaaaaaaaaaagtagctgggtgggtgtggtagcacacacctgtggtcccagctactcaggagtctgaggcaggagtatcgcttgagcctgagagttcaaggcagcagtgatccctgaccacgccactgcactccagcctgggcaacagagcaagaccctgtctcaaaaaacaaacaaaaaaaaacccacaccatattgcacatcttaaatacacacaatatttatttgtcatttattcagtaaagctggaaaaaagggagagatcaagatttttaaaatgggttctactaaagtccttgggttttccacctgtgagttaatcagtcctaataagaaaaactttccccaactctcctttaagggttatccccacaagagcatacactgccttgggaggttaagagctcactgcattccttcatcattgtcagataagcatctagcaaagagtcaaattaagtgctgaaggaactttttactattcaacagagggggccaggcacagtgcctcgcgcctgtaatttcagcactttgggaggctgaggcaggcgtactgcttaagcccaggattttgagaccagcctgggcaacatggcaaaaccccatctctacaaaaaatacaaaaatcagccaggcatggtggtgtgtgcctgtagtcccagctatttgggaggctaagatgggaggacagatggagcctgcgarttcgaggattcagtgagctgtaattgtgccactgcactctaacctgggcaacagaaactaacctgtctcaaaaaataaataaaaataaaaatattcaacagaagcattactgatagactgtatgttgaactaattttttctggtgcaaatggtatatttctatggactccataatagctgaagacatgttcactcaagctactgctgctactacctatgccaaccctccccttagaacatctactgccagaaccctaccaacagcaagggatttactagtctagctccaaagtcaccacgactcgcagccaggtgtatgttgaagactataggagtgaaaagagcagaagagactgtgttcttcaggtggggcacagatctcacagtggaggctgtcaggaggtggggaaagttattccagcaggaatggtaaacagaaagcttcaagcatcaaggaaaagaagctctcaaaaatggccaggacagcccaccaccaataatgcataaacactgtaagcctctagacaccctcctgtgtgcacccaaggatggggacactttcaaggttctctgactccagttcctaaactctgatttgtgaaatgccccatcaaccacatttggcctgccggcttaggaataagaagccatgtagaccattgattctcaattctggctgcatgttagttacctgcagaatgctttgaaaatattaatgctcatgccttcaactcaaccacatagaaactctgggtagaaaacagtatcaacagaagcatctacccatcatcaagatttaatggatatttttccatatttattttgatttcattttctttttttaagaaacaaaatgttattgattcagctaaagccctacacttaacctatacaacaacacttctcctttcccagaccaaagaactcaaagatggagaaaatctgagctctgcctatacacaaactcagagtgctgccatagtggctggagcccagaccctctgacccaaaggcacatggctcactgcactgtcccacactgcctgcagggcctcagatctgggaaagggtttttactttaagcattcttaattttaaaagttataaatgaaaaggaattttgagtaatccccagtgcaytttaattgctatctgtatcatgtcttgcagacaattttccccttgccaccacatagaacacatcttcatttttattacgtgtatcagggaaaatagggttgaagatgatttaagactgactctgtaggagtgcatctatgtcctaaagttccacacgggcacactcagtcatcatgaatcttccttaagtcattcttcacaaaaggaacattcttctgaatggaaaaaccacatgtaattatttcagacaacagatcacaattccagcaccaaccccgacacacatacatgcacacaaacagttttccagaacattggtacaacctaaatttgtattgctcaactgaagaaagcattttacaatactgttgatcttagtatcaaagacctgaaaatgagttaagtgaccatcatggtattttcccccaagaagcaacagaagacataaagtcaaatacttttacttttttgaaggggtgaacaggacagggagcccacagaaaaaagtctcagacatttaaacaattaagttccactaatattactgtaaacttgaaactgtaggattatacaagataggaaacagtttcttctgttacaggaaaactaaaaattctgaagagtagcctcataaatgtatagaggacctaaaaatactggttaaaaaagtcctcagctggcaaacgcgcakctgtgtgcacacacacatattcattgcacgttaatttttttttgtttttacaatattcttgtattgtcacaaataagtatttggagtgataaaatccccactccatcccctgaaaaagatttctsgcagcatagttctatcctaggagagtgacatatgtaagttcaaaatgatccattctttcctttaacatgttagtctatatgctgtcttctaattcttatgaatgcatccaaaataagtattttcatatatacataagggctcatataaggtagtaaggtagcagaaatagggagagaaaaattgatgtcatgttttcttatgatagcctaagaaaaaatttaaaaataaaaaaaagaagtggtataaacattctggcttactgttgggaactctgttttaaaaaaaattgccataattttggaaattcttctaatgacatctttgatttccatttaatgtacacagtgacacctactggcatactgatgaggcaatgaagacaaaatgtgaaaattcatgcacagggagaggcctctgaagtagatacgtttatatgtctcctgtgaaatgacacttaaatataatattctaaaacactatattgatttaatactagaaagaagcaagaggaaagctcacatctgcttttcaattctaagttactgacaccgtgagactgacacacacacaaggttcagaggcttgacttcagcgttcagttcacattttccaaaagccataagcatttatgtttggtggttagagttaaacctcagaccttactaagatcaatgtttggctgaagggagtcacataatgtgataatttttaaaaatcacataaactaacaagtagtagttgggaggagttagctgctttataaacaagctgtggcctattataaataagctgtggtctatcacagaaacaaggcaagacttataagactttttttcctgacctaagactttttttcccgacagtacatatggtattgttgaatttggccatggagagaaataaattcaggatgaagcagctgcaaaaaatatgagcaagtgagtagagcatccatcaatcaactggtaactataggtaatgtaacaatagaaataaaagggtctgtggcttgacaggacaggaggctccagagatgacaggaatggtggctgccaccaaaggcaacatggtaggacagcattcgccagctgcagctaagtccagccagaccagagagaatgacatgaacatgtgcatgataaatcctgtctgttggcaaaattgaattaccttaagaagaggatatgcaactcacatgccaaatctgatccactactgctatgatttccaaggtggagccaacaggaaaatatatgggatcaatcatcaatgtctgccataggaatggggaaagggaattacaacatgtgtgccaaagacctgtgacctcaccaacctaagattaaaaacaaacaaacaaaactctgcttctatatgtttgtttgtttgtttgagatggagccttgctctgttgcccaggctggagtgcaatgacttgatctcagctcactgcaacctctgccccccagttcaagtgattctcccacctcagcctctcgagtagctgggatcacaggtgcatgccaccacacccagataatgtttgtatttttagtagagatggggtttcaccatgttggccaggctggtcttgaactcctggcctcaagtgatttgcccaccttggctgtccaaagtgctgggattacaggcatgagccactgtgcccggccttgctgctatatttctgtatcatttctgtactgctgcayttttgtttgtgtatttagtcttttcctttgtttccaagtgaaatcttttgaaaacagtcctattatggctcaaataagcagaaatggggattttcttaggctagttgagraacatggtgagggtggcagggacgactgctgacacagggcacgctggcctggagaagcagcagctgctggcatgcgtggacacactttgcagacgtgtcccctgcgggggatgataattcatcaccctccagcccccagcctaggggcctctcacacaaccccatccttccaccagaaaagaacacagtgccgatgtgcctctgcttccaatcaccaggacccaaggttgcctacacccttggtccaagatgtgggatacaaaatggtgtggattatctcaggggggctgacttctaaatctgaacagcactgagctttccactggtaaattactttttaacccagctctaatgtattccattagagatgacatcatgttaaaatagagacatgttttacctaaaattaatgaaaatgcataagttaatcatggaaaacctaatgcttacacctatcccctaagtttattttttcctttatacttttccatcttataacttttctattattaatacaaatatatattaatttttttaaccatgaataggctgtgcaaccatgtatattttaaatgtgtaggagtgaacattaaatatgaagctttttaaaaagatttactgttttggctgaataatactaacaagaaaaagatttccccaacctatattttacctttagaaagtgctctgtttaaaaaaaaaaaaaaagtactgttaaactaaaatgaagtgatttactgaaacttagcatttgtagctcaataaatttattaagcatttatttactgaggagtatttaatttaaaaggtttctttttatttttacttggaaactagactacagcataacagttacttcccatatatttgtctcaccccacttctatgagaatgtgcagtcaacactcagaattactgggagcatccagattatacttacctactaggtactgcgccacttttcttcctagccctcttccttctaaaaccatcccttaccagaagcagtaagcacttcaggggcagaaaatatatcttattcttcaccatatgacctagcagtcctaagacaatgccttttctctagcaaatgctcatttaaaaaattggtagagaaagcattatttataagagaaaaacgctgaaaaacaaccccaatgcctatccaaaggagactgactggataaatgatggttcagtcacacaaagaagttccatggtgccactaccaatgaggaggattcttgtgaattcatatggagtgatttttaggatatactgaccaaaaaaaataattggggaaaaaaagattatatataatatgacattatttatgaaaggaaaaaacaagggacatatataacaagagatggagatatattagggataaaataagcgtgtgtgtatgtgtgtgcatgcacaaaagagaaacacaagaagtacaaaccagaacctaataaaaatgattacctacagacatgggtgtagaatggaagggaccaagacttttccaaaaatatctttatatagttttaaaccaaataaatgttctatttatttataaatttacatttaaatcaagaggttttggaaaacctcataaaaagagcctaactgcataytaaattgattacataacaatacagaacaaataattcaagttactttttttttttttcgatttggagtcttgctctgttgcacaggctggagtgcaatggtataatcttggctcacagcaaccgggttcaagcgattctcctgccacagcttcccaagtagctgggattacaaagcacccatcaccaagcccagctaacttttttgtattttttagtagagacagggtttcaacatttttggccaggctggtctcgaactcctgaactcaagtgatcgcccgccttggcctcgcaaagtgctgggattacaggcgtgagccactgctcctggcttcaagtaacttttgaatgcagaactctaactgtacaaacctaatgaaatatattctaagacaaaatgtgctgcataaaaatcttaaattctatttagtgagtttattgttaaaacagttttgggntgaaatgctagaattattatgcatgagggaaaaagagatacaaaatgaaatgtcataatttaaaatatgtgtatatgctcacactttacatatataactatgtgtatatatgtatatgtgtatgtatatatatacatataaaataagcatatttcttagttgtatttactgaaagagtctaaaagcaatgattaaccatagcacacctaccacgcagatcttggtttctacataccattatccaataaaaggaggcaggagtccttgcagaaatgtagaattgtgaaagtacaaggtgaacctgcatatcttattggacaaaacataagaaatggtcatcaaaaaaaaaaatggggtcatgtcaaaaggacacaagagccgactagaaggagatcccttgtgacaaatttgaaacaattgggcattaaaagaatgatgacagtaatagaaaacactttgaatttttttttttttttaagccatgggtctatagaaatacaagagagtaaggaggaaagagagaagtttctctttgcagaagaatgccagctagtaaatttagaggaaayggggccgagtgcagcggctcatgcctgtaatcccagcactttgggaggccgaggtgggtggattacttgaggtcaggagttcaaaaccagcctggcaaacatggtgaaaccccatctctactaaaaatacaaaaattagcttggcatggtggcacgtgcctgtaatcccagctactagggagactgaggcacaatagcttgaacctgggaggcagagcttgcagtgagccgagatcgagccactgcattccagcctgggtgacagagtgagactccatctcagaaaaaaataaaaattaattaattaattaattaataataaaggaaatgggctgggcacggtggctcacgcctgtaatcccagcactttgggaggccgaggcagacagatcacttgaggccaggagttcaagagcagcctggccaacacggtgaaacccagtcttttaaaaatacaaaaattaacggggcatggtggtgggcgcctgtagtcccagctactcgggaggctaaggaacaagaattgcttgaacttgggaggcagaagttgcagtaagccaggatcacgccactgcactccaaagcgagactctgtctcaataaaaaaaagtaaataaataaaataaaaaataaataaatttatttaaaggaaatgacaggtagaaaatgcagcattttgcaactatcaatgtaataccttattcaggcaaagatcattactctagttaaccactgggtcaaaagggtaaaatgtaatttgggagtgaaagtaagataacaactaactttctgaggcttcaactaaaaaatataaataaaatgtgtgcacagtgcatgtgtgtgtgttatgtgtgtgggtgtgggtgtgtgtagagaaagagagagactaagggagagaaaaagaatataaaacaaacagcaaaaggttaactggtgaatctgaatgaatataagatgtccttatactgtgctttcaatattcctttaggtttaaattttaatttctcaaaattaatcattggtggaaaaaacaaaagaaataagtctgctgcatggacttccccatttgtgaaggtcctcacgatgttataaattcatgcctttgaccctacactcccatattcttacccttaccattcctatttcaatgagagaagcaaacttttggtcactcaacagtctccaacttacacacattttattctcacatgtttgctcacaagtcaataactaacattcacaacacatttcttcacagaaacattaattttcctggccagcccaaaaagtctattcaaagaataatacagccgaacataacaagggtttgaaaaaggtaagtctctacataagtaaatcagaccagagtcaatgtaatttttaataaatctggaagatccagtaatacttctccagaatcatgagaggccttctttgggagtatgtattactgcttaaagagcaggaagtgtggaaagaaacaactgaaaactatgtgaggtaatatgtaagacttataatacttataaaaaattgcaatttactttaaaaaatgaatacatcatcactgaaaaaaattcaataaaagaaaataaaactcccccattttacctcaataaaacagcattttccctagataaccatgattacttcaagtgtatgtgccaataaaaataaaactgatatggcatttttcccacaaatagtctcatactgtacatatcatttggtaacttgcttttttaatttaacacttagctttaaagaattcttaaaattacctgccaatcggtatttttaaaatagaatacattgatattagaataaataggcactttaaagtcaacattcctaaaccatttcaaccagaaaaataaactacttaggaaaaaaaacaaaaaacaaaaaaacactaggtaaagttttctacagtcaaaaatacctgatatgtaagtcttccatttgaaaaagcaatttccagaacaataacttcatatgattccatttttgtctggaaggctctatgccaaactattaccacctgagaggtaagacagaaaagaggctttgggttttcacttcatactcttatatactatttaaattttactttaaaatccttgcagaaaaatcttgaagggataaaaattttaattaacaattcctgtttctgaaaaggtacaaaaaaggattacagttaacgttattgctcaactacagctcatttcctgaaagatatattgggtacttcattgtcaagatagggctataaattcatgctttaaaagttccctctaggccgggtgcggtggctcatacttgtacttccagccctttgggaggctgagacgggcagatcacttgaggtcagaagttcgagaccagcctggccaacagggtgaaacactgtctctactaaaaatacaaaaaattagacgggtgtggtggcgggcgcctgtaattccagctacttgggagtcaaaggtggaagaatcgcttgaacctaggaggcggaggttgtagtgagctgagatagcaccactgcattccagcctgggccacagagtgagattccgtgtcaaaaaaaaaaaaaaaaatcccctctaaatggaaatcttttccttacagagaaggaatgatggaggtagataatcatcattttgccaacaagagagtaaaaacttaggcaaaaaacaattaatgtctgctgaaccaggacagaaacatttgatgaggaacagaatccttatataatctcaaaatgtcttcccaagtgttagttaataattataaaaggaaaaaaaaccatcatagacaacagagaaaacatcaaaacctaaccagtggtcaaaattagcattattagtcgggggcagacagataccatgtgcctctgaatgtgataccccaagaaggttttccagccccaaatgcgtcacctaaatctacctactataaggaaccatcagaygaagccaaattgaaggacagtctatggcctgtctcaactggcctgtctctttacaaaaatgacaatgccatagaggacaaagaagggctgagaggcagttccagattgaaggagactaaaaagacatggcaagtaaatataatgtactatttggatcttgtaccagcaaaaaaaaaaaaaatactaamaaggacattattgggacaactgacaaatttgtaatacagactacaaaatactgtttcaatattaaacttcctgatttgacaattttaccgtgattatgttaagagatttttkgtccttaggaatwatgaaaaaatgaagggagaagaggtataatgtatatatatacacatatatatatatacacatacatatatatatacatatatatacacatacatatacatatatatacacayatatatatacacatatatatacatatgtatgtgtatatatatatatgtgtatatatatatgtgtgtatatatatatacacatacacggattgagtatcccttatccgaaatgcctgagacaaaaagggttttagtctttttccattttggaatatctgcattatatgtattggttgagtatccctaatctgaaaatctgaaatctgaaatgtttcaatgagcgtttcctttgagcctcatgttggtacacaaaaaagttttgaattttggagcacttcagatttcagattttcgaatgaggggtactcagcctgtatacatctatacagatagatagatgagtgtatatagatatagatatagatacctataaaaaacagagaagggcagggggaaataataaagcaaaagtggaaagatgttaaaaattgaggaatgctgagaattctttgtattagttttgcaactttctggtacacttaaarttatttmaaaataaagttatttaaaaagttgtcctggccaggcacggtagctcaatgcgtgttatccagaactttgggaggccaaggcgggcagatcaattgagatcaggagttcgagactagctgggccaacatggcaaaaccccatctctaccaaaaatacaaaaattagccaggcatggtgatgcacgcctgtaaatcccagctactcatgaggctgaggcaggagaattgcttgaacctgggaggcagaggctgcagtgagctgagatcacgccactgcactccattcttggcgacagagtgagattctgtctcaaaaaaacacaaagttatcccattacatctataacttacagaattccaagaccagaagcaggcagagggggctgatagttcatttcctgtggtgtaatgggaatcaaaagtccatttctagggaatagtgttaggggagccaggatcacccactgcttgaaatggggattcttatggccacttagagttgtggcttaaataaagctgcatatcggaggcagcagaaagtaagtagctgatggagccaagaaaccagatattgagcaaaaatcctgttgggtcattctggatctgcaatattctgaatatatttgtcagaatttatgaagtgcttattatgatccagatactcttctgagcaataacttattgaaatcatcaaaataacagttttagatactatcattatcctcatttgataggtgaggaactgaggcacagaaatgttaaataatatgcccaagacaacacacaagtaaccaatagcgccaagacttgaactcaggctgtcaggtttcagagccttcactcttaactgtgctatactctctccctccctaacggataggaacctggcctgaactagggaccaggaggatgcaacaaaacagtgtggagggaaggtagactcacattccaagtaagcctgcagattaaaattataaaccatagaagaacagtcaacaaataatcaaaaaaatgcaaataatagaactgaaaaatgtaaagaacacttaatctgctcaaaaggataaggaaaggaaaaacacccattagaataggataaatcaaaagcaagtcaaatgaaacatatataggtagacatgaaaagaaaccaaataaaaatcctatatatttatacaatataggccgagtgcggtggctcacgcctgtaatcccagcactttgggaggctgaggccagtggatcacctgaggtcaggaattcggaccagcctgaccaacatggtgaaaactcatctttactgaaaatataaaaattaactgggcatggtaacaggtgcttgtaatcccagatactccagaggctgaagcaggagaatcacttgaatccgggaggcagaggttgcagtgagccaagatcaygccattgcactccagcctgggcaacaagagcgaaactccatctcaaagaaaaaatacagtgactgaaatcaagaactctggttcagttaaacamccaattagacaaagctgaagagaaaactggtgaagtggaagaggaatcttataaaattacccagaacatagcaagagagataagggcataaaaaatatgaaatcgagtaatgaaaaggcataaaggctagatkgagaagactctacatacatctaaaagtagttctaagagctgacaatttcccagaattcaataaagacccgagtcctcagatttaaaaagcacagagaatggtgaaaaggctaaataaaaatagactctctcctgaatatactgctgctgaaaatgcagaacagtaaagatagagaaaagtctttaaactattagagagaaaatcagattactcacagataaacgacaattaggctgacagcagacttcttaccagcaacaacagatgccaaaaataatcaagtaatatattcaaagtgttgataaaagatgactgtcaactcagacttgtgaatggagctaaactctccacccagagtataggtacagttaggataactgtctaacttactgacttatctacttatttttatttattttattaatgattatcacccagagatccttgtttcaattaataaactatactttagcaaataaaatgtaagcccagagggaaacaatgggatgcaggaaaaaacagtaagtacggatatgaataaattatttgttaaaataactttttttaaattaaaaaagctgaacaaaaattctagacatcccctataaaaacaaaagtgggatgagggagaacagtaactaaggtgtgctaaggttcttgccttactcaggagaaatataaaaataatgaataatttttttttttttgagtcagagtctcgctctgttggccaggctggagtgcaatggcgtgatcttggctcactgcaacctccgcctcccgggttcaagcaattctcctgcctcagcctcctgagtagctgggattacaggcgcctgccaccacgcctggctaatttttgtatttttagtagagatggggtttcaccatattggccaggctggtctcttggccaggctggtctcgaactcctgacctcgtgattccctgacctaggcctcccaaagtgctgggattacaggcatgagccactgcgcccggcccgaataattttaaatgttattagaaacatatacaacaaataataaaagttacaatttttgtattaaatattcaaaaatgtatcgcttccagagtggctggcaagatacatggaaaagacagataaagaactatccacctaatagaagagaggagagagagagacaggaattaagtttgataaacagaaaacacaaattaagatgacagaaatgtaccagtaatcaaatagacaactttattaaaattcacattctcttctataaagtattccataggtatttgcaaagcaattactaaaaatgaatgttttcccactgtcaagaatcaattgtatgtctttagtcttccaccttaattcatgtctgaagtgtcatcacgaagctgtagcatctccttgcactccccctcacctaccactaaactcctggcactttggagtacaaccacttgctctgaaccctgtccctgtcctctagcacaggggccctcaaccccygggccgcggggaaacggtctgtggcctgttaggaaccagccacacagcaggtcggatcagcgggggcattagattctcataggagcatgaaccctactgtgaactgtgcatgcaagggatctagggtgcacactccttatgagaatctaactaatgcctgatgatctgaggtggaacagtttcatctcatcccccctcccccgaccacctgtccatggttggggaccactgcactagcacacactatacttggttttatttcagtacctttgctcttatttttcccaagcccagaatcctccaaacctccrtccttattccaaatccactgattctttaaccttaactggctgctcatctgggaaagtcagggcccaaaggaaaggaggagctgcttggtccagagttaagctggcagactgagaataggctgtaggcctttccaccccaaattccttagaaatgcccaaattccaccccaaattccttagagatataagaatgggtgctttcagtacaccaaaaactgtcacagatagtaaggcattagaaggggggaaaggaggaagccaccattctcaaagcatgtacaaaagaagatgatacaaaagtgaggaggggctgccagggattccaaacccagagatggaagaccgtggaacacaggaggggcctggggcattgaacagtgtgctcccctacccccacctcaccctacctcattggctaggctgtgggcaacaggtttctgctctagagrgaacacagagaatgagcttggggaggagaggcagggaggcaagcaggaaggaagcaacatccaagaaaaatgggaagcccccaatacagaggactggctttggacacacccccaccccacctacacacccagcctcctttcttccttccattctcacagaggcaggaagcttccctaaccccattcaaggccagccctctgactctgcttttaaaataacaagatttgacttgtttacttctaaactgtttataccactctcatttcaacatgttcttttccataatagcgtgcttctgaaatggccaacgggtcyctaagaatacacgtgccaatttggtacaatggtcctaagcagaaatgttcgtacaaatgcattttgttttccacaatggaggcatttttctgaccagctgtgcataaatcttgagctctccattcagagactacataccttctgctagaacaggggcttctcaacagagagaagctgagacgctctccactctcggcaaccacagagcacccccactcctcgacacctattatttcaccccacacatctgctcgtctgtcagaacctttctcctaatccctacctgacacaccttacagtctctattgcttattctctattattaaagtttaaggtgagtcaactgcagttggaactgtaattatagagtacagattttattgagagaaatacatttttttttatgtgataaagaaacaggctgggtgtgctggctcatacctgtaatcccagcactttgtgaggccgaggtgggtggatcacttgagaccaggagttcaagagcstccagcctggccagcatggtsaaaccccacctttactaaaaatamaaaaattagccagaggtggtggcgcattccacccaactattcgggagtctgaggcaagagaatcgcttgaaccagggaggcggaggttgcagtgagccaagattgcaccactgcactctagcctaggcaacagcgagactctgtctgaaaaaaaaaaaaaaaaaaaagaaaaagaaacaattgagggtaattattcaaggcagcaataagtagaggaaaaaaatccagaattcaaatcagactaactgattcctacaggaaccaaaggaaaagttagaaaatgtgtttcatatctgagacttccaaattctaactttgtgagtaaaactggatatttatatattcaattgaataaatcaaatagtgtttgctaaatctgtttcttccgaagaaccaatggaattatcacagaaaatagtcaccaatccactcaagcaaagttctaatktaacagtcaatgatgtggcgaggagtactggctcatgcctgtaatcccaacactttgagagactaaggtgagaggattgcttgagcccaggagttcaataccagctgggcaatagattgagaacccatctccaccaaaaattttaaaaaattagccaggtgtggtggcgcatgcgtgcctgcagtcccagctattccggagggtaaggtgggaggatctcttgagcccaggagttcaagcttgcagtgagctataattttgtgccactgcactccagcctgggtgacagatcaagatactgtctcgaaaaacaaaaaaaaagaataaataatgtgacaaccctgagtaatacatttctgacagttttagaagcttactggctccaagatagtaacattaacaccttaaggtaatgcagacattaatagaagttcatagagttatggcaaaagctaaccatcactaaagcaaccaacgaaagaagtttaaaatttgaaaagaaaagaatgtaatggtaatagtatctaggaagatatgccatttgttcatttctgttcaataaatttaactataatcatatattaataaatacagaaaatgctattaataattgtataaacaaagaagaaagcccttaaatatgcagaaatataactcataggggacaattttggctttagtagaagtgccattaggagcagtgatgtggagtgattctcaacctttcttggagtcacagatctgaaaatctgaaggcctctgtggaaacatgcacacacatactataagattctgcgtgtaatttcaagattagaaacccgtgttaaagaacagttatctccttctaaaccactgacaatagctagttaaatgattctgaacaaatctccctagccacgctgattcatccactggctcactgcagtaccttgctctgtttctacttttgctttctctgtggctctttcccttgatctgctccacccattcctccactcaagccattctgtctccctgcccagctttctccaattcctctcctactcccatttttccctatatatgctcccacccccatgtccttaactggtctgatatgaaaataaatcatatacttgggtgacctaattaactaaatttttatgttattattcataatttaaaagccagtgagctgaaaaattgacatttacagacagagattgagagattaattgtaagattaaaaaaaggaaaggaggaaaaaacagtgtttttcaagggaaaaaattattttatatctggcccttaatttttatctctatattttttcccawaggtccatactaggaaaaaatgactgtgtccccacctgtgacaatcaggatgtttcaagacacagagagccccaagcattcacagtgggtccagaacacagaacaaagagatgagggcaggagctctgtgctgtgccaaggccggaaggcctagagggctctctatccagaatctggctgacactgagatgcgaccaagtccaatctccaagagttagggggtggtacattttacacaactctccaagtagccagcactgtctatggctctaccatatactctaaatcacaacagaaagacgctgtaggaaaaaaggctaacaaggtatgtgggaaggagtagaggcatcctaatgctaaattcagccacagttggctaaagttcatctataaaattcaaaattcagtgtgtgtggtggctcatgcctataataccagcattttgggaggctggggtgggagaatctcttgaggcaaggagtcggagaccagcctgggcaacagagtcagactctgtctctataaaaaacttaaaaattagttgggcatggtggcaagcacctatattcctagctactccagaggtcaaggtgagaggatcacttgagcccaggagtttgtcacattgctgcagtccagcctgagtgacagagtgggaccttgtctcaaaaaaaaaaaaaaaatccaacaaacaaaattcataatccttgtaccacagaaattatctgcaggtgaattgtttcacaattagacaaatgttaatgcttttaaggcaaagtccatggaaccaacactatatgacatctttaatttactatatgttttttctatgtcaggttctatgtatacagatagaagtatagataaagatacttatatttatcataattttatatatacatatttatttaatatatatgtatacctaattatataattttatgtatatataattttattcaatcctcacaataaccatatgatgtaattataatccctactcagtagatgaggaatctgaagcttagcagaattgatcaaactgcccagagtcaagcacgctaagtcagaaagacagaatatcaacacagatctctctgactctaaagcctgtgctctaagcctgagatcctgagcttctcaaacttaaatgtgcgtatgaatcccctggtccgattttgyaggtctgggatagggcctgacaatctgcatttctaacacactctcaccaatgctgctgatccataccacattttgaacagtaagggaccaaataaaccattatattagactaacttcattcatacagctgtcacttctgaaagttgagtaagtatactgtcagtaatatatctctaaaaaggcaactattttaaagataaaatgaacaacatatttccatatattaaactgtgaaatgctttttttaaaaaaaatcataaaacataactccatatatcctataacaaatttttaatgaaattaaatgattctccaatttttctgcacacactcctgctgtctttggccagaagagtctctcctgtgtcccatgtccaaaccagctgcatcctgagtttctacaaggaaaccatcagaatctattaaaattactgcacactgatagcagcagggacatgacaaatcgcaggccaagagtcagataccacagaatgtgtttcagggctttgggggcaggcccatttgcaaccaaatgatattgtgtgaggctggcatgctcagtgcatgacaaacggatgcaatttcggtgctgtctgtgggccaggggagatttctctgatgctggttgtggttagtttacagaattgtgcagagttcccagatttgaatcacctggggcttgaaagggcttcacttgacaagctacaaataattacaccctactccttctattgtactctattattttgccccctttatctctaggatttgagcttttgtgaacaagcaaggtcggcttctattttgaccacaacacaaaacattgttcttttctgatatgataaataaaatgaagccttgcagactaaacatttttatcaggtccattttccacttttataggcaacaatcaactttgcactcagttagaagggttgagctggacataagcaggcaggcaggttcatgcatcctcacttagtgatgtgatccagctatctggttattgtaaaagctcatttgaaaaatggggcattgactaacagataaagggcatgtgggcagtagcttttacaaggtttctgcttccttggcctcctctcctccaccctcagccccattctaaccacctcttcattcggataatcttaatgaaaaagtttttcaaatgtgggatgcaattagaacaaagctgccttatgtcactggcacacgtctccgaaacaccagtatctcagattcaatttggctattccatttatgaaatattttaaagagtatatctcccattctaaggcagctcctaaggataatatattgatcactgcttcacatattttaatttggtaaatgtgaaactttatgtgtggtatttcttcaaagtaaacagaaggttggaggaagcagttttctgcttaaactcagacttcaacattccataaacgagtcctggtccttaaacatttttttgaaaaaatctacaatggtaattaacactgactcaaagtaccctaaacattttcttttaaaatttaacttacttgttaagccttaactgtgggtcaagtattgttctaagtcatctacattcagtttttgcaacaaccctataacatagctataaaatgtcatttaattaaaatttgttattactggctgagcttggtggcttcatgcctgtaatctcagcactttgggaggccaaggcaggacgatcacttgagcccaggagtttaagaccagcctggacaacatagtgagaccctgtctctattaaatacatacatacatacatacatacaaaaattgattaaatttgttattacatcctcatttcagagataaggaaactgaggcacagagaggttaagtaactcactcaatgtctcacagcttgtaagtggtagagagggaaactgagtctgaagagtttgattcaggccccttcaatactgcctcttaattccacagttccatttacttaaggacagggcaaccacaagaacaatattcctcaactgagctgaaaccaagagcctggagagaactcatgttgacagtgtagacaaaaaatagtgagactgtattctcgacaggggctaaagtttgcgatttcagctcctgaaacaggatacctttattcttgcctcactacatgttttgctgaaagttggaccccttcctattctctaaatctgccttgtccaacatagcatagcactcgccacatgctgctgtcaagcatttgaaacatggctggtccaaatggagataccctgtaagtataaaaacaccaagtttcaaaaaattactacaaaaataacaagtggtctcattaataatgtttacacagattacatgttagaataatactttggatttattgcattaaatcaaatatattattacaattcatttcacttttttaatagggccactaaaaatttttaaatctctttgtagctcacatttgtggcttgcattatatttcttttttttaatttttaattttttttttttttgagacagagtcttgctctgtctggatcacagttcattgcagccttgacctcctgggctcaaacgatcttccttcctcagcctcttgagtagtggggattacagctgtgtaccaccacactcggctaattttttattcttattttgtagagatggggtcttgcttatgttgcccaggctggtctcaaactgctggcctcaagtaatcctcccaccttggtttccaaagcatttgggattacaggcgtaagccaccacaaacggtgagcattatatttctacgggactgctctaaattcatcccttgatgtttttcctgacagggaaaacaactccaagaacagcagttcacctcctgggaagcttcattcccacctccacttccactcttctcccttcaaaactctcagatttttatgctattgactccattccttgaccttgaagtactcactgtctttggtctgatttacaaaaagccttgacctgaccctgcttttccttcttgctcttatgacttctctccctcttttcatagtcaaagcatctggcagggtcctcactctctcccagctttcttaatccgctgtaatctgacttccatttcccactggccccttctccacctcattctcctgacctctctgccctctctagaaccgccactgggtctccagaaccacacaacaggcctccattgagctgagcaccaaccagacacttggaagggaggaaagaatcttaccacttctgtgaacaaaacaaggaagtggcaccaaccttcccactccattttcccaccccrggtcccaaaaaggaggttctctcattatctaggaataatttcactcaaggcagatgtggctcactgcagctgtactggaccctcccaggtcagccatcattcccttgtgtggattcctcaacaacttgctccctcaacaccttgccagtccaggaaaagccagattcaggttgagtctcaagcatcatctgaacagagtggacatccggcatgtgtagtggccatctttcaaagcatggcctgagggctcctgtccataggagcaggaccaccaagagaggagtccagtgaggaatcatcattcattggcctattggcttgaagactccaccaatggagaaaggagcaaactcaggcagaatcaaaactctcaccattggctaccagaaggaagtgaaactagaactagcttggaaagaaaaaacacaagttaaccaacttcgggtaggggatgggataggcttcctgtaggcagaagatcatgagacacagagcatgggcaccccggtcctcctgaagctggggagtgggtgggttggttcagaggtgctgagtagagagtgaggcagagatgagagagaggatactaaattttattttttatttatctttttatttcagctaccaactacagttttctaaagcccagatattcttttcagaatctctcatgtccatcccatgccactgtcccagtccacaccttcatcctggaccacagccatagtcccatacctgatttcaattaacctctttggaaacattctgcataccaaggtaagttcaatcagcctggtttcctcattttcatatcactttgctgttcagaaacttctgtacagccttgttttcttcacacagttattgagtttcagagtttctggccctatccccacctaatgcagatcggagaaatacccttggcagccccactgacactgcttgagtaatgtcagtgacagggcattctctcatctccacccctcccctgaaagcaactcatacattctccctaccagaatgygccctcctctccccagtgcccatcaaaagtctaagggttaactttgacagcttcaacaatggcagatgcccaccctccaggaggacaaagaacaaaggtagtcctcctcagggacctcctcaatgtggctctgccccatgtatccaaaatatttccactctctaaccaccactgacctcctgcacacaggacactgctccctttctatcgtccatgatataatgttcattttatctttctaactttactgagggtgcgttccttgacaaagccctgtcctttccacacacttatttaaatcctacctagtcttcaaaatgcagcttaagcaccatctcttgcaggaggtcttccgggtactgcactccactcctcattgatctcattttcaaaatctccattcaaaacaagctattaccatagggcattcattatagatcaacaagtattgtgtgattttgtgcagagctaaactaaaaactccttgaggtatagaatcatacttgatagttgtcaatggcctgtagtaagcacaaagcagacactcaaaacacttcacttactgggttatattaattatgctactttataacataaacataaacgctttgcttcaatgttgaaactttgttgagagtaagatcacaagaggttaaatggcactttttaatatctccagctatttttaatgaaactattccttaaaatgaactatcttacagcattaccaatatattaattaagcaattaatcagttcaaaatatgatgccttcaaaaactaatatttttcatttttatacgctgacattaatggccaatgaaaatgaatmcatctctaggcaaaggctgcttttaaaaacccttccaaatctaaaaaattgtaaaatatatacactttcaaaatgtcagtactgtggccagctcaaaaacctactgcctacccatattcatctaagaaaatcacttgaagaaaagcaatggggccaggcgctgtgactcatgcctgtaatccyagcactttgggaggccaaggcaggtggatcacttgaggtcaggagtttgagaccagcctggccaacatggcaaaaccccgtctctactaaaaatacaaaaattagccagacgtggtggcggacacctgtaatcccagctgtagctacagttgctggaattataggcgcccgccaccatgcagggctaataaggccacttgggcggctgaggcargagaatcgcttgaacctgagagcagaggttgcagtgagccaagactgcaccattgcactccagcctgggcgctaagagcaagactgtgtctcaaaaaaataaataaataagtgttcctcatgttttgcttgccataaagaggactaccattctcctcctgcttttcagacctaggatggtaacaactatttgttagtattaggttggtacaaaagtaattgtggtttctgccactgaaagtaatggctttacttttgcaccaacttgatacgtgccttgcactgtgctaggaacttttcatttattatctccattacatgtttctcctgaaaatgtctgatgataccactcccccgtacaaaggagtacactgaagcatgtggaggcaagttaaggtgagaacccaagtctggcttacttctgttctgctgcactcctagactgcataagccccaagcaaattatggtaaaatattaaaggaagatttctttaaaagtgtgtatttgtatgggctatccatagacacacacattttccccataaacatgaaatcttaatatctgagttctgtggaattctgggtaatctttttttatggcatcatattttccatttgttgaaattatatcattaatcagttttaatacagtgtctctactgggcacatataagaaataattctgaacagttcatggataaaataacttaggtcaaattctaattcacctctataaacccaaaatccctttgccatactgaaatttctatcaaatgtttacttgaaagcattagttttgtttttgtttgctttagtggtataagaacaggagaggggcttatggtatgaactgtattcagatcataaatcatatcccatataagcctaactcaagcacctctttatagaaattcaaaataacaattttaattttgagaaacaaatatcaacactagctactactgaaccaattatgtgttaagggcttggcatctattatttcatttgattaaaacaattcctattggttatgaagcagttaccattatctccattgaaggaagccaagactcagagcatttatgcaactggttaccattcaacacatggttagcccgtggtagggccaggggcctgtccaggtttcctcaactccagagttcactcttcaactacactgctacttccttcctcccaaaaagctcaagaacctccttctaaaaaggtcaagttgcagaataaacataaccctagcttctttctgattcataacagctggccctaatgctgtgtagctcagtaccagaacaagtaaaatatgccgcacatcgatcagcactcaagggatacacatcaatgttcctacttgaacaatcccacctatttaatgctcccaccttggttagccaatatgttagacaacaaggaagcatgcttagagtcccctctgccaggatatctcacccagctgctttcctatctttcacacagctttcttgattgtatcagtatctgtccttctgggcagggaccaacccaaggttgtgaaagcaggcccagtaacatcagctgatcctcacttagctaaacgtaatctgaggtaggcatttcacatgcattatttcatttaatcttggcaatgactctttggggttgcatactaattgtaacccttttttaagataaggaaactgaggctaataatttgttcatatttaatcttgctaacgtaactgtatttatatagtaatatctccatggagcaatacaggatgagctgatttaactactgctccactgtacactgtgttcacaaataaaaagaatcctggctgggtatggtggctcacgccaataatcccagcattgtgggaggccagggcgggtggatcacatgaggtcaggagttcaagaccaggctggacaacatggtgaaatcccatctctactaaaaatacacaawaaaattagccagacgtggtggccggtgcctgtaaccccagctactcaggaggctgaggcaggagaatcgcttgaacttgggaggtggargttgcagtaagccgagattgcgccattgcactccagcctgggtgacaagagtgaaactccatctcaaaaaaaaaaaaaaaaaaaaaagattccctttgaaagatgaaagagagtgctggcatttcttcaaaagaaaactaccgaaagtgatggcacctccagggctcagtacagtgcctggtaaaattcaggccttcaaaaaccattcgttaaataaatgaatctaagtaaatattggagctgatgaaattgtgcctcacactccacacctctgtgccttcacccagccctcatctactgccacctcttacagctcctgcctggcacttctgcctgactgtccctgccagycctctcttcaggccctaccaaggacccagcatgcaaacatgctcacagcaaatcacataaactctgagctaaatttccaattaaacagactgcctgcctccccacgcaggcatttagaattatctaggccacagaaagatcagcttcatagaatttttctagacccagaactcacagaagaagcaaaccctgactgcaaaaacagcttcaaaaacaaaactctggactgggtatggtctcatgccggaaatcccagcactttggtaggctgaggtaggcagattactcaagcccgggagtttgagaccacccaggtcaacatggcaaaaccccgtctctagaaaaaaatacaaaaaataaaattagccaggcatggtggtgtggtgcctttagtcccagctgctcaggagactgaggcaggtggacctattaagcctggaaggtcgaggttgcagtgagctatgatcgcaccactgcaccccagccagggtgacagaacaaaaccctgtctcaaaaaccaaaaaccaaaaaactaacctctgggttaaaatgatgttcattaaaactggcctcatctgaacctgaacgaacactgataggagtcaaaattctacttctgcttagagcaaagcactgaacagtgaatgggtctcggtgggaactggccccattcyaccgccagctagagctgtatactgtgatacagtcggccctcagtatctgtgggttctgcatccacagattcaaccgactgtgaatagaaaacaaaagggaaaaaaaactgaatgtatacagactttcttttgttcattattccccaaataatatataacaaccctttacatagcatttacattgtattaggtatttaagtagtccagagatgatttaaagtacacaggagaatgtgcatagtttatatgcaaatactaggccattttatatcagggacctgagcattcacagattttcatatcatcgtggagtcctggaaccaatcccccacggatactgagggatggccgtacttacaaattcaggattggttctttggcctatcctaaaaagaactttttataaacggagaaagtaggaaaacaatacaaggttttcccagagaataccactaggagcctacagcacagaaaggtagttggaatattctgtgatcaataaatagctgttaataattggtttaaccaaagaatcaccattattcatttgttcttaaatatgaagtggctgggacactagagatgttattctccaatttaaaagcgctgcagggatcttttgatatactgcttttataaaaacttaaagcagtgaattaaatatgcaatcattcaaaagtgagaaaaaaagaaaaattctcatactagatgaaaggaaggtaaaatatatgatgatgtattaactccaactagcaaaaatgtctttagaagtatcagaaataacaatagctgctccacattgtgagttctttgtgcctggtatgatgatccttacaagaaatccttacagaagatccttacgagaaaagggaataattattttaaggaatgcagctcagggaagttaaatgacttgcacaagttccctgactagtcacgatgccagaatgtggaatcaagtctatctggctccaaaacttaacaatgacactccttagaacttcctcgagcaggatgaggtcagaaaagctttttttgtttgtttgttttttgagacagagtttcacttttgtcacccaagctggagtgcaatggcgtgatctccgctcactgcaacctccgcctcccacgttcaagtgattctcctgcctcagcctcccgagtagctgggattacaggcrcatgtcaccacacccggctaattttttgtatttttagtagagacgggggtttcaccatgttagccaggctggtctcgaactcctgacctcaagtgatccacccacctccgcctcccaaagtgttgggattacaggcgtgagccaccgcgcccagccagaaaagcttttcttaagttcatttgtttataagccactcctagatgcacttttgcggaatcagaatgtgaaccagccctttaaagctttaaaacaaagctgatgcttctcctttatgctaaatatacactctayagggcatcttttccacaacagggaagctatctaccctacaatctgcaggcttagctacaaattaaaatcacctggagagtttttaaacagtaccagagcctgagcccctattgcatgagaatctctggggacaaaacttgaaaatttgtgtttttaagtgttccctgagaactactgaactaacttattaataatatgtgctggggcaagtaatctaccttaataaactccaaaagcatcctggagacatcttcagtgcagtagttctcaccttccactgttcataacaatcacccagggacctttagaaaattctgatgctcaatccataccccaagaccatcagattctctgagggtgggccccaggcatcagtagtttgtaaagctctccaggtgatgctagtgtgcagcaagggatgagcaccatggttttagcagacaacgacgtgcaccagaagcccaaaccctcctttgctggtgttccaatgtgccatccaccagcagcaccaccacatcaayagcctttttctcaaactccctgccttctcccttagggtcaggcacctgaagtggtgctaacaccygaagtttttccangtctcaggcacttcccccaactccctgcacacgtgcatgcccgcttamaagaaatgctgcatgagtctcccctctgtcctaaagmatcattcctatgattggatgattcattccacatgcacacgcgtttgtcattcttccaccactttccattttattatctccacttccgtttctctcttattagcatttttaactgtcactacttttgcagccatggacaatatgctgttctgaatacactaaacttaggtacaaagctgcaggctaaggaacaacactgaaactaagggtcattggctgaaactaagctgacatctcaggcccactgctattcactagatgtgggcagggttgaggtctttctgttctggagagcagctctgtttacatctgtagaagttcatcatacaaagttttgaagcagcggagcttcctgctgctttttgattacttacagctcctcgggatgcaaagctcaaaagattatcctaaatttccaaggcacacattttgaataacaacaaagatctttaggttgatagagactaaaaagctttgtacatctccattctaaagttctgaattatatgaaaattctcacatgaggcctagatgaaaaacattctatactacaagcaaaatgctttttactcaacaatatttaaatccaaaagaagcagcattcagggtgaagacattctccaaaagggcaaatcaggtgttgattaaagtttccctaaaagttatactactttgtactactaatgaatggctgacaaagttaatccatggcatcaccctgcaaacaatcctccaaccatgtacaaacaacatcagtaaaaaaaaaaaaaaactcatagcactaagaaatgcatttgcctgataaagtagttctgtactaggtaagacttagtccattactgcttttttcaatgctatctcagattatttctgcaaaactatcaatggaaaaaacacagacaatgaattcagagtctacgatggaaaaagcagatttgatttccatacaaattatgagataaagcgtagcaataatatattccaataatttttatgaaaaagatcaagatttctgacattttaaataagctcaccactaatatcctaagttaatttcaatcctgttcataatcattggtatttaagaagaaatttcaggataatatttaaaagttaattaaaagcagcataagcattcatgtcagtcaagcatgacctctgctctacaacacatttaaatgcatgtcaccttgacctgtaacacagcaatgtaaaaaattttggtcaatataaatcaaatgtacactaatttattcagcaggtttcctggtatctgaatcaacgtcagaaatctaaccagtatttgttattctgttattgacaaaaggaagcatatttaaatgataacaagtactcatgggtgtcatttggaagttaaattgttccccaaggacagcctccataaacagctacatttaaaggtcatttaccaccaaattatgaacaactgttgcatttattagctcaggctcaatagtttggaagctgcagtcatcaayttctactgacaatgagatctaattgttcaccgataataaacaaggaaaacagagcttttctataaacttttatcctgcactatattcacatttwaaaaatttggttgcacactttccacaggtatgcatttattatttccaactgcaaataaatatcagataataaaatgtaaaaacgtttctcattttatatttatctgaacaaaatgaagaaaaacactacgatgtttatgaaggaagagtacgtttcacttttggaaggtggtacaataattaattttatgtgtctacttgactgagccattgggtgcccagatattcagtcaaacattctgggtgtttctgtaagagtgtttttggatgagaygcagatttaatcctataggctgagtgaagaacattatgattcataatgtgagtggacctctttgaatctcggaggcaacatattcctcatttgggtgtgttactcctgcccatttatcaagtgacttgaaaagattctagtttttgagtggggacccaaaatatgggataggctcctgaatagggccaagctgacatggcaactgctctgccactttggccatatgatccagcagatccaatggtgcctgaagtatccgtggcagatacggatgttgtttggagtctctggcaggttgctataggttaagtgcaatgctggttcttagaattttggagcaaagccctgcctacctctatgaataaccactctacttttgagaaacagcgcttaccctgctactgggtcttagtagwgactgaatgcttaaccatgggccaccaagttaccatgtgacctaagctggccatcatgaacagtgtgttatctgacccatcaagctataaagttgggcatgatcagcagcactccrtcatcaaatggaaatagtatatatgagatgaacccaagcaggccctaaaggcacaagtaagttacaggaagaggtagcccacatgccatagtccctaatccagctacactgccttctctctcccagtctgcacctatggccccatggagagttccctatgatcattctgacagaggtttacgatggttctacatgatatacaggtattaactggaagtgcacagctgcagtacactgtccctctctgggatatctttgaagcaaagtggtgaagagaaatcctccctgtggacagaacttcaagcagtacatttgattgtaaactttccttggaaggagaaatggccagacatgtgattacacaacaattcaggggctgtggccaatggtctgaatggatggtcagggacttggaaggaatacgacttggaagaccatgtcttccaagaatacctacatggaagacctctctaaacagtaaatgacaaaaaactgtgaaggtatttgtgtctcatgtgaatgcccaccaaagggtgatctcagcagaggaggattttaataatcatgaggatttgaataaaatgactccttctgtgcctacaagtcagcctctttccccagtcaccactgtcatcacacaaatgggctmataaagtagccatggtggcaggaatrgaggttatgcacaggctcagaaatatggacttccactcaccaaagccaacctggctacagccactgcagagcacccaatctgccaggagcagagatcaacactgaggccccaatatggcaccattccatattgggaatgatcagccagacacctgacagcaggttgactacaatggattgcttccatcatgaaaggggcagagttttgtccttactggaatacacatttactctggatacagacttgccttccctgcacacaatgcttctgccagaactatcatccctggacttacaggatactgtatccactgccatggaactgatttcatagcaaatgaagtgaggcaatggtcccatgctcatggaattcactgggcttaccatattccccatcatcctgaaacagctggcttggtagaatgatggaatggccttttgaagactcagttacagtgctagctaagttgcaatactttgcagggctgggtcaagtttcttcccaaggctatayatgctctcaatcaacatataatatatagtgctgtttctcccatagccaggattgataggtccaggaatcaaggggtagaaatgggaatagcaccactcaccattacccccagtgacccactagcaaaatgtttgcttcctgtccccaggactttatgctctgctggcctagaggtcatagttccatagtgaggaatgcttccatcaggagacacaacaatgattctgatgaaatgaaagctaaggctgttgcctagccactttatgctcatgtctttaaatcaacaggcaaaaatgggagttactgtgccatgtattgctctgctatgtactggctggggtgactgatcctgcctaccaaaaggaaactggactactactccacaacagaggtaaggatctcctgtctggaatatggcagatcccttcaagcatagtattaatattactgtaccctgtaattaaagtcaatgaaaaaaactgcagcaacccaattcaggcaggactactaatagcccagacccttcaggaatgaaggtttgagtgacctaccaggtaaagaaacacaaccggcggaggtgcttgctgaaggcaaatggaatatggaatgggtagaggtatttataaataccagttatggcagggcgtggtggctcacacctgtaatcccagcactttggcacgctgaggtgagcagatcacttgagttcaggagctccagaccagcctggccaatatggtgaaaccccaactctactaaaaatacaaaaattagccagcatggtggcactcacctgtaataacagctactcaggaggctgaggcaggagaactgcttgaacctgggaggtggtggttgcagtgagctgagatctcgccactgcaccccagcctgggtgacagagcaagactcttgttattcattcattcataaataaacaatgccagctatgaccacacaaccagtgacagaaattaagattgaattgtcatgagtatttcctccttattttgttacaaaaatatgtatgtatatacagcaaacaaatatctttgttttcttctctcttaaccccttatcatgtagcatatgatgtattgactttatgtcataatatttatgtattattaactttatgtcatcatatttaaatcatcagatatcaagaagagtaaacatcactcaaggattctaccttctcttctagggaaggagttagtgtatttggggttataggatggatgtatcatgtgaggtagaattatgaaattgttattatctttatttggagaataaagacagtatttgatccccaaattagaacttccaacttgcagtctcaccaatagtgtgttagagaacctgcctcctctcacctccatcctcatcatgactggtttttatcaatcttttccattttgcctattgaattaaaaagcaagcaagtggctgggcacggtggctcatgcctgtaattccagtactttgggaggccaaggcgggtggatcacctgaggtccaaagttcgagaccagcctggccaacatgatgaaacctcatctctactactctactaaaaatacaaaaattagccgggcatggtggtgtgcacctgtaatcccagctactcaggaggctgaggcacgagaatcacttgaacccgggaggcagagattgcagtgagccaagatcgtgccattgcactctagcctgggcaacagagcaagattcagtctcaaaaaatataaatacataaaaataaataaaaagcaagcaaacaaacaaatcttattttactttgcctttctttaattaagtatggtttaaggaaatgtgtatgaataccaagttgatagggagtaggcttttcatgsttaattttatgtgacaacttcagtgggccacagggtgcccagatatttggtcaaacatttcaaactaagcacctgtgaaatggtacttcagaacctgctctacccacagtcttctccttagtaaacaatgccatcattctgaaactgcctttgcaaaagtatggctgagacagtgaaagagatctaacttaactgactccatcttgcttccaacctccaagctgtccttgttcattcctgagtgcaggctgacctaaccttgggaggaacttagtctacagtttatagtttaaaacaaagacgataacagccctttcccaaagcaaacctccttcttkcctggggactatactgcctttgtaggactaagaaattagccacaagattagaaattatggtttaggagtcatgcagctggaggctgcaagattctgccctccctaagctgctcctaagatcagtgcttaagatattttgcagaccccgcacttgatagatcagctggcaccacccacatcgataaactggctcatctgatcttgtggcccccacccaggaactgactcagtgcaagaaaacagctttgactccctatgacttcgtctctgacatgaccaatcagcactcctggctcactgacgtctccccacccactaaattgtccttaaaactcatcactgaatgtttggggagattgatttgagtaataataaaactctagtttcctgcacagcaggctcttgtgaattactctttctctgttgcggttcccctgtcttgataaatcggctcagcctaggcagcaggaaaggtgaacccattgggcggttacaattcttcccttttttcaggctaaaaaccttgggagtcacccttgttcgtcactttttctcatgccccaaatctaatccatcagtggatcctatggcctcaatcaccaagagctatcaggaatccaaccatcttccaacacttccttctacagaactaacatgttgttctaagccatcatcatcttttacttgggatactatagtagcttcctaactgagcttcctaactgcagcactcttccttatagtttattctccacactaaaatgggagtaattcttttaagacatgactcatgtaaccaataggtaagttccacaaagggagggattttcatttacattttttgctactgtgtccttggcatctagaacagttcctggcacatgattggtgatcaataaatactgaatcatgtcgctcctctgcctcctacttcccaaagtaaaagccaacatgggctgggaacagwgccactgaatcacgtcgctcctctgcctcctacttcccaaagtaaaagccaacatgggctaggtacggtgcctcatgcctgtaatcccaaaactttgggaggccaaggtgggatgatccctttagcctagggctttgagaccagccttggcaacacagtgagaccccacctctacaaaaaataaaaaattagccaggtgtgatagcatgcgtccatggtcctagctgcttgggaggctgtgcctcctgagcatcaagtgatcctgctggaggatcacttcagcctggrgcattaaggctgcagcaagtcatgattgcaccactgcactccagcttgggccacaaagtaagaccttgtctcctcccacctcaaaaaaaaaaaagaaaaaagaaaagccaacgtccttatyrctgcctaccagacctatgctctgccctcccaccccaccattccatctcccattatttcccccaccacactatatatgaccttatctcttatcactctctattttcctactgcattccaaacccactggatcctttctattcctaaaacacactatgcacacttccacttcatgtcctttgcacatactgctccttctgcctaaaagacatttcccttggataacctcatgactcaccccctcacctccttcaggtcccggttccaatgttgccttcccagggaaggattctctgatgatcccccagcactctttacctctcttcctttctttttctccatagtgcttacaactatctaagatactatatttaatttaattatcatgtttactcttactctcccccaactagaatgcaagctccttgaaggtagagaattttgattgttttgttcattactgtatccccagagggagattagtatgcctgccacttaataggtagataaatatttgctaaataagtagatgacttgttttcattttctcttgacattgtaaacaatgctacaatgaactttatatgtatatctttatgaatttatggatacagactaaaaagtgggaaggttgtttcaaagggtatataaatatcttatctaatatatactgccaaattgacctccaaaatagagcttccaactttcagtctcaccaatagtgtgttagagaacctgtctcctctcacctccatcctcaaaaggactggtttttatcaatctcttccattttgcctattgaattaaaaaaaaaaaacatgccttgttttacattgggtttctttaattactggtgawattgactatctttccttcctttctcttttttttttttttttttgagacagagtcttgctctgttgcccaggctggagtgcagtggcgcaatctcggctcactgcaagctctgcctcctgggttcacgccattctcctgcctcagcctccccagtagctgggactacaggcgccgccaccacgtacttttttttcggagagacggggtttcaccttgttagccaggatggtctcgatctcctgacctcgtgatccgcctgcctcggcctcccaaagtgctgggattacaggcgccagccactgagcccagcctctttcttttttttcttttgtcacttgtacccctgatgtttctctccccttaacaaaaccaaacaaaaaaccactccctactcatggctgcttccagaccatacttttagctggggatcttcagtcccactgtaaccactcaacctaattctttaagctccaaccccagtacgtgtccctccttaccaactatccacacttcttacccttctccatacaattccctgagcctaaaatgatttccctccctttctcaaactggcaaacttccactcagccttccagagtgagctttcatgtcagcggcccctgccccgcaacaccaatgcaaccactgggaatgggggacacagaataagtaaccacaaaaatgaatttttgctctacctgtctatgtaacctcaataatcagatgaatttccattagcaagaaatagagaaaagggtgagggtgtaaagagagaagcttacagtttataaaacaatccctactaagaaaaggcagctggtgagattcaattcacctactggctcttccttagaatgagaattataaaatcaatgagaagaggggactagcatatttcaaataccaactcactctcctcaaaaaagaaaaaaaaaagcaactgaaaagggacaccatattgggcgtttcaaatatacccaatctaataatcagaatttaaccagcaaattacatgggatctgagagggcttttagctttgtggaaggttttctgctccttctaaagtttccaggaaggttaaaaaaaaaatcctctragagttttcccaaatcaaatgaaatagcaaatgaagtgaggcaatggtcccgtactcatgaaattcactgcttaccatattccccatcatcctgaaacagctggcttggtagaatgatggaatgaccttttgaagactcagttacagtgctagctaagtagtaatacttcgcagggctgggtcaagtttctttttttgggaggggtggtggacaaagtctcgctctgtcacccaggctgaagtacagtggcaggatctcggctcactgccaactccacctcctaggttcaagcaattcttgtgcctcagcctcccaagtagctgggattacaggggcgcaccaccatgcccagctagtttttgtatttttagtagagacagggtttcaccacgttsgccaggctggtctcaaactcctgacctcaagtgatctacccatcttggcctcccaaagtgctgggattataggcgtcagccactgcacccagcctcaagtttctttctcttccatttatttattagattgggaacataaaggaagtggtaaaaagaccccacctgagtgaaactaaaattaattctcagttactatgagatgacattttcctactatgatagataattaaataattcagcttttaaaaattttcttggccgggcgcagtggctcatgcctgtaatcccagcactttgggaggccaagggaggaggatcacaaggtcaggaaatcgagaccatcctggctaacacagtgaaaccccatctctactaaaaatacaaaaaattagccatgcatggtggcaggcgcctgtagtcccagctactagggaggctgaggcaggagaatggcgtgaacccgggaggcagagcttgcagtgagctaagaccatgccactgcactccaagcctgggcaacagagcgagactgtgtctcaacaacaacaataaaaaaattatttcactctttaaaaattgttagaaatgtggtatgcacctctcactgttagtgccccttcatctcctacagggctaatctgattctacaaatggaataaaagatagagtaagacttctttcaatgtttagagtggcccaaaaataacaaacacagcctatgagctaggaccatgagccaggaactttggggaacttacacacataaagcacatcaatggtcagtctatgtcttatgttaattatgaggactaaactctgatttttttttatcttgcccaaattcctatctaagcggtctgggagtcatgcccacagatgggttttatttaaccctgtatatcatgatttactttccaacctgactctggcataacattaggagagaaagaagaacatcaaaatattttaccctgaaacacgtttctttgccatgttttgayggccctgcaaagctgttctttgtggggaaaactttgcatctgtaaagaatctgtattaacacagctagaagatctttttcttccagaccctcccaatcctaaagagaytaactaagatctgaataggaaacatttgtcacctattgtctctaagggcagccactattagacttcaaaagaactttggtctctacaatctttatcttaacctgaacattccctttttatctatcccaggtttttaggcaaactcaaccaactgtcaaccagaaaatatttaaattcacttatwgcctagaagcttttggctttgagttgtttcacctttctggacaaaccaatgtatttcttaaatgtatttgatgtctcatgccactctgaaatgtataaagccaagctgcaccctgaccaccttggacacatgttctcaagacttcctgatggctgtgtcacgggccatggtcactcatatttggttcagaataaatatcctcaaatattttacagagttcaactcttttcatcgacaattattattatttattatttgagatagtgtcttgctctgccacccaggctagggtgcagtagattgatcatggctcactgtagccttaacctcctggggtcaagcaatcctcccacctcagcctctcaagtagggaccataggtacataccactatgcccagctaattttttaaattatttgtacggtgagttctcactatgttgcccaggctactcctcaaatccctgggctcaagggatcttcccaccttggccttccaaagtgctgggatcacrggcatgagctaccacacccagacaaatttattttgttgggggaacaggatctccatatgttgtgcagtctggtctccaactcctgggctcaagtctgctttggcctcctgagtacccgagactgaaggcatgagccattaactttttcctttccctaaatctcttaaggaaagactaagataagcaggtctcattcattcatttattcaagtgccaatgattacaatatccaggcaaatgattacaatatccaggcatgatacctagaaatcaatggcattaaaacagacaaggtcaggctggtcctggttgctcacacctgtaattctagcattttgggaggccgaggcaggtggatagcttaagtccaagagtttgagactagcctgggcaacatggtgaaaccctatctgtaccaaaaatacaataattggccaggcgtggtggtgggcacctgtattcccagctactgaaatagtgagacatttaaaataataaatacagttttataaacttactcacagaaagaaatgaaaatgatttttaaccatataaaaagatgttcaacttcattcataagtcataaaatcatgaatgacattaagaattacattgtgatactattgttcacctatcagattggcacaaatccaagagcctgagaacactcagttggcaagcttgtgagggaggatatacactcataaactgctacagtaatgcataataccacagtccctatggatgggaatttgacgacatcagctaacattaaacatgcatgtaatttttggtccagtaaccactgctagaaatttattctaaagactcattgacaaaaatacaaaaagacatgcacacaggctattgattgaagacaaacaatggagaacaattcagatacaggctttaccttgtttgactatactttgctttaatgtgctttgcagatactgcatttattacaaattaaagttttgttgttatcctgcattgagcaagcctatcggcggcatttttccaatagcatgtgctcactttatgtctctgtgtcacagttttgtaattctccaagtatttcaaaractcttccattattattttatctgttatggtgatctgtgatcagtgatcttacaagttactactgtaattgttttggagttccacaagctacacccataaaaagatggcaaactcaataaatggtgctggctatccacaatagcaaagacatggaatcaacctaaatatccatcaaaggaagactaaataaagaaaaggtcctgtaatcccagcacttttggaggccgargtgggcggatcatgaggtcaggagttcgagaccagcctgaccaacatggtgaaaccccgtctctactaaaaatacaaaaattagccgggcatcgtggcacgtgcctgtaatcccagctactcaggaggctgaggcaggagaatcgcttgaacccaggaggcggaggttgcagtgagccgagattatgccactgcactccagcctgggtgacagagcaagaatccatctcaaaaaaagaaaaggtggtacatatacatcatggaatattatgcagccataaaaaagaatgagagaatgtcctttgcaggaacatggatgaagctggaggccgttatccttagcaaactaacgcaggaaaagaaaaccaaataccacatgttctcacttataagtgggcgctaaatgatgagaagacatggacacatagaggggaacaacagacactggggcctactggagggtgaaggacaagaggagaaagaggatcagaaaaagtaactatcaggtactaggtttagtacccggatgatgagataatctgtacaccaaaccactgtgacatgagtttacctatataacaaacaggcatatgtacctctgaacctaaaaaaaaaaaagttaacaaataaataaataaatgatgaagggataagtggtagccatatgtagaagattgaaactgaacctcttccttacaccgtacacaaaaataaactcaggccaggcacggtggctcctgcctgtaatcccagcactttgggaggctgaggcaggcagatcacctgaggtcaggagttggagaccagcctgaccaacatggtgaaaccctgtctctactaaaaatacaaaaattagccgggcgtggtggtgtgcacctgtaatctcagctacttgggaggctgaggcgggagcattgcttgaacccgggaggcggaggttgtggtgagctgagatcttgccattgcactccagcctgggcaataagagcgaaactccgtctcaaaaaaaaaagaaagaaaaatgcaaatcaaaacaacaatgacatatcatctcacatctttcagaatggctattattaaaaagtcaaccatgaaggaaagatactgaggagacccctgacccaaaggaaatagactgcagcaccgaatggaagactttggagtcacggaaacttttcttttgagctatttacagcttttaaccattaagtaacagaccaggtgcagtagctcatgcctgtattcccagcactttgggaggccaaggtgggcagatcacytgaggtcaggagttcaaaaccagcctggcaaacatggtgaaaccccatctctactaaaaatgcaaaaattagccaggcatgttggcgggcacctgtaatcccagctactagggaggctaaggcatgagaattgtttgaacctgggaggcagaggttgcagtaagcggagatggcaccactgcactccagcctggatgactctgcctcaaaaaaaaaaaaaaaaaagacacagaactaccatttgacccagcattccaattattggttatataccctaagaaaataaatcattctaccataaagccacatacgcatatatgttcatcacagcactattcacagtagcaaaaacatgaagtcaacctaaatgcccatcaacagtagactggataaagaaatctcggtacatatacgccatggaatactgtgcagccataaagaaaaacaagatcatgtcctttgtggcaacatggttggagctgggggccattaacctaacaaacacacacagaaacagaaaaccaaatactgtacattctcacttgtaagtgagttataagggagctaaacaaaagagcacatggatacagaggggaacaacagacaccagggattacttgcgagtggagggaggcagaagggagaagatcaaaaacctacctattgggtactatgcccattacttgggtgatgaaataatctgtacgccaaactcctataacatgcaatttacccatataacaaacctgcacatgtacccccgaacctaaaataagtaaataaataaaagatggcaaatttaactgacaaatgttgtgtgtttgggctgttccacagaccagcaattccctgtctctctccctctccttaggcctcactattccttaggacaaacaatattgaaattaggtaaattaataaccctacaatggactcctcatgataaaactttaatgggtaagaagttgcttcttaaggaagggcaaagaaagtggtttcttgagatggaatctactcctaatgaagatgctgtgaacactgttgaaatgacaacaaaggatatagaacattacacagacttagctgataaagcagcagcagcatttgacagggttgattgcaattattttttaatagagattgggtctcatgaggttgcccaggctagtctcaaactcctggactcaagcaatcctcctgccttggcctctctaagtgctaggattacaagttagagccaccatgcccagacacctgaaaccaattttggaagaatttctgagggtaaaatactatcaaamagcatyacatgctayagakaaatgtttcaggaagtgtcaactgatagggcaaacttaattgtcttaggaaattggcacagtcggctgggcgtggtggctcatgcctgtaatcccagcactttgggaggctgaggcgagcagatcacgaggtcaggagttcgagaccagcctggccaacatggtgaaaccgtctctactaaaaatacaaaaattaggcgggcatagtggcctgcacctgtagtcccagctacttggcaggctgaggcaggagaaattgtggaacccaggaggcagaggttgtggtgagccaagattgcaccactgcactccagcctgagcaacagagcgagactctgcctcaaaaaaaaaaaaggaaaaggaaaagaaattggcacagccaccaaccttttgcaaccaccaccctgatcagtcagcagccatcaacatcaaggcaaacaaagattcccactcagtgaaggctcagatgatcattagagtttttagcaataaaatactttttaattaaggtatgtacatttttttagacataatgctactgcacacttaataaactatagtgtagtgtaaacatttatatgcattattaaaccaaaaaattagtgtgacttgctttattaagataatcactttactgcagtggtctggaaccaaactcacaatatctctgaggtatacctgtacagaagagaatgatacatcttcatatatgtccctgtgcagtgatctccaggatatatcattaagtaaaaaaagcaagttgaaataaaatgttttagtataccactgtttaagaaaaggagtggagacacaaatatattagtatgtgtttatatttttttcaatggaaggataagccataagattttttttttacataagtaacactatgtttttttttttgttttttttttttgtttttttgagacagagtctcgctctgttgcccaggctggagtgcagtggcatgatctcagctcactgcaagctccgcctcccgggttcacgccattctcctgcctcagcctcccaagtagctrggactacaggcacccgccaccacgcccagctaattttttgtatttttagtagagacagggtttcattgtgttagccaggatggtctcgatctcctgacctcgtgatccacccgcctcagcctcccaaagtgctgggactacaggcgtgagctactgcacccggcctacactatgattatttttatatgcatcttttgatcccataaatctgctagcagtaagggcttctatatacagaagaaaaaataattccctttcatcwgtgtagtgctggggacagcctcataccacttttttttttttaaatagtaatcgatgagagcagaagataacaaagtgaggacaaaagcagatgctgaatttcagtagataaactcgatgcagtgtgtttgatttagaattatgactatgctttacacaaatacaaaacaaaattagttttttaagaattcttaaaaatacaaaatacaagactgggtagctagcttgtgttttaagtagagaaccaatccaagtgattttaaaaccagtcatttgattgtacactcctagtggaacaggctgaagaacaaaataacttatttggtttattttcaagttcttaaggcaggcacagtggcttacggctgtaatgccagcatcttgggaggctgaagcggtaggatcgcttgagaccaggagttcagggcctgcctgggcaacactgcaagaccctcacctgtacgaaaaaaattttttaaaatacataaatttgaaaataacatctaaaaaaaagttaaaacatatttctagctcaatgaaaacaagcttgcttgtgcccccaaatttctaagcaacatatttccaaaattcaatcctcttgtgcctattttaattcttaaatgaatgtaccattctaagtttgttaatgttcaagaagaatgttttcaaacggtatttcttgtccttaagggtaaggaacataccgccgggcgcggtggctcacgcctgtaatcccagcactttgggaggccgaggcgggtggatcacaaggtcaggagatcgagaccatcctggctaacacggtgaaaccccgtctctactaaaaaatacaaaacattagcaggccttggtggcgggtgcctgtagtcccagctactcgggaggctgaggcaggagaatggcgtgaacctgggaagcggagcttgcagtgagccgagatcgtgccactgcattccagcctgggcaacagagcgaagaatccgtctcaaaaaaaaaaaaaaaaaaaaaaaaaaaaggctaaagaacatattttacacatgcttgatttaatcattcaacaaatatttaatgtgggcttctgctatgagcctaccatgaatgaggcactgtgccagctacgtccttgttacacaatggcctccttcattgtacatgctggtaatggatgactgaaggacatggcgtggaattgtggtcttcctgacatcctgctgcccttctcccactgtgatgcctgaggggtttggtgacaggaatggactaacccattcccagttccagagatgcctcctattttaactccatctggttaacctaccctccttgccatgatggttggttaagataaccctggcctcagcaaattggcactggaattcctctgcaattctgtgttgaaaaatcaactagggctaatgagaaagaaactgaagggagacttatttgctcaggggttctagggagaaaagtgtccttactattaaatgcrgctgggcatggtggctcatgcctacaatcccagcactttcagaggctgaggtgggtggatcacttgaacgcagaagttcgagaccagcctgggcaacatggtgaaattctatctctagcaaaaatacaaaatttgccggacatgatggcatgcacctgtagtcccagctacttgggaggctgaggtrgcggaatcacctgagcctggggaggtcaagactgcagtgaactttgattgtaccactgaactcagcctgggcgacagagtgaaaccctctgtcaaaaaaaaaaaaagaagctattctgaaacagaagagtcactctcaggtagccaggctccctcactcagtgtctcggacttgttctcaaaaatacaaaatagttcagcaaaccaccacggcacatgtttacctacgtaacaaagctgcactttctgcacatgtatcccggaacttgaagtaaaataaaatttttaaaaaaagaaaagaaaaaaagaaatatatacatatatatatagatatagatatagatagatatgtgtgtgtgtatatatttatacacacacacatatataaaatagcactacagtaccaataaaatgcacacaaatcactgttaattccaaggcagggtttacattgtgcttattttaaaaccaacaaaaacaaccagaaactggatgctattaaggtattgataattttgcggtaatatttacattttggttatgctttttaaaagtttttacctgtcaggtatacactgtaaaattatgcagataaaattgttttgaatttgcttaaaaatactccagaattttttttttaaagacagggactgaggtgtagtgaatgaaagaattataaaatattgaaggtaatgggtaaatgatagtttattaaattgttctatttttgtagtttaatccataaaagcttcaaaataataatgatcataataatatttcacattatgatcctatatataagaagctgccttgtgtactgaagagcatgctacatttctaagtgtttattaagtaaatcagtgatagtatccaggtcccaagaagatatatatgtctacgcataacacatgcagtcacgcaggtacttaaaatggacttgaatctaattcaacgctgtgatttttacagctataaaaactgaagtctaagtctgggtgtggtggctcatgcctgtaatcccagcactttgggaggctgaggcatgtggatcacttgaggtcaggagttcaaagaccagcctggccaacatgatgaaactccatctctactaaaaatacaaaaaattagccagacatggtggctcgtgcctataggcccagctacttgggaggctgaggcaggagaacagcttgaacccaggaggcagaggctgcagtaagccgagatcacaccactgcactccagcctgggtgacgcagggagattttgtctcaaaaaatcaaaaacaaaaccaaaaaactcaagtctaatacattcatacttttgtattgtgacctaagtagtaattctagttttgttatttttgtcaacaatgtatcttaaaattcaaactacaagcctacagtggcatccaagacctattattctcagttcttagaatggactgctgtccatcctcaacttgcaagaccactcaggagcatctggcactttctttcttgtaaagcatcttccaccctctctcttccagcctcacactccttggtttctttctccctctggcttctgtgctgggacttctttgcttattcaagttctaaggttttacccttggccctccctctttcctcactctttctctgtgggktttttttttttttttttaacttttatgctgaatgtccccttagagccatatttctaagccagacttaaatccaccctagactccaaaatcaaatagctatacccatcaccaaaaactcagtgggtgcccaaatgaaatatctgccctgcttcagttcttatttgcttactggtacctgcacccacggtagtcacactgctgctgtacatctggtcaccaggtactggagatatctgcagtcatcacttcctttccatgttcaacgctaaagtcttagttctagccttcatcctctcctttctgatcatttttaagtgtctcttaaatgatgaatactccagaatcatcgctacagtctgactgtctcccccaaattctcatgctgaaattctaaacccaatgtattggtattagatggtaaggcctctgggaagtgatgaggtcatgggcagagccctcataactgggattagtaaccttataaaataggtcccagtgagatctttgccacttctacacaacaagcagggatcacctacaaacctggaaatggaccctcgctagacactgaatctgctagcaccttgatcttggacttcccagcctccagaactgtgagaaataaatttctgtggtttataaactacccagttgattgtattttgttaaagtagcctgaactaagatagtcatctttctaaatgcaaagctaatcatgttacttccttccttaaaattctcctatgacttccctgtctgaaggtccacactcccttatagctctcaaggggagtcagctgatctctccccactattcttactgcaatcacttcgcacaatcctgaaattccagtctgcagcacaaccctccacctaactctctgagctgctacacacctcaagatcactgctcttctggtttctctcctcctatgaagattacatcactcattattcattcaacagacatgtactgaattctgtattaggatacaacagtggagatggacactacctagcctcaaggagtttatagcttggggatacttggggagtttatagcagaggatattaaataagtwagccattgggtagggaatgggacagaataatctccccaggaagtaacatttgggtgcatctgcattttcttacactaccatctcctacttcttcacaaacttatttagaggtgcccctcccccccccttttttgggggcatatctgagttttaaaatggcttataagattttgtcctgtatttcctctttctaaaattcacaatcctagcaaaaacctaattagatttcaaagtcagcatttcctaagcacccccacctcagcacagccaccctgccaggccaaactgacctctccctccctcaggcccctggatacaaggctccagctgacattgggtcaccctaacctttcccggcctagctctgagcagcttctatatgggctgagaatccctaagggcaggaacaccacccttccatctttaaatcgccaccaacacagtacaggcccacagtaaataaagctttacatgtttaaagggcaaaaattcattctttaaaggtaaattacttagtacactgagaataaatttgtataaacttcttgaataacaatcgtgcaatatctgtaaaaactgtaaagggctggaaataccacttctagttaaggttctacagaaatcctagtagtgggcataaaaaatcatgtccaaggatttcytggccatcagcagatacctggggaaaaaattacggcacatcctaccgtggtagagcccatctccagtagttagaaagaggaggcagacctctccatatcaatattgaaagatgtctataaattgtaagatgacagctatactaaaatcttgccatttatttttttaaaagaaaaaaaagtatgtgctcacagcacaaggaaaaaattctaagatacacccagaaactttacttctgggggaatgagactagaagcaaagaggagaaaccacccatttctaccttaaacttcctattactgaatttgttagaatgtgatgtaatgtgttttaaattttatttttattttttattttgagatggagtgttgctctgtcacctagactggagtgcagtggcgcgatctcggctctctgcaacctccgcctccggggctcaagagattcgcctgtatcagcctcccaagtagctgggattacccgcgcccgccaccacgcctggctaattttttttttttttttttaagtagagatgggatttcaccatgttggccaggctggtctcgcctcctgacctcaagtgatccgcccacctcggcctcccaaagtgctgggattacaggcatgagccaccacgccccggccgttttaaattttaaacacaaacacaggtcgggctcagtggcccgcgcctataatcccagcactttgggaggtcaaggtgggaggatcccttaaacctaggagtttgagactagccagtgcaatatagtgagatcccatctctacaaaaaatacaaaaattagccagttgtggtgatttatgcctgtgctactcaagaggccaagggggaaggatcacttgagcccaagagtccaaggctgctgtgagctaggattgcgccactgcactccagcctgggtgacagagcaagatcctagctcttaaaaacacacattcacacaaacataatcgctaaagtaaaaagatattttttacacgaaagtgtacattattttacaagcttcttatttaggaaactgaaatattttttaaattctggggttttttttaagctgctatattcatagcttattcactgctatattccctacacccagaatacagacacagagcaggcactcagtaaatatttgttgaatgaaaaaccgctgtacaatcataaaaccagttgtgcagaggggaaaagtatctaataactgcttcacaaactcacagaagcaaaaaaatcccttcagaaggtattttagggctgggtgtggtggctcatgcctgttatcccagcactttgggaggcctaggcagatggtttgcttgagcacaggagttcaagactagcctgggcaacatggagaaaccctgtctctacaaaaaatttaaaaattatccaggagtggtgccatgtgcctgtagtcccagctactccaggggctgaggtggaaggattacatgagcccaggaggcagaggttgcagtgagctgagatcaccccactgcactccagcctgggtgacagaggaagactgtctcaaaaaaaaaaagagagagagagattttaacagtttagctcccaatctggatgagttaggattttttttaagcaaatatttaaagagcaaactctcatcacataagcaatcttcaaactctcccgaatttgtccaaaaaagagctccttccacatcagtttaattcacaacctggagtgtggcacatgcctggtcataaatacaaataataaaaagatacataaagctttgggagaaaarcacagctcgtctaatagaagaaaatcaacaatgggcaatgagccttaattatggtctatttcaaagtgcttatttctgcaggtaattaacttttagcttgaaccggtaagatcaacttcatcttttctttgaaagccaacgcctctaacaagcagcctttttatsttcagatcctaaatgaatgtcccaaagatggtaagccctccatgactgttgatagtgctgatgggagaagtgagatacctgggagaagcaacaacaagcaaggttttaggcttaagagacttggataaaatctccaagaaaaaaaaaaaaaagccttgaacaaactcgagggtttgtttgtttgtttttaaggaagatacagactatttaacgaaatgtgaatgcactggaaaggattatttatataaataactaccactatggaacacagctccctctccctgcattttccttcccaaggaaagcactttaacaacttgtttcagaacacttggatccagcagtctactcaattctaaaaacccaccgacttcctggactattttttcaatcactgtttttcattctaaatcttcctttgagagggtaatttagtcccaactaagaaaacacaatggcccaaacagactgtcaccaaataccagtaatatttagaggaggggagaggggttaaaatattctccatcaaagtaatgtaactggtgtttagcaagtgtgtgattgatgtaaataaaataacaaatctttcagactgccctgcaatctttcttcaaccctacaggttctttaacaactggaagtaaattcttccaaggtgtacacacactcagacatttctcccactagcaatgactgtccaggaaagaatgttttgaattcattgggaaatctccaccaacaattcacttagtaaacgtgttgctcaaagggcccatgccctggtctctgccctccccttcactcttgagagcaggggtcctgtttcacayttctcggtgaccacagtcctaggtatgaaacaggtgctcagcaagtaattttgccatttcatggaactgcacaactcaaaaagaaaaatctttggaaatcatctaaaatcaatacacgtgtttagtttggctaataaacagctgcaaattatgatttaaaaaaaaaaaacaggttttccagctgaackaattgtacagaacttggaagccagcgtgaatctgccgcgaagctactactgtctggactgagggggcagctgtgccagaaaggaacgcagcccatcctgggctcccgaaggcgggcggcggggagaatggctagtgccgcgtccgaggactgcagctcgtccgggaggagagggttggaccccgaggggctaggggcgcccgcagccgccgtgcccgggaggggcgcccgtttccttgacarccgcgccaagggcgcagcccttcctctgggccgggggaggggagagaaaacgaggggaccccctgcgccaaggcggctggcggccaagggtgtttcctgggcgcaacagccgcaggcctggctcgcggggccctgtccgcccgcggcccgcgcctaccgtgtatccccgctccaggtcgctctcttcatagcgaaaggacgggatgtagacctccatggccgcgccggccagccggctgagggcgagttgggggcaggctcacggccgcggccgccgctccgcccacggccgggccgccccgcctcccgccccgctgcgcycgcggggccccgaggctgcgggccggactcaggtctgcgggctgacccggccgctcccgcgccctgggcgtgccgggggccggaagcagagggcgcagggctccaggcgcctgggtttcgggcctaacgggcggtggagatcagctgggcccgaaagaggcggggccagaaaacctgagtctgcagaaacggggtgtgcgcgccaacgcgctgggcgcggggactgggccgcacccggcgctccctgccctgcggactccggctggagcttgatttgcagtttgctagacgccaccattaagagattgccagacagcaaagaatagaaagagtggcgcttttaacttttgttttggttggttgaattttttttttccctctcggctggcattaacagcggtgaaccagccggcttataccaagactctccgaattcccttcgattcgaaggtcagcgtctcctgagttagacgtcgaatctgagaatggtggtgtaccacagagctcgaaagtgagcccgaaagttggccggtcactaagacaaacgctctggcttcacgctgcagttctaaaatgccgcctttaactgtgaagtactttttaactgtgagggaaaaatagaatacggaaaaaaaaaggactgaacccgtgcctcggaccagggtctagtaggctgaaggtacctaaaagattaagtgtcccggcgggggaggcttgattatcaagttagtcaagtaaacgttgggtttcttctttaggttagcgcaccgagcagaatagaaacgtggacgtgacttgtaggtcactgagaagtgacctcagccatccaggaaaaaaccagccagcgagctttcttggactgtaaacaattgcacttaactccgtttgtccttgagtgcagaggacatttcagcttagcaaactctagactttatgatgggaccctgagccgtgcaacagagggataaggcagcttctcgttttaggaacttacctgatgtggacccctctacattagtctcatctgaagatccgtcctcctaacccagcactcacacatttgcagctccaggatgtgcccttctctcaaaactgtgccttagctgtgccctgtgactacacacctttctttcacttctggccagcacctcctgaggtaactaaccagctctgcggacgataagctatctgagttcagagcccagcttgtaggttaccttaagcctctggtgactatacactgtatgtatgatttatttatctaccctacctactaggttttagggcaagcatgcttttaaaaactcgtcatctcgtggttggcatagtacccagcacgtaacttacgtaagtactcgtctttacaaaactagtggaatgcagcaggtactatgttcggtatcacataatgtctcatttcatctctataacaatcacatggccgggcgcggtggctcatgcctgtcatcccagcactttgggaggccgaggtgggtgtatcacctgaagtcaagagtttgagatcagcctggccaacatgatgaaaccctgtctctactaaaaatgcaaaaattagccagattacagggtggttactcacccctgtaatcccagctacttgagaggctgagtgggagaattgcttgaacccatgaggcggaggctgcagtaagccgagatcacgccactgcactccagcttgggtgacagagcaagaccctgtctcaaaaaacaaaaacaaaacaaaaaaccagtcacatgaggaagcgttatgataagacacaacatgagtttcaagggcctcccacctcagcctcccaagaatcaagtttttaatatgctttccataatatcctacaacctgttagtagcctaaaatatatattttggtaatggcatggctcacccatttacctgttggacttaggcagaaatgtgtgattccatgaaggtctgataaatggtccaaatgatatccatttgctgtattccactaatagctgtgtataatttacttttcccttgctgaaaatgtatacaaactatcaatgtgtgggtgtgttcttgagggtctattagcccagccataaatggtaattgttacgatttcagttattatagatggcgtaattcaggctcacggagagtaagtatgaaattactagctaataattagaagaactaaatttctaaccaaattctctgagtcttccagccaccgaggaaagggagaatagagcaccaaagtaaaagaacatggcaaatgtattttcctgttgttcctatgttatcttttaatccaactctacagtctgtaacaggccagctaaatatcttttcctcaaaacattaataaaaatgcatgctaaatacaaatataaaacattgaacagttagtatctattaatagaagcaaacaattttcaggagcaaaataacaaaattctgctggaatctgggcataaaattcttacactaaaagtacatttacttagtattgggtagaaatatacttcaacaaattgagataaactgctttaacactaacatttagaagttttgactaaaatgtaaatcgaatatattatacgttcagcattcagttataagattaatacatcatgacaaagtaagatttatcccagaaatgtaaagatggctaaacattaggacatcttttgatgtatttcacaatattgtcagattaaaaaatatcccaatagattctggaaaaaattaatgaaacagtacaactattcacacaaattcttaggctagaagtagcaagaaatatctttaatttgatagattaatgtcttagtcccttttctgctgatggaacaggatatcaccgactgggtaatttataaagaatagaagattatttggctcagaacctgggaagtcgaagaacatggccctggcatctgtgaaggtcatctcatagcagaagggcaaaagagcatatgagagaaagaattaaggggctgggttcacttctttaacaatctgctttgagagaacatcaagggggaaggttacgttgagagaaatgaaggcaagagagaggggacaggcataaattggaggatttagatgtgatgaggtaaaagcagattttctgttaatgaaggagagaagaaatgagaaagtagtgaaaggaggaaagttaagtttcagaaatgctgacattaatttttagtgtactggcagtttttaaaaaagaattacttcaatatgagcaaaaatttggaaagaaacgcttcagatacctttgctatcttaactcagaaacctgtacaacaggtcaggcgcgggtacagtggctcatggctgtaatcccagcctgggcatctcagcaagaccctgtctcaaaaaaaaaaaaaaaaatatgagttgcatttaaaaagactgttgtacagatttttttttttttttttttttgagatgaggtcttgctgagacgcccaggctggagtgcaatggcgtgatcttagttcactgcaacctccacctcctgggttcaagcgattcttctgcctcggactacaggcacgtgccaccacgtctgactaatttttgtattttagagacagagtttcaccatgttggccaggctggtcttgaactcctgacctcaagtgattcacccccaccggcctcccaaagtgctgggattacagccataagccactgtgtctgcgcccggactgttgtacaggtttctgagttaagatagcaaattgaaaatatataactaatttcaaccttctagccccagtataaacgcaagtaatttttccctttttttaaaaacccacagagatagaaaaaataggagaggagagagcaagacatttgtcagctgaaaagcagatagaagggaagaaacatttttagcaaacgagaaatcccaatcttaaaccaacagcaggaaaaacagaaccaacctgatttacacagcacaatactcaaaaggcgccacaaaaggaacaataggtacctctagaatggaaggtaattggctaaaataaggagtcttggtaaaaactgagaatcaggaagatccattgttccctctacatctggagaatatttcctctagagagggaaaaagaaacaatctttgcattagaagttgactggcccgccgggcgtggtggctcacacctgtaatcccagcactttgggaggccaaggcagttggatcacctgaggtcgggagtttgagaccagcctgaccaacatggagaaaccccatctctactaaaaatgcaaaattagccgggtgtggtggtgcatgcctgtaatcccagctacttgggaggctgaggcaggagagttgcttgaacctgggaggaggaggttgcagtgagcagagatcatgccattgcactccaacctgggcaacaagagtgaaactccaaagaagttgactggcccagctgagggcagggatacttttatcaaaaataattggagtctgagggtaagtgatcctacacatactgaataatgaatgctgacactctataaaggctggcagcaacacctttacctgctaggcaggcaacaggaaatgtattctctgcgggaatctaaatagctcaataggaaaaacttcgaagataccaacattgaaagtctcctacaaatagcccaatgagatcactcttcagtgatgctctaagttgacaggccccataactactcccaaagcttccagtcagctttcaaatcccactgctaatcatgaagagacatctaacaagtaacatatctgaggaaagcatctaacatggaagagataccaaaatagaaaaacaatttggaagaaacaaaaaccaggaggggggaaaaaacttataaagtaaactgtcactaatattttcagagagatacaggaagacattgcatctatgaaacaagaacaggaagctgttaaaaacagaaacaatcagaaaacagaaaaagaactcgtagaaagtagagcaaaatgacagagatgaaaaataggagcaaaaatcaaatccaggtcatccaatattcaaacaatggaaattccagaaagagaagacagagaatacagaagaaaggaaatcatgggtgaaataactcaagaaaatttccacaccagaatgtcatgtttccagattgaaagtccccacacaggatgaaaacaaacacatgctattagaaatctttttttttttttttgagacagtgtctcactctatcacccaggctggggtgcagtggcacgatcttggctcacccgcaacctccacctcctgggttcaagcaattcttgtgcttcagcctctagagtagctggaattacaagcacataccaccatgctgggctcattttttttgtctttttagtagagacagggttttgccatgttggccaggctggtcttgaactccggacctcaaatgatctgcccaccttgcccttccaaagtgctgggattacaggcgtgagccatggcacctggccactgttacaaatctttacattatttcagaacactggagataagatcctatagtcttcaaggagaggaagaaaacagctcattcatacacaaaagattagacaaatcagcgctttggaattctccacagcaacactggaagctagaagataatgaagcaatgtcttcaaaattccaagagaaaatttttctaatctatactcaaattatctataaaaattagggtaaagtcttaaaaataggttaggtacggtggcccacacctgtaatcccagcaatttaggaggctgaggtgggtggatcacctgaggtcagtaatttaagatcagcctggccaacatgttgaaaccccaaaatctctactaaaaatacaaatttagctgggcatggtggctcgtgcctgtaatcccagctactcaggaggctgaggcaggagaatcgcttgaacctgggacgtggaggctgcggtgagccgagatcatgccactgcactccagcctaggtgacagagcaagactccttctcaaaaaaaaaaaaaaaaattgacttttgatgtatttgtttttaagaacctactctgtatattcaccaaaatgagggaataaatcaagaaagagga

SEQ ID NO: 98020 - DNA, 17008 bp, Homo sapiens
cagacttagccaggtgtggcggtgtgtgcatgtaatcccagctacttgggaggctgaggcaggagaatcgcttgaacccaggaggcagggtttgcagtgagccgagatcgcaccactgcattccagcctgggcaacaagagcgaaactttatctcaaataaataaataaataagatccatagggagccatgggagtttttggagcagagatgggatggaatttaatttgtgttttaaaactgaatgagtgcggtggctcatgcctataatcccagcactttgggaggccaagacaggtggatcacctgagatcaggaatttgagaccaacctggccaacatggtgaaaccctgtctctactcaaaatacaaaattagccaggcgtggtggcacgtgcctataatcccagctactcaggaggctgaggcaggataattgcttgaacccgggaggcggaggttgcagtgagccgagatcatgccattgcactccagcctggacaacagagctagactccgtctcaaaaaaacaaaaacaaatacgctgaatgggagttgtgtcctttggactgctcaggcacgaccccattatctgtcccccgcccctcaggttcacgagctcatgaagctgtgctgggcccctagcccacaggaccggccatcattcagcgccctgggcccccagctggacatgctgtggagcggaagccgggggtgtgagactcatgccttcactgctcacccagagggcaaacaccactccctgtccttttcatagctcctgcccgcagacctctggattaggtctctgttgactggctgtgtgaccttaggcccggagctgcccctctctgggcctcagaggccttatgagggtcctctacttcaggaacacccccatgacattgcatttgggggggctcccgtggcctgtagaatagcctgtggcctttgcaatttgttaaggttcaagacagatgggcatatgtgtcagtggggctctctgagtcctggcccaaagaagcaaggaaccaaatttaagactctcgcatcttcccaaccccttaagccctggccccctgagtttccttttctgtctctctctttttattttttttatttttatttttatttttgagacagagcctcgctctgttacccagggtggagtgcagtggtgcgatctcggctcagtgcaacctctgcttcccaggttcaagcgattctcctgcctcagcctcccgagtagctgggattacaggtgtgcaccaccacacccggctaattttttttatttttaatagagatgaggtttcaccatgatggccaggctgatctcgaactcctaacctcaagtgatcctcccacctcagcctcccaaagtgttggaataataggcatgagccactgcacccaggcttttttttttttttttaatttattattattatttttaagagacaggatcttgctacgttgcccaggctggtcttgaactcctgggctacagtgatcctcctgccttatcctcctaaatagctgggactacagcacctagttttgagtttcctgtcttatttccaatggggacattcatgtagctttttttttttttttttttttgagacggagtctcgctctgtcgcccaggctggagtacagtggcgcaatctaggctcactgcaagctccgcctcctgggttcacaccattctctcgcctcagcctcccaagtagctgggactacaggcgcccgccaccacacccggctaattttttgtatttttagtagagacggggtttcaccttgttagccaggatggtttccatctcctgacctcgtgatctgcccgtctcggcctcccaaagtgctgggattacaggcatgagccactgcgcccggccctcatgtagctttaaatgtatgatctgacttctgctccccgatctctgtttctctggaggaagccaaggacaagagcagttgctgtggctgggactctgccttttaggggagcccgtgtatctctttgggatcctgaaagggggcaggaaaggctggggtcccagtccaccctaatggtatctgagtgtcctagggcttcagttttcccacctgtccaatgggaccctttctgtcctcaccctacaaggggcacaaagggatgacaccaaacctggcaggaacttttcacgcaatcaagggaaggaaaggcattcctggcagagggaacagcatgccaagcgtgagaaggctcagagtaaggaggttaagagcccaagtattggagcctacagttttgccccttccatgcagtgtgacagtgggcaagttcctttccctctctgggtctcagttctgtcccctgcaaaatggtcagagcttaccccttggctgtgcagggtcaactttctgactggtgagagggattctcatgcaggttaagcttctgctgctcctcctcacctgcaaagcttttctgccacttttgcctccttggaaaactcttatccatctctcaaaactccagctaccacatccttgcagccttccctcatatacccccactactactgtagccctgtccttccctccagccccactctggccctggggctggggaagtgtctgtgtccagctgtctcccctgacctcagggttccttgggggctgggctgaggcctcagtacagagggggctctggaaatgtttgttgactgaataaaggaattcagtggaaaagattgtgctggacttggggcgatggggagcctcagagggtgtgtgagctgggagggatgcggttagagctgtgggccagagacctctcagggagccactgtgggggccccagggcaggctggtggaggaggaccactgggtggggcttggctggggccctcaaggacagagccccctcactcccagccccagctgctggccttggctgcagcctgggggagctgattacaggctctctgtgggtggggaaggaacaggatgctctcccggtggtcagaggacaaggccaggttgggggagcgaggctgtggggaggggaccagcatcactggggccggaccacctccccaccgaccggcccccgtcatgtgcacctcataactgctagaaagatgtggagagtggccaggctcagtggctcacgtctgtaatcccagcactttaagaggccaaggcaggaggatcacttgaggtcaggagtatgagatcagcctggccaacatggcgaaaccgtctctattaaaaatacaaaaattagcctggtgttctggcacatgcctgtaatcccagctactcaggaggctgagacagaagaattgcttgaaactgggatgtggaggttgcagtgagctgagatcatgccattgcactccagcctgggcgacagagcgactccgtttcaaaaaaaagaaaaatgcggacagagacagacatacagaaggaaactgagagatgaaggccgagagagactcagagagagagagagagagagatccctgtccctgctctcttagccccagagggccccctaatttggtagaaatagggagggagctgctctggggtcaagcaagactcgagttccagcccaggttctctcctgcctagggtcaagcatccttccctctctcaacctcagattccctccttggaaaaacaaagctataagaccccctaggcatgaagcgggggccaagcatccactgaacaaataaatcctgctctattctgggtccaccagcccctgctcacccagaggggacaaccgtgttggggagacagagcttcggatgggacacccccagccctgcgtgtcaggcgccttgagaagacctgggctctgctcagcctcctgtgaccttgggcaagtttggggtcctttctctgtgcctcagttttctttttttcttttcttttctttctttttgtctggtgaggggacggagtctctgtccccaggctggtgtgcagcggcaccatctcggctcactgcaatctccacctcctgggttcaagtgattctcctgcctcagcctcccgagtagctgggattataggcatgcaccaccacatctggctaatttttgtatttttagtagagacagagtttcaccatattgggcaggctggtctcgaactcttgacctcaagtgatccacctgccccatcttcccaaagtgcttgcattacaggcatgagccactgcacctggcctgtgtgcctcagttttctcatttgtacagtaatagaaacaacaaaattctgaacatttctggtcttggaagatgcccgctgtcttcccccctgccccccagaaaaggcaggattattacttttcagttgatctatttcatctctttaaactggttaagacaatagcgaagacttggccgtgtgtggtgcctcacacctgtaatcccagcattttggaaggccgagtagggagaaccacttgagttctagatgagcctgggcaacatagcaagacccctgcctctacaattaaaaaattaaaaatggccgggcgcgttggtgcacgcctgtaatcccagcactttgggaggccgaggcgggtggatcacttgaggtcaggagtttgagatcagcctggccaacatggtgaaaccccgtctctgctaaaaaatacaaaaattagccaggcttggtggtgggcacctgtaatcccagctactcaggaggctgaggcaggagaatcgcttgaacccaggaagcaaaggttgcagtgagtcgagatcgcaccactgtactccagcctgggtgacagagtaagactctgtctaaaaagataaaaataaaaattaaaaaattaaaaattagctgggcattgtattgcaggcctgtagtcccagctactcaggaggcagaggctgaaggatcgcttgagcccaggggaatgaggttacagtgagctatgatcctgccattacaggccaacccagagagatcctatgtcaaaaatgaataaataccctggtgtggtcgctctcgcctgtgatcccaggactttgggaggctgaggcgggaagatgacttgagtccaggagtttgagaccagcctgggcaacatggcaaaaccccatctctacaaaaaaaatacaaaaaattagccgggtgtggtggcgtgggcctgtagtcccagctactcaggaggctgaggtgggagaattgcttgagtcagggatagggaggtggcagtgagcccatatcgtgccactgcactccagccagggtaacagagcaagaactcatctcaaaaataaaaaataaaaataggtggctgggcgtggtggcttacacctgtaatcccagctacttgggaggctgaggtgggagaatcacttgaacccaggaggtggaggttgcagtgagccgagatcgcatcactgcactccagcctggaagacagagcaagactttgtctcaataataataataaaaataataatagtccaggcacagctcatgcctgtaatcccagcattttgggaggccgaggcagatggatcgcttgaggtcaggagttggagaccagcctggccaacatggcgaaccccagtctctactaaaaataaaaaataaaaaaaaaaaaattagccaggcatagtggcgcgcacctgtaatcccagctactcaggaggctgaggcaggagaatcgcttgaacccgggtgtcagaagttgcagtgagccgagatcaagtcactgcactccaacctgggtgacagagtgagactccatctcaaaaaaaaagaagaaaaaaataaaaaagaaagactcgttgcccagtgctccctctgggagaagtacatccaaggccctggccctgggagaaaggctctggcactaaccccacccttgacctttttcctgggcggtcctgaagaatgttctgtcccttctccaaggcccccagctgggacggcccaggcgcctataaagggggtccccgcttggccccggcgccacccaccaccatggacccccgtctgcccgcctgggcrctggtgctgctgggccctgccctggtgttcgcgttgggccccgcgcccaccccagagatgcgtgagaagttgtgcggccaccacttcgtacgcgcgctrgtgcgcgtgtgcgggggcccccgctggtccaccgaagccaggaggcctgcgrccggaggcgaccgtgagtggggacgggcagggacagcgctctgggaagccgaggtggggcaggtgcacgtaggcgcagatgcacacgtgcagggaggtgggcaggtttgcatgcatgtgcccagggctcacctgccggctgcgtgcacagatcgtgggtccgcactggagtgtgtgtgaacgcgcgtgtgaaagtccccagagccgttagccaggcgtggtggctcacgcctgcaatcccagcactttgggaggctgaggcgggtggatccccagaggtcaggagttcgagaccagcctggccaaaatggtgaaaccccatctctactaaaaataatttttaaaaaaattagccggggataatgatgcacatctgtaatcccagctacttgggaggccaaggcaggagaatcgcttgaacccggaaggcagaggttgcagtgggccgatatcatgccattgcactccagcctgggcgacagagtgaaactccgtctcaaaaaaaaaaaaaaaagaaagtcctcagagcatgagtccccctgaggggccagaaacagagtgaggcaggagaggtaggctcttgcaagtacatggtgagatcctgtcttaaaatttcaatattttgatcttcatgaatttttrccttaattttgctttgtttgtttgttttttgagacagggtctcactctgacgcccaggctggagtgcagtggtgagatctcggctcactgcaggctcaacctcctgggctcaaaccatcctcctgcctcagcctctggagtggctgggatacaggtgctgccaccacacccagctaatttttttttctttttcgtagagagggagtctcactctgtttcccaggctggtctcaaactcctgagctcaagtaatcctcccaccttgaccttccaaagtgttgggattagcgatgtgagtcactgtgtccagctttaaaagtatttaaaagtattgcttttgaaaagtattgcttttcacaattatgttactttattttattattttatttttatttatttattttgagacatagcctcgctctgtcacccaaaccagagtgctgtgacgtgatctcgtctcactgcaacctctgcctcccgggttccagcaattttcctgcctcagcctccagagtagctgggactgcgggcacgcaccaccacacctggctaatttttgtattttgtttgtttgtttgagatggagtctcgctctgtcacccgggctgaagtgcagtggcacgatctcagctcactgcaacctccgcctcctgagttcaagcaattctcctgcctcagccttccaagtagctgggattacaggccactccccaggtcacccactaccatgcacagctgatttttttttttttttgtatttttagtagagacaggtgaacaggtgaaacaacaggtttcaccatgttggccagtctggtcttgttttgttttgttttgttttgttttgacattgagtctcgctctgtcccccaggctggagtgcagtggtgtgatctcggctcactgcaagctccgtctccyggcttcacgccattctcctgcctcagcctcctgagtagctgggactgcaggcgcctgccaccaagcccagctaaattttttgtatttttagtagagatggggtttcaccatgttagcaaggatggtctcaatctcctgatctcgtgatccacctscctcggcctcccaaagggctgggattacaggcatgagccactgtgcccgggccaggctggtcttgaactcctgacctcaggtgatctgcccgcctcagcctcccaaagtgttgggattacaagcgtgagccrctgtgcctggcctttttacaaatattttaaattttattttaaaagtattgcattaaaatacttaccttgctggatgtggtggctcatgcctgtaatccctgctactcaggaggctaggagggaagatcacttgaggccaggagtttgagaccaacctgggcaatatgagactcagcctgagacagagacccttgtctcaaaaaagggaaaaatattaatattattattattatatatatatattttgagacagggtctcactctatcacccaggctggagtgcagtggcgtgatctcggctcattgcaacctctgcctcccagactcaagcaatctgcccacctcagcctcctgagtagctgtgactagctactctcaggctggtgagaccagcctggccaacgtggcgaaacctcgtctctactaaaaatacaaaaattagccgggcgttgtggcgcacacctgtagtctcagctactcaggaggctgaggcaggagaatcacttgaacccgggaggtggaggttgcagtgagccaagatcacgccactgcactccagcttggcaacagagcgagactccatctcaaaaaaaaaaagctgatgctgacatttggggatgtatatggtagtggggctgtcctgtatattgtagggtgttagataacatctctgtcttctgccccctaatgccatgaatagcctcacaccccatccaagttgtgacatctaaaactgtccccagacaagtatcccctggaaacaaaatcaccctggtttgagaaccactggtgtcaattgtaaactgcagattgggtagagggtaaacaaccctctaaattttcataagtccttttttttttcttttgagacagtcttgctctgtcactcaggctggagtgcagtggcacgatctcgggtcactgcagccttgccttcccaggctcaagcgatcctcccacctcagcctcccaagtagctgggactacaggcatgcagaattatgcccagctaatttttgtattttctgcagagatgaggttttgctgtattgcyaaggctggtcatgaactcctgggctcaagcaacgcacccacctaggcttcccaaaatgctgggatgacaggtgtgagccacggtgcctggcctcaaaaaaatatcctgatggcttcgtgcctccctgtctgtaccctagtcctggccctggtgcagggatatacgacaagtttgtgcagatgtgttaacacgtgtccacatgtctctgtgtgccactccacttgcggtgttagggatccaggggaggyggtctgcaagggtgtgtcctcgtaggggtgtgtgtgtgtctgtgggtccaccacacatgcgtgggtgaccaggaagtggacccacagacacatgtacacccctgcatgtctctgtaccacgaggagtctgtgggtgggtctctgacctgctctgggtgtctcacggacccttggacctgttggggaaactgacaccatctgtagctccaagacccccgacactccctgggcagggcatggggcactcaggtggcatatggggacccacgcagctggggatgtgagtgtggacatgagttgagtggatgagaggattaaccaggtgcctggcgtacagtaggtgcttaataagtgctcgcytttttttttttttttttttttttgagatggagtttcattcttgtcacctaggctggagtgcaatggcatgatcccagctccctgcaacctccacctcctgggttcaagtgattctcccaccccagcctccccagtagctgggattacaggcgtccaccaccacgcctgactaatttttgtattttttagtagagacaggtttttaccatgttggccaggctgatctcaaactcctgacctcaagtgatccacccacctcggcctcccaaagtgctgggattacaggcgtgagccactgagccgggccagtgctcacttttttttttttttttttgagacagagtctcactctgtcacccaggctggagtgcagtggcgtgatctcggctcactgcaagctctgcctcctgggttcacgtcattctcctgcctcagcctcctgagtagctgggactacaggcgcccgccaccacacccggctaattttttggttgtttttttttttagtagagaaggggtttcactgtgttagccaggatggtctcaaactcctgacctcgtgatccgcccacctcggcctcccaaagtgctgggattacaggtgtaagccactgcacccggccagtgctcactttttatctgcatgcatgagtgtttggtgggttactcagtgggatgtgtgtggattcgtgcacatgcagcatggggtagcatgtcctctgtcgtttccgttccagctgagtttcactctgtccccaggtgagttgctacagtggctggagagacgacatctgctccatgggctggtggccgacagtaatctcacgctgggacctggcctgcagcccctgccccagacctctcaccatcaccgccaccaccgtgcagctgccaccaaccctgcacgctactgctgcctcagtggctgtacccaacaagacctgctgaccctctgtccctactgattcctccttgggtgcagcctcagagtggcctgaggcccagagggtctggtctggtgagctcctgaggccacacagcaccataaagtctcgcatctacaggcctttgattacctcctgggatgggtgctcactatctaccccagaccaatgccacctgcagcctgtggagtcaactgcagaataaatcacaccctagccctggcttggaggatccccgctttcacagatgctggacactgacagccaaatgtcctcactccagrggagccccagacgctccgctccctgcatgtgtaacaccccttcttgctgtctcttagtaaataaacgacccaaagcagcttcctgcattttctctagaaaaagggacaagcctcagtcagtccctgtgtgggcttgtcccccagcagccatggacccaccggcacttccaggagcttgataactagagaggcattgcaacgcaaagtggggaaactgaggcccagggagagggctgcttgccaaggtcagacagggaagggtaagtgcaggacttgaaccgaggtctctaccaaggcccatgggagtccttagcattgaggacttagaatggtagacattagacacaaaacaaatgtcagaaaatgatcatcacaaaacacattagtctttttttttttttttttttttgaggcagggtctcactctgtcacccaggctggagtgcagtggcacaatcatagcttactgcagcctccaactcctgggctgaagtgatcctcccacttcagcctcctaagtagctgggattacaggcacccgccaccacacccagctaatttttgcatttttagtagagacggggtttcaccatgttggccaggctggtcttgaactcctgaactcaggtgatccgcccacctcggcctcccaaagtgttgagattacaggcatgagccacgtgcctggcccagtcatcggatttagggtccaccctaatccatgataacctcatgtctgtctataaagaccctatttccaaataagcccatattctgaggtgaattctcagaatatgaattctcagaatatgaatatgaattctcagacatgaattcttgccagacactactcaatccagtggagcaggggagctgggactctcccctgatggcaatagggagccacagaggctgtgtgagcaggggcagaatgaggtcagatgtgcctgtcagaaagccctgcagccccatctcatccaggcctgatttgcaggatggtgtctcatcctcccagctccctccagtccccagagcagccatttttaaccacctttttttttttttttttttttgagactgagtctcactctgtcgcccaggctggagtgcagtggcatgatctcggctcactgcaacctccgcctcccgggttcaagcgattcttttgccctcagcctcctgagtagctgggactacaagtgcacaccaccacgcctggctaattttcatatttttagtagagatggggtttcaccatgttggccagaatggtctcaatcttctgaccttgtgatccacccacctcggcctcccaaagtgctgggattacaggtgtgagccaccacggctggcctattttttttttcttttttttgagatagattctcactctgtcgcccaggctggagtgcagtggctcagtctcagctcactgcaacctccgtctcccaggttcaagtgattctcctgcctcagcctttcaggtagctgggattacaggcatatgccaccacactctgctaatttttgtatttttagtggagacggggtttcgccttgtctaggctggtcttggtctcctgacttcaggtgatccgcccacctcggcttcccaaactgctgggattacaatcgtgagccaccatgcccagcctcattttatttttgaaacaaggtctccctctcacccaggctggagtgcagtggcatggtcctggctcactgcaacctcaacctcccaggctcaaatgatcctcccacctcagctttccgagtagctgggaccataagtgggcactaccacactgggctaatttttttttctgtagagacagggtctcgctatgttgcccaggctggtctcgaactcctgggctcaggtgatcctcccacctctgcctcccaaagccctggaattataggcatgagtcactgtgtttggccctgttatcccatttaaattctgctcaggctggtgcagtggcttatgcctctaatcccaacactttgggaggctgaggcaggtggatcccttgaggccaggagttcgagatcagcctggacaacatggtgaaaccctgtctgtactacaaatacaaaaattagccaggcgtggtggcgcatgcctgtaatcccagcaacttgggaggctgaggcatgagaatcacttgaactcaggaggcggaggttgcagtgagatgagatcgtgccaccacactccagcctgggcaacagagcgagactctgtctcaaaaataaataaaataaaataaaatttaaaaaaaaattctgctcaaagctcttattgctcccgggaacttcccatttgatcattttcaggtttgtttcctcaccataaggtgggtctgtatcagctgacccttcccacaggagggaggaggagtacagggcaaggcgtgtagcacatggcaggtgcataataagcacttgaggaggggaggaaaggatgagctacagagagcagtagatctgaggttccaaccagggaaggcaagcctggtaaggagagggaggctgctggtggctgggatggtattcagagggggccttgctgaagcagaaggccaaggtgggcccagcatccaatccagctaagagcatctcaccctgtacctcccgctcctaagtctgctgacaacctggaagcaagaatctatctttggctggccaggcactgtggctcacgcctgtaatcccagcatctttgggaggccggcgggtggatcacttgaggtcaggagtttgagaccatcctgggcaacatggtgaaatgccgtctctatcaaaaatacaaaaattagctggacatggtggcacatgcctgtaacctgtaatcccagctacttgggaggctgaggcaggagaattgtttgaatctgggaggcggaggttgcaatgagccgagatcacgccactacactccagcctgggcaacagaatgagaatccgtcttaaaaaaaaaaaaaagaatctgtctgtggggatatgtggggttatgagctgaaagcaataaggagctatgaagggtatctgagcagggggtgggtgggatgaggtcagatctgcctgatagaaattcctgcagcttttgcctcacacatgtcctgttttatgtttttgtcttcttattgccgcccagtggagtacagtggcgcaatcatggttcactgcagcctccaactcctgggctcaagcgatcctctcgcctcagcctcccaagtatagctgggactacaggcatgtgagcaccaccacgcctgagtaattttttattttgtgcagagacaggatccagaactcctgggctcaagtgatcctcccactttggtctcccaatgtgctagaattacagccctgagccacggccccatgccccgtttttaccagtgtatattttctactggaaaatgagacttttagggatgaatgtggacttgtctgttgaaacttgtaaatttgcttaaaaaaaaaaaaagatctccaagtcttcacaaaattttatattccccaaggctgccccatcacaatgcctgtgaagcttgactggcagacactgaggcctgaagctgggggctacagggggtcactggctcacccggtccccccgtaatctgtaaaacatactgggtgagggaggctgctggaggacctgaatctctcccttctccaggcagtagtgaggcatatgcctgttggccttgggcccattaaagatcattccagccccagtgctgttctctgaattcttggggaacacagggatgggggctcctaatgaggaccccagaaactctgagctctcacaactttcaaaggacacttgcctccctcctctgcccacacctccaccattacagcatttgatcccacaagtaaggagggggcggtcctattccaccacctctctggtatccccccaaccttctgagttgtctgagacccaggaaagggttaagatcaggacccctctctcctgggctgaaagatatttctcacgtcagctctatgtggacacaggagtttctggctggcctggaactgcagacggagcttatctgccattaaaccactgcaggtgcactgcttagcatcccgtctgtgagtaggtgagagcagggaagtaagactttgactcaaacgggacggatgcatccacagttggaactctagcacaggcacttctgccattagcagccacaaaaagaagatggatattttctggagttcctccagccatccagggaagatgctggaacagtaccaggtgggttttgaaggatgtgtaggagttcgccagccagaatattcactcatcaaacctcaaaccttccctggcactcccttatgctcagaccacaaaggtctcagcttcctgggaggaaggtgtcgccccttcctatggaaacaggagcccagaggctggggaccctgatgctgactcagtagatctgtgtctgattgccgcaggtgaggttgggctggttcagcgcatcccacatgagcagcatctcataaggtaggaagcggtgcaccagcagcaggtctcggtagaagcaggggtcaaaggaggacaggtgttgcgatggagcccgcacgccagacgtgcggatgccgctgtgggaggcaggcttcagtccctcaagctccagacacatacccaggaagacatcatcaatggggaagatgtccaagacatgggcagcacggcgcagggcagcggccgtgaagcgggacagcaagaagccaccacccccacaatagggtgggtaccgctcattctgagtcaccacctctggcacatagtacttgctccaaaaagcccggatggggcccacgttttggatcagttgccccacgaagaggtggcggccagggtcatggtcctgcaggtagaagaccatgttgtctgtgtgtgcaaagacgtcatcatccccgttgagcacgaagctggcgttggcgcaccttgtctcctgccactgtaagaacaggacctgcaggcagggtggacagggcatgcttgcttgagggctggagaaattggccttgggtctctattagccactccagcccactaagcccaggaaaggaagtgtccacaatccagcctgggttaaggccctgccctgtggggttacttgggaaaccctctctgtgccttggtttcaactctccaaacaggccttatcatgtgcctctaggagtgttggggaatccatggagaccatgctccatgaagcaccaagaaatgctggaaaattgttacatttacatgtattgctattccttccaactctgcctggccaagccctgttgttaaataatcatttgtatgaattttgtttgtttctgagacagggtcttgctctattgcccaggctagagtgtagcgctatgatcatagttcattgcagcctcaaattcccgggatcaggtgatccttccacctcagcctcccaagtagctggtactacagacacatgccgctacttactcctggctaataatttttttttttttaagagatgggatcttgctatgctacgcaggctggtctcagactccagacctcaaaggatcctcccacctcagcctcccaaaatgctgacattacaagcatgagccaccactcctggcctttgtgtgatttttattttattattattattattttttttttggagatggagttttcgcttttgttgcccaggctggagtggagtggtgcaatctcggctcactgcaacctccgcctttcaggttcaagcaattcttctgcctcagcctcccaagtagctgggattacaggcatgcaccaccacacctggctaattttttgtatttagtagagacagggtttcaccatgttggtcaggctggtcttgaactcctgacctcaggtgatccacctgcctcagcctcccaaagtgctgggattacaggtgtgagccaccgtgcctgacctgtgtgattgttaacatccccctctcccaccaaacactggacttccctccttgggcctgtgtctctcttttctgttcatgccatctccctcagca

SEQ ID NO: 98021 - DNA, 22244 bp, Homo sapiens
aacaatccatcactaattctgtgagctccttggtgagagccaggacttcctgtcctctcaaatatctcatgaaaagccaccctccacactccttacaggggagtggaatgggagaggagaaggatgtgggaaggaaaggatctgcacttttaaaatttctgtaaggcttaaaattttagagctaagatgtattacttctatgtaactaatatgataaagacaaatatttattgcacttctcccttttcattctgctgaggacaaagctgtggtaaagtggcactagagacaggcttgaagtgggagacctgaacttgaggcttgcctttctcttctctagcactgtgaggacaggcgagaggcgtcatccggtagcctcagggacctccaccaggaacgtgcagtcatactgccctggcttctcaagctgtagtatccctagggaatttgctactatgcagattctgattcagtagacggccagcaggaggggctgggagattctgcatttccaacaagtgcccagatgatggaccaactttaaatagcaagactctactgtaggtgaagaaactccaggtcacacgctgttaaaaatgtctttgagacatttaaacattgggatgtttacatgaagatctgaatttccagcttctccagtcaaattgcaagacccggtcacacagggctggtgtgcccataaggctacagtagcggggagctgagtagtggctgcccttagaagggacctgagttttccagtttgcagctcaccctctgcagatatttcaatgtgcaatcaatcctccatacagtttatttagatggagaactgaagacccagagagagaactctatttgcccagtgcatccagtacactacatggaagttgagctccagactcaggctgttggacccagtcagtctctttccaggtgagtgaatgggatagcagtactggaacttgggcctaaccttctgggatctaaactcagtgtgcactggggatgtaggtgctagtatttggagctgggaggaaagaccactgtcattaatcactgtaatacactgccaggggccaaatgtggaagtgaaagcatctgaattctatataaaaattcaaagggaagacagagggtctcttactcattcagattatttattaagagcaaaagtcgggccatcccatcgtgtgatattgcaacatgaaaagtcacatacatactaaggagaccccacagaattgagagcctttcaacagtacagagccatagattacaaagttaaaatacaaatgatcccccagatttggcaggaaacaagtacaatatgaggaggcctggaatggaagggcacttacttttcaataaggcagttacaaaatgggaaaaaaaacccccaaaaccttgtaccccaaaatatactctgatgagcgtagcagacaatagaaatgtaaaagaaggatcctgtataaccctctgtcattggcaaatgtgtgcattaagtgaaagcaactgaagggtttgtgttttaagatgcaagctagatgaaacaactgactgtagacatttctacctcaagaacagttcatatcttgccctaggctgggttctacctcaaaacaccagacccactttaccatttctaaccataaacttggaaacagtctataatacaatgaaaggaataaaaaggcacccctagagcaccatgcttcccaaggcatgatcttgagctcatctgcccttcggttcgactgcccagctcagtaacagggaccaggagccagggccagctgaattacacaacctcaaaggatcgcctggaaggcagatatctgaccaagagatcacagaccaagcacatttcatgagaatttaaatgctaggacaatactacctctcccaatagggcttttgaaccctggttttaaataacaggctagatctgttttcccttaccactcattttgcaaaactcaactggcctaaacatttcgctcaatcttgagttctgcaggttggtccctgagagctaggttggccttgggaatttctgctcaattttaagttctcaagaatctgagggcagccgatttagactgaattagagtcatcctataggtcagaaagaaagaatgctagacaggtcaagagggccagaggttggttctgataatgccatatgacctcaggcacatctttttgagttttagtttccccatctctaaaaacggatgattggacaacagcaagcttaacagactttccaccttgaaaatacggcacttctctgacgcttagaccttaagtcctgaagcgttgttttctcagcaaaaacagtgcaaagtccttacaggaatctaaggtacaagccctgggcaaccatgaaaactttaaacttcatgcaaagcaacgaagttataaatcctccagctgaacaatttcctgatgatgtgagcatccgtttttgtggggcaagcacagaactgagtcctcatctgtctgaggtttagcaggctgctaacatcttctcatccccctctcctctccccaagctttggcagaaacaagccagccagtagggttttctcaacattctccaacaaggaactgagtggactaatactcaggggtaaggacagtgtaccaaagtgtccatgtcctagcattgtttctttccaaaaggcaaacgctatgctttgggacagtgccagcaattaggtgctttgccaaaaataacttgtcccatgtggcccccatggggcagagactaagatggaaattacagagaacatagaaaagccagaggtttacaaagaacaggcttctccacgaggtagtgggttctctgtcctcggaggtgtttaagtccagactgctcaaccccttggtgggatggttgtaggcagaatgtcagcacctatgtggagactagactggatgacttaacagccctttcccaactttgagatcctgtcattgtaatgactgagagcgcctttggatgacttccatgaagcaactgctctgggcaacagcctccctcaataggcaaggcccccagagtaagctccttcttccatcctctccctcccaacaggcagttgccctgcaggatattaacaaaaagcttcccacaaaataaaaagcctaaacaccaaaattagatgcaacactgcagctgcaaacaattgttactatctgttctctgaaaggctagcagtgactatttagctatgacaggaacatctaaaaacttggcagctgtaacatgtaagtaaaattcctcttcattttacaacaccggtcttgaatcctttggtttttaatctttcatgagattcagctgtgatctttttttttatatgctgttgccaacctaagagtttgttccttgaagcaagaagtttgtccattggtttttaaaacatcttaaaacaacatgaatggcaggatactgatgtttccatgtgagaaccttcagggcatatcaaagaaccataccaggctggaactgaggcaggaaccatactctttaagaagacaacgccagttctggatttcaaattccagttttgcccagaagcaccaagaggaaagaaggcaatgctgctacgtcacaggtggagagaagcgcaagagtccttgatggatggtataaaaatggagcagccaagatgaacattgctttccccacaccccactgctccctgaagccagaccccgttgctctggagggcctggccacttctcacaggcaggagtcccttgcccacagatagagccaccagaaactgcagaagaggctaaggcgagtggtttagtggtttgatgaaagaacggatttctggacataagaaaaacataggttcaaatagctttgtcttttctctcacctgacctgttgaaaggtcagattgaaaaggttgaaaagatgcccacaacctccactttccacaagcacctctccttagaggaaagacaagggacccaagtacacacacagcatctggctgaaggtaaaacatttccccaggtttcgctttggaataaagattctttcagacacaattgaacagatggatcctaccatcatatattcttgtgcagaagctattgtctctctcaactgggaaaacagatttgctgctaaagaaatagtgatgtgacctacacgcccacaattctggtttacgtatcagaaaaatacacttttttactcattaagatatggacatttccatggagcaagttaacaatgccttaacctgcaggccccatctgcccctcagccttcttgatgcctgtatcaacatccttcagctgtaagcagggagagaatctctaaacacatagtgaatgtgaatgactgaaaacactcacagagcactggacatgccatccacagccaggaggcataccaaaataggatgccctcacagtccagagtatattctatatacaaccatttatatatatttaatttaaaaggctgcaatctgctagacatgcattttgaacacaggcgaaagctttgctgcaatggaacatactgcattttagtgagcgtggtgaccctgtccccattccacagaaagcgtggtactctgctccacagaactgagacctttggacactccgccgccctgctcagtagggggtttagtcctgacttctctgtgatggtgctcagattaagtcatctgtgaaactctctgccaggccaggctgtccattgttcttattatttaaggcttaagaaattaactcagaattgaaactgagtaggaaaatgacacctttgaccatatgtcaagatggtcataaattagaatccaaattcttttcttttctttctcccaccctcctaccccataccctctgccctccattacacagattaaagaattttgcaaaagcacatttttggatataaagctttgttttcacaggatactttggctctgatataattagattgaggagttcaacgttttgaacaacaaaaaaattaggtaattttcaaaaattattttagcaatctttctccctaagagggaggcaaattgttcacaaaaatgagcatcagatggaattgacctttgttgcccaaactcatgatttgctgatgaccagagcccagggagtcaaggccagccagactttcaatcctaagctgaacttctgggcaggaatcacatggcccctggcagcttgcatggtggttgtgaacttaggatgaaaacttctaaaaatacttgccccaacctactaaatatgtcagtgtgtcaatgcatttattaccaagaagcttggctgaagtcataatatctaactgcaccccaaagagtgaagcatagtggggtgcataagggaccgtatcttctgtgagggtctctatatcagtgtttctggaacctcaacgaatagttttgcacatgcaactgtcctgaaatccttatctgatcagaaacttccttgttggtgcatcaggatttcctccacattctagcagttaagtggtgagcaacagaaatggcagaggtctcagtcatgagaggtgtgaagcggatgttacaaggctggcactattagtgacagctcaattagccaatacctactgattgagtgcctactgtgtacaaggcacagggtgagtgagggggaccagtgtcaaactgatctgctgataaatgacaaagcttgcaacaaagcgggcgggatatctatgtcgccagcgggcagcatgcaagtccagatgtgggtctgctcatgcacttccatggccaattgcaccttgctgctattccaagctacagctcacacgtggcagcctggtggataaggtgattaccaaaatatttcttatcccacatttccagtagaattgatttaatgctttgttgaatgctgaaatacatagtttttaattcttttaatgatcctgatttttttagtccagagttatcgtaaaagaaagtctttctatacacatgctgaatcatgagaatayaatcctcctgaccaaaaagatttacagtattcatcattcaaacttttttatttacaataatatttaacagtctttatgggcttaaatgtagtagatatcacctgtgcatcaagcattacacttcattcctttaagatgtgcttcatcctcactcaagctgcttgccaccctccgatttctggtccagtctactcttgttactcttcaccatgtagatgaagtaggcaagggtctctttttcattcacaggtatgttcctgaagtgtcgactcacagtctatgtggggggaaaataccaaagttccttaaaccatgcacaaatcacacygcaaattctacattgtacaaagaagcgaatsgagttgtttgcatgctgtggcgggaatgacaaatgctgaagaacttcctgccatgtgcggaactcagagtgccctttgcccttcctccccagggatgtaggtggtttaatttccaggatccaaaagtggctttttaacctacaactcttccaaggtgcagttctatttcagtggcagccaaccacctgtcatggcatgatttcacagtcatactcatggaggagagactgggactgctctggttggccagctgctaccaaacctctcaggccttgaaagtgggaagaaatgtgtctttaaaaaattgtggggcaggcgtggtggctcacacctataatcccaatgctttgggaggttaaggtgggaggattagttgaggccaggagttcgagaccagcctaggcaacacagtggagaactcatctctaccaaaaaattagccaggtgtcgtagcatgcacctgtggtcccagctactcaggaggctgaggtgggaggatcacttgagcccaggaggttgaagctgcagtgagctgtgactgcaccccagcctaggagacagagcaagaccttgtctcaaaaacaaataaaaattgggttaggctggggatggtggctcacacctgtaatcctagcactttgggaggccaaggcaggcagatcacctgaagtcaggagtccgagaccagcctggccaacatggtgaaacccagcctctactaaaaatacaaagattagccgggtgtggtgacaggcacctgtaatcccagccactcgggaaacatggagaagaatcacttgaacccgggaggtggaggctgtggtgagctgagatcatagcaatgcactccagcctgggagatagagcaagactctgtctttaaaaaaaaaaaaaaattgtgttaaatgaacagccaattgaacaaattgaacagaggcatctgaaccccaaaattcttctaagtagtgcataactgcctcctgaaagacatatcaggtttgaaggaaaatgcatcatttactaatgctcctaatacttcattccataagtaatgagaatgcaggtctcctcttgccccacctcattctttcccttccaccagggagaacactggcaaatgggtgatgttattttaaagtaggagaggcttctgacctcctgtgtgtcatctggacactggtgaaggagttgtttaagaaaaagtgacggtcgagcaagaaacctctaaaggaaaaaccaaaaatgaaacaggctggaagcctttcaggaaatctcaatggatcaaggtggctgaaacagataaaaaaagacagagaactagacataaagagtggttatctctggatgatagaattatatttttcttttctccattttccaacttttctgtaataggcagaaaaatatattaagaaaagagggattagaaaatacctgcagaaatgacaaagacagaattatcaagccaggcagttcatgtattttaaaaatggccagtggagcatttccccgtaatccaaactgtgttaataactcagggcaggagaaaactttcttgggtgccattcattaaaatactgtcattaccaacaccagagtaggagaaatcaaggaaaaaaaaatagctcctgtagaacatcaaggttttgaaatgattaatctgacacacaaaatgatcatatctaaaaagcattttgctaagccaggcacagtggctcacgcctgtaatctcagcactttgggaggctgaggtggaaggatggcttgagccaaagagaatcacttgagcaacatagtgaggctgcatctctataaaaataaaattagctgtgcataggggtgtgcacctgtggtcctagctactctggaggctgaggtgggaaggatcacttgaagctgggaggttggggctgcagtcagcccagactgagccactgcactctagcctgggtgataaagcaaaatcttgtctccaaaaaaacaaaaagaggaatcttccaaaaaagattcaaacaaatgaacactcaggacttagaatctggagtcatgagatcccaggctcaattctgctatcaacttgctgtgtgattttaagcaaatcctttcctctttctgtgccatggtttcttttctggaactgaggcctttgcaggtctaaagctgtggggttctaaattgccaaagaggaatacagagttgcttccagaactctggaggaaattacaattagcagacacacaaggtaagggagaatcagggtaaccatcagaagcagcacaatgctggctctctttagagggcaattttgtctacctacttctgctaactgggccttattgaagcctggtctggtctgcaacttgtagtgtcgtttataacgtcgtagggtgttcacctgcagctggaacagatcaacctagggagaagaggagaaaaatgttatccatcacctgaccamccaggactcaccaagagcccactatgtgcctagcactacactaaggtaggggtgaggatggggagggcttcaaaagaggtcttagaaatggtctattgaggactagtaactggctaggagggcaaaaataacagtagaaaaacagttctggctggggtgggctgatctcacaaaactggtggaaaaggtaaagcttaagctaaggaggagcagggtctgataaagcactgagaaacggtagggaataggggaaaagatcacagcacagagagctgggagaggcacagatgggcaagggggtcacaggcaactgtgatgaatttaaaaggtgagaatggatggtagcacatccagaaaaacagaaggagctatcacagagggtggagggcgatggcgcaggatgggtctggtggtggttgttgggaagactgatggggggatacggagggagatgctatagcaacaatcagaatgagatgaagaggctgagctttggaggggcagtgatgctagaagggacaccaaagatggagagcaaaggcaaaaaccagagacatcctggaggatgataggccagaacgaggcagcgaccggatagaggagcacaaaggagggcagtgggaagtgttatcctcaaatmgctctttgctaggcccagccttctggtattagaatccttaacctccctccagagaaagttcaaaagttactgtagtgaatgtgcaatccagcaggttagggctggggtctttgcagatgactggataacagaggggaagggaccccccctttttgtttctaacaaaggaagagaggaaagctgcatagtcatgaaaaattgaaggcccataaagttgggctgcctttacctgcctctaaaagagctgttcttgcttcaggcaggtggagagcacttaaaaacaaaatgaatgatcaatatgaggggccaaagtccttcattctttttcaaaacattcctcaaaaccttttttttttttttttttggtgaaaaccacttagaaatcgaatacgtccatttctttgtaaaataacaataacgttraaggcaaaagcaagattctgtaaaccaacattggaaaaggggacacagggaggggcagagggaaagggccagattttcaacggtttcctccacatctgcagacaaaggcccgcctactctttctattcctacacagtcattttcactctgagtgctaacaggcggttgccttatgaaatattcatgtgtcaaatattcaatgtacactataaacggttcttctcttgctgagtcttgagtgaaaacaatttagtagaaagaaaatccaatattccttcctgaagcctcacttaatagacacgggcacctgaagggaaggcagccttccagtttgagaagcctaggtctcatggtctagcgcagtggttctcaacacaggacgattttgtcttgtaaaggaggtgtggcaatgtctggagacacgttttgattgtcatgactcagggtggtgatgggtagaatctcacgaggggatgctgctgaggcatgctgttaaatatcctacaatgcagaggacagtccccacaacaaaaattagctgaccccaaatgtcaacagtgctagagttgagaaaaccgggtccagtttagtcaactttgaaatggatccttgggaacagcctggactagatgtcaagaaatcagtgagagaaaatcagagctggtatgaactgatgacttacaccttcattttttggggaaaagacttctcccaaaccattatacactctctaaaggcataaacaaggtttaaaaaaaagtgacactgtggttgtatttacgcattcgtcaggggcgtcttgcagaaaagcagtgtggtctactggaaagggccctagactagagcctccaaactatatacatgacctcggctctctgtgcctgtctgtaaaatgatggggcagtctgaccagtgggtgtccaagcttttagctctcagattccatattactataattcacttttcaaataatccayagcaaaacaaaaggactaaaattacttcttaacacaaaaagcagaccaggccagaggtgagaatcagattagaatccattcttccagcttccgcaactggtttctttgacctttacctcaggaatgtcagtgtcgtgctcgggagaatctccgccatcgtcacttgtcttcctcttccttttatttcggacactctggatgaaatttttgtgaaaatcacagatatataggtgccttacctgatggagacaaaaatcaaagtcagagttggccaattccttggagacagcaataggtatctgtcgaattgcggggcttccttccattgcagggcattggagagatagatggaagacaagatgtaggccatcattcccagaagctcactactgagttgcagaacacaaagagaatgctaacatcacacttggcagcgtatcatacaccaaacttccagtgaatggtgaagacagtaaatggtacagattcagcaaaggaagagatccctgcaacagagatgctcagggtgaagggccctgactaaaagggaggactttaggcagacaggaagcattccagatgggtaggagtgccaagactttagagtttccaatggaggatgacagaaagagtgaggaggcccagggtacagtgtcagttgggtgatgatggctgcccatgtaggagcataatgaaaaagtgaggcatcaggggggtgggcatgagaacagcttagactttccttccgacaagacagagtccctcaaggaagcaggaagtgatgtgacatttttagaagacctgtaggagtcataaacttatagtcgactggaatgtactgtcctggggaggaggaaagcaggacacaagggactgttgcaacggtatttgggacactctatttttacaattacaatagctactattgtaggataataactctttgaaaaactttgtttctatgtgtcaatttataattcttgcattatctcacatctgatccacaaagaaaagtggaaaaagatgtggaagttcttamaaggtagaaccacatacaagaaggtggatactacagattttctaatacaggctggaggcacactggtaagtgaaggtggcagcaacagctaagacatgaagaatcctccaaggctggctggaggaaccactgaaaaactttacagaaactgaatgcccagcaaatgacttggggttgttgatactgaaacagstgttgcacaaatgttctgcagagacttctgaatttgagtttattccttaaatccttaaagataaaagtaagctggcaggaaatccgcatcaattaattcagaccttttcatggagaaaataatgaaaactgtttatttatttattcagatgaatgatcactttcatgtggctggattagtgagtcataagtacttttaagtttatactgtgatggtgtcttgcagacaggaggtactcgaaaaatgttgatgtaccaatataggaagtctcctatatctaaaagtggcttaaggctaatgaaagccaccacttaacatggttacaaactgggatagctttgtcagattcaactctgtcaaaggactttcaaacacagcacatgccactgtcccaaagaatcccacctagctgatgtatatactactggacatgcttttctccaggaagaaagcacaacaaagcacactctgcatccctgagaggaagctagccctccatgttagctagactggcgagtccactcagatcaactgctcctcaagttcacagtaacaaacttcataggagaacagggagaataggtggcttcctaaagctttggctgggagatttcagatcaggacaatagaataacggaatcctagctgtaagagaacttagcaatcactagtgcaatcccattgaccccaatccgttttctaaatgggtaaaatgaagccatccagagtgaggaaatgacctggccaaggtcacccaggccttctgcccccccagtacatgtcttttcctactccagcattttcctttatactattctcaacttccacttttctccaggaaaaaaaaagcagaaatatgtcaactggaggtatattagtattttaacagatcacagaacactgccaaagtctatataaaatgagttaaacagcctgaattgartttctggtgttgttatttaaaaaggttctctgctagactctcttacaagataaataatcattttctccttaaccattttcaagtacatactggttttcagaaatttcagagctcagtggcctttgggagtggggttggggcaggagggtggtagcaaaggctctagtttttttttttccttcactttctgcaatagctaaaaattcttgtaacataccagttacctggaattgaattcctgcccaagcctgtgagaaagaaatagaatccctttcagaaataatgactccacaacaccaccttaaaacaaattttgagtgattccacctggaaaccttactacctcagaagtattacattttgggaacactaatgctaggctcaggctgcccttcttctagacagtgtgtgtgaaatgatcagcatagctcaacacaggttttccagtacagtcaatgggtaaataaaaggagtcccagttgcagcagcaaaatcattcagatgggaaggcatccagtgatctaaaaggactggaagattcttttaaggactggaaattattattataagctgctcaagtaaagcagcttctaacaacctacacggaaggtaggcagtgtttctaagtggatgaattcattgccataagcatttcacctcaacgtgtgacctaaggagggatcaccttggtgtctagacccttgtttgttctcagatatttccattcatgcattcattgatagagatttgtagtaagaaagccattaactctctcccaaccacttaaaaatagcacctgtccatgcaagagctgcaactgtattataatgattaacttaaaaatgggggtaggagggaagagtctgaagaaaggacaggggctgggcgcagtggctcacgcctgtaatcccagaactttgggaggcctaggcgggtggatcatttgaggtcaggagttcaagaccagcctgtccaacatggcgaaaccctatctccattaaaaatacaaaaatcagccaggcatggcggcaaacgcctgtaatcccagctattcaggaggctgaggcaggagaatcgcttcaacccgggaggcggaggttgcagtgagtcgagatcttgccactgcactccagcctgggtgacagagtgagactccgtctcaaaaaaaaaaaaaaaraaaaagaaaaagaaaaaaaaaagaaaagaaaaaggacaggggagattttttatttattagagacttaatgaagacttatgtatagggcttggaagtaaattagataatatctttaagaaattaaccagcctcttaggtgctgtgtgtacctgacaccctcacttcctatctctgggcctgtttcaaccctaaaatcagaggggaaacgtgcactccctttcagtttaacaagcagtctctgatttcctccaactgtggagaaattctgattctagaagagaatggatgttaaccacctaagctcttagctagtctacctgaatattaaatatccccttaactcatttccaattcctaatcatgaagcaatcacttaaggcttgtagcaacagatgtcaaactaaaaagttcttaattggttgacaataggcacagcttcagaattgttaactagaagtggtgaagtcacacgggaggagtttcctataataagccacaaagagcagggcaatccgatttaaatttaaatatccacccccttatttcaaaagaaactaccactaagaaaattgatttcttttcttcccccctccagtcacatcgactgcaagagccatttcccaagacctggccttggccttatttctgccacatcctagaaaaacccattcccacagctgcctgcgaagcagctagctcggtgaccctctgctgataccgaggatgcgggagccagggaagtaactgccacctttctctgtctgaaggaataacagggttcctagaaggagagagaagttggaaaagagccgggtatcttcatcactccccgctccgattcttgctccttcaagggccaacaaaactaacccacctctccctgctctaaagtctaaaccaataaaacaagttggaaactgctgtccaatctttccaggcagcaggagtcctgaagcccccgcccccatcctcccggatctgggtagaatcacagtcagagcatgtcagcgctggagcggcctttgaaatgcggagtccaactcagttctgcagagccggggcggcgaggcccacggcggggagtgcccggggagtcccgactggagcccagggcagcggacggagagctgggggcgccggggcccagacgcgagcgggggcggactcacgctcttgtcgatgtccagcttgagtttcttctgcgagatgctcttctggaccctcttgctgaaggaggcgttgcccgcgggccggacgcagcgctcgccgtcctcgatgaggcagcagctctggccgtagcccggggcggcggcagctggggcggcggggggcccttsgcggctgtcctcctccgtgctgaagccgttcatctccccgccccgggccggtccctctgggggagggtccccggtaggccactccgcggccgcgcttgccgcggggcaggtcgctgagacccccgcagccgagggtcccagagtccgtctccagcccgggcgctgccctgccccgcgtccgagaggcccggctccctcggcccccggccctccgcctccggaagsccccttcctcccggctcgaggccccggggtcggctcccgcggctcgcagggccccgccgggggtcacccggaggagccttctgccgggggcccagaaccgtaaccctgcagcgggggtgtccgggagggcgtcccaggaaacagccgctccccaaggactccgggcctgggttgccagggggtttcgaaggcccctgccggctcccgccttctttcggcagcggggcaaactcgctgccgggcagctcccccggggtggcgcggcctcctcgcgcggggcccggcctcgaacccgcggcacccgggccccgcggctcgtccggcccactccacccctgcagccactcggctgcgccccgagtcccgcggcagcccctgggccgcccggccgccgcccgccgaacgctccgcaccacaacagttcgctccccccgcccttcgcgggacagcggaagtcccgccttcacgcgaccattggtctcatttgctctctgggcggggctgccgccgccgctggcgcgtcccattgggcgtcgccgccgccagtctccggcgccaggctacttcctggactctgctgggatgggttcaaagtagagaaagtggaagaggaaagagttaccccagcgagaaccgggaaccgggctgcagactctccggcccgggggagggatggtgagcaggggcctggctggaccgagggccagactccaggaacagaggaacacattcggggacagacagtagagacgcggacggggacgctgagggacagacttggaggagcggcatatgaggggacctaaagaggatagaggtgctatcaggagaggggcggactaataaaatgaaagggccagggccagaggactcgcggatccgtgggaggaagggtgggtgaaataggacggaaagccagtcatggcgggaaagacagagggacaaccccatacagatacgtggaaagacatgcggaggaggtgatggggggatcttgcaaggcagtcgcaatattgggggtagccgataccttccagagtgtggagagtgggactggcttggacggcgcggaaagaaaaggagagggggaaaggagaccccgaggggtttgggcgacccctccactgggaagaatgggaagtccgaatgaggtctggagggtggactaggtgagccgcgggcaagagaaagggcttcaggggagatgaagtgaaggctgggagtggggcccaggggccaatctcggaatctagatggggaagggctgcggtgtcttgggctctccctggagctccaagctgtagttctattgctttgagtccccgggtctaccggcgaagcgactgcgccctgccaagaccctgcgcttggtttcggcgcccagggcaccacctcccctccaggaggggccgtaggatatgctctggtccagcacttcagtcatgccactctccaactgcgcagcatggggactgatgaggtccgaaaggcgatgggaccagcccagggtcgtgtaattatgtagggctgggcagcgttttatgggcagggaagaggggaggctgtgttaggtgataggtaagcaagtgttagtactagagggcatagaaggagcttcgggtttgtgtcctgttgtaaaagggaaagctaccagtttccatgtttagaagcaggtggctggtgatcttaagttttgctcagtggccataaatgcatttgtagcatctgaactggtaatttcacacgtgggacagccatcgtcggaaataggcctatcagagataatatgaagtacagtgatgttcattatggaattatttataataggaaaaataaaatagaacctcagagttccaaaagggaagtggttaagtaaactacctaaaatcttcagaaagagattgtgcagttagcatttgaggtagtttcaacatcaatgtaaacattttctatagagaataattcaccattaattcttaaataaagagctgatgaggagttggagaaatgctttttttatgataagtaaaaaaattcaggatatgaaattgcatggaggatacgatgtctgtacatctatgtttaaagaaaaaagaaaactattggtataaaaaatgcaccaaagtactaacagtgattatttctgggtagcaggaatatggctgatatttttctccttttgtttaacctttgcattttctttaataagcattatttttgtttttacagtagaaaaaatagaataaaaattaatggaaaaaaggcacagattaataggagtcttccctcagagttcatatattctgttcaaaagtaaattgttgttgaactcattatgtataccaagtatagggttggctataggaggaggatgaaacataacccttgccctaaaagaatatctcctatctggggtgttcagacatatatgtagaaaacacttgggtatctgtaccaggcactgtgtgatgttgggtccaaagtcagttggtatggatgaaacctccatgttccccatatttttctaaacagcatttgtattcaatgctaggctattgcggtacacaacttcttctgcaccaacttgccctggtctaaggggatctaggaccttttcttaggtgctctgtctcagtccttgaggtagtggctacttatatctgctattcttgtattatttagcattcttttttctttttactaggcagttccttataactgtaggggactacagtcccctattataattaatacatgtttatattattattttcctgttcaaattactgtaaggttactctttcctgattacacccagcctgatacgcccagccagcctctgtgtgtgtgtgtgtgtgtgtggtggtggtggtgggggagttcatgcttgtaactgttctttttttttcttttttctttttttttttgagacagagtttcactctggttgcccaggctggagtgcaatggcgcgatctcggctcaccgcaacctctgcctcccggattcaagcgattctcctgcttcagcctcccgagtagctgggattacaggcatgtaccactgctcccggctaatcttgtatttttagtagagatggggtttctccatgttggtccggctggtctcggactcccaacctcaggtgatctgcccgcctcggcctcccaaagtgctgggattacaggtgtgagccaccgctcccagccattctttatgtataattttgtagtctttattcaaggcatactttatcataatctttccccatattgctatgtagttttcacagttgccattttttatgtagtacagtgcagtttctgtagtacagtacactgtggtgctaaagacagttggctttgctgtcagaactgggttcagatctggactccacccatgacttgttataacatgttagcaattatttcacttcttgggtctgatgaaataggtggtgacaaattcttaacacagtgcctagaacatcataagtggttaataaatgtcagctatcatgattcctaccgtagttacatttgcccccccagaagttggatatcttttttgtgtggttctgtataattatttttgaacataaaactttttattatttaggattattattttttctgagtgccagagatggaattgtggtcaaagactacaaagttttccaaggtctaagggccaggctcactgaccctttttttctttcctgtcttttctgcccctgccctccccaccttcattccttccatccagtcaggccccagttgagaagttatcccccaacacgccttaaagaatcagagttggataccttggccaagcagtcacagtcctacaaaagctctttgctctcctctttctctcctcttttccctttttggggaatgtggcatatggctctgggagtgatttccaatgactgcccttctttgggaacaggtggacacttaggtgtccagtgactgggtttctaatccttgagtggcccctgattgtctaatagtgaatacttgctgggttaagcctgtggctcaaactgtactggtcagtttctctccagcaaatctgctggttggaactgacaggtggttggtgggagtggttagagcagaggcactaatggtgggtcctgcctcctgtgttccccagggcctggtagttgagcttgcccttgggttctgtaaggtactcatagatatgttggcatgaaccaaaagtatctgagacaggtctcaatttagaaggtttatattgccaaggctaaggacgtgcacgtgacacagcctcaggaggtcctgactacatgtgcccaaggtggttgggatacagcttgcttttatacattttagggagacatgagacatcagtcaatatgtacaagatgtacattggttccatctggaaaggcaggacaacttgatgctggggcttccaggtcatagatagataagagacaaatggttgcattcttttgagtctttgctcagcgtttcactgaatatacaatttacatgtggggaaggggtgaggtgggtggtagaggaatagtcatttatgcctttgtctcagtggatctgcatttttacataaacaacagggcagaagaagcaatcagatattcatttgtctcaggtgagcagagggatgactttgagttctgtcctttgtcccacacctatgaagataagctatccatttacattgccagggtgaaattcaacagaactgttttagggtaaagatcttgatgcccacaaggaatttccttgtgggcaaattgtgagggaggtctgtagcttttttatctttgtagctatctaacttaggaataaaataagaggtaggtttgcctgatgcagtttccagcttgactcttccctttgccttagtgattttggtgtcccgagattcattttcctttcacattgttctgagactggaagttctgcaaggacagggaactgtctctatggctcatcatagtttccagtgcccaggcacttgattaatatttgttgaatggatggatagatggatgatggatgacttggcctctggaatcaagaggcagtacagcataatggttggtataaatctagatgtagtcagcttatgctggaatcctggctctgccactgactagcctgggaaccttgggaaaattacatggccttagtctgccatggtttcctcatctgtaaaatggggatgatagtaacctctcgggattgttgtgaagactgtctgagttattagatataaaccaactattagatataaaagtgccttgcacatattaggtactcaataaatattagatactattattggcttaattagtcataattaggtttagcaagtaacagaaaacccaaaaataagcttacatttttctctcaccttcaggaatcctagaggtgatcagattgttttcctcagcatcagagaccgaggcttctcttgttgctttgccatgtttggcttccattcccaaggtcgcgtcactaagcaaggtggctgctgggactcccatctactgaggcattctagccaggaggaagggggaaaggcagaggaagggctcacccttgctctttaaggatagttcccagaagttgtaggtgagcctcccacttgtacctctttggccagaatttcgccatacctaacgggggaggggaacattgggaaatgtagcccttattcctggtggctgtatgctcaggtgaaaacagagggctctgctacacgtggagatgggtggaatgtatatggagcccaaccagctgctctgctatacctctttttagaatttccccatctcttaaattctgggagtgtgtcttggttaattttggttctgtttctctggagaacactgactaatctgggctgcaaagacctgtagttttttgatccagggaccactgcagcctcagcattttgccatttctcaagtttctgaatttttttttttttttttgagacggagtctcactccgttgccaaggctggaatggggtggcgcagtcttggctcactgcaacctccatttcctgggttcaaacgattctcctgccacagccttctgagtagctgggattacaggcacccgccaccacgcctggctaatttttgtatttttagtagagatgggtttcaccatgttgtccaggctggtctcgaactcctggccttaagtgatccactcaccttggcctcccaaagtgctgggattacaggtgtgagccaccgcactggctgtttctgaatcttaacaatgttctctgcagcttgcattgcaagaactggtactgactccaacagagtatcacccagtctttaaaggaaagatttacaggtttcaaacctagctctacatcacaatcacatagggaactgtaaaaaaaattacaaaaatctcaggcctcatctcagacctcct

SEQ ID NO: 98022 - DNA, 19002 bp, Homo sapiens
ctttgggtaacgttaacagataccccaggggcctgccccatgtaacaggtgggttttcctcagagggtctcagagcacaccggaagaacaggcagttatcctagacaggcttggagcccagctcagagactcttctggagtcagtatctcaatgtctttctctcctcccttcctagacgtcggtacagcagggaaggcaacaagcacctgctcccatgaggggattgctaaagaaaacccctgaaggttatgtatgtaggattttattcgagagagaaatggcatgcaacgcaggaccctaacttgaaattcaagccagtggtgcagtccacgatgccctggctagacacagaacacctcctaccttccagctgtgctctggcctgttgattttggtaaacactgcttggcggtgccctctagtcatcagggaagtaggcagctgtaataggatcccatggaactgactttgctcaaggtcactggtgagtcaccaggctagatttgttttgaaggtcctgcctcttcctgtctatctgcccattgctctaaccactcctgacccaaacagtctgcaggcagaaaggcttaaaaggacttctgtcccaccccgcctcccttcttgctggagtccctctgaattagagacacttccccaatgccccaatccctctttatgcatctgtgcaacctgctcagcgtctcctcactgtgacctttttagcttccagacaggcctgcgacacaggcctcttaacagagccctctagtgcccagccaggttatcccacagacaccaacaggccccgcagggcctggcagtgtcagctgccccagtcaccacctatcaggcacacaggctctccctggaaggcccttgatcttccagtggctgctgtcaattgtgattcacctgacttctactccccaacttcctcattctccaaagatgcttcctggggctgttgccagtgccctttggtggccacacttgagaggcagaaaggctcagaagaaatgactatctgcggcccctctttctggggtctagaggtgtgagtctatctccacccagggccaggttgagagctgtgtgagaagcaggcaccgcttgcaggggcagtggagaaaacccaggatgaggtcttttttttttttttttaaaggaagggtctcactctgtcacccaggctggagtgcagaggcacgacgatagttcactgcagccttgaactcctggactcaagtgatcctgctggcctcctgcttcagcctcccaaagtgctgagattacaggagtgaaccaccacacccagcccaggatgggttctttggagccagctttcattggctaaagcctctgaagctttgtgaatgacaatgggagagtggctttgccctgggatcaccaactaaagcctcaacactgaggcgatgaagttatgacaaaaagcacagctttggctgggcttatgataaaactcaactagaataggaaagtgataagcctcaggcagctttgatgggaaataaactcggagctcactaaggtgttgcagtaagagtatggactttggagtcaatgtccactcagattagctgagcaaactacctagcttccctgagctgggaccttttgaagtggggctgaaacagtacctaccaaataaagatgctgtttaggaggaaaaaagcaggcatggggtgtgcttagcataatgtcaaaatgtggcactcaggcaggggctgagaaatggtaaggctgctccagggcctgctggctgcccaactcccatcaccggcagagacctggcagggtctgttctccctctggaagtatctacatgtggccaggagcggtggctcatgcctgtaatctcagcactttaggaagccaaggtgggtggatcacctgaggtcaggagtttgagatcagcctggtcaacaaggtgaaacctcatctctacgaaaagtacaaaaattagctgggcatggtggagcacctgtaattccaactactcgtgaggctgagacaggagaattgcttgaacccgggaggcggaggttgcagtgagctgagatggcgccgctgcactccagcctgggtgacagagcaagagtctgtctcatttaaaaaaaaaaaaaaaaaaactctatatgcaccacatctgtgcttgacagctctgctccctcttgagatgtggaatactccaggctctcaggtcaggatatctgttaggccctgaggatcagcacagtcacacaggatactacatgtctgaaggcccactgggtaccaaaaaaccagtaggtacaaagaaaagggagagaagatgcaatcaaggacttccggattccttactgattcttctgtgatagctcatgaggcaccactgccaactctcctattaatgggcacaaactgctcttaggagatggccacaggcaagcaagtagaaactatacacaggttaaggtctctaaatatgtgagcaaatgtaatgtaaaggttaagaaaacatgctttgcaaaagacaaaacggagcctgaataatttctttctttttaatttttgagatggagtctcactctgtagcccaggctggagtgcagtagtgtgatctgggctcactgcaacctcacctcccaggttcaagcgattctcctgcctcagcctcctgggtagttgaggcaccagccactaggcctggctaatttttgtatttttagttgagatggggtttcaccatgttggccaggctgatcttgaactcctgacctcaggtgatccatccgccttggcctcccaaagtactgggattacaggtgtgagcctccatgcctggcctggcccgaataatttcttagaaagggtaaatacacatgtgaacaaagaagaacctgcaccaagaatttacttttttttttttttttgagatggagtcttgctctgctctgttgcccaggctggagtgcagtggtgtgatcttgggctcactgcaactcctctacttcctgggttcaagcgattcgcctgcctcagccttcagagtatctgggactacaggcgtgtgccaccacacccagctaatttttgtatttttagtagagacagggtttctttcaccatgttagccaagctggtctccaactcttgacctcaggcaatccacccgcctcggcctcccaaagtgctgggatcagaagtgtgagccagttcctggcctttctttttttttttttttttttgagatggagtttcgctcttgttgcccaggctggagcgcaatggcgcgatctcagctcactgcaacctcggcctcccaagttcaagcgattctcctgcttcagcctcccaagtagctggaattacagatgcctgccaccacgcccggctcaaaaatttacttttatttttaacatgccttcgacaaggatgcacaccaaagtgaaataattatgagattgctccttatgacagctgaagtaaaacaaaggataaaaactataaatgacacggcatcattttatattggcatcaacagaggtggggtagtcccagctctgccaccctaaactgggtagccttggggagatccttcatttttctgagccacagctaagcacaccccatgcagtgctagatttcggagatctagctttctagatctgatgggtctagtggtgggaaggtggtatgtgtgcttcaaagaaagcaagtacagggcaatgtgctaaaagaaaaaccaccaagactcactcaagcttaatgctctttgtgccattagcaacatgacagagaaaaggctgcatataaggcctctgtcgtgtgcataactttggctttaatgagccaacccagcaaagagtaccattaaggtgaaatctggaaacaaccagttgtccccaaccttctacaaaatcaccctacagcttctaaaactcaagagagatgcaaaacagtaagagaacactcagagaaaggcaacatttggccacaaggatgaggcttttcagcctagacctgcagaagcagagtatggtccgatgcacagcggggaacttggaccttttcaccaaatcccagtgcctgaattcttcaggaggtaacacgcagatatctaacaggaagtgcttctgataggcggtgcagtaaacatctggaatgcatcacagccagggaatagcacagacaggatagcacagagaggatataagaccttcaagatggctcaaaagaccttggggttgatgaactatgctgttactaaggactgtttggggtacattgatcattgttagggtaaaaagcaggtgatacagtccagtcctgtcctcacacttcacaatttttactggagacaagaatgggcaggataaactatggggcccataggaccctcccatcgtctgctgtctatctggccggaaagcatgatgatgaacaaagcaaccttgcctctgtcaggcacacctataatggttccaagagccacattccgactgttgtactgcgggtggcaatggaacggtcttccgattacctaaaatgccacagattcccttcttctctaatacgcatccgattaccatagaactctaagatatcttttaaaacctagtcatattaaaagttcctttttctccattaatcagtctgccccaaagaagcttttccgtatttcacaggatccttagaagaggccagctaactgtgatacctagcacccttatcttttctcgatacacagcgtccttcctccagcagaatcctaaaatagcagcagtccggattaacatggctgtgaggagtaggtgcttagctgaataacatcagaattaatgaggggccggaccccaaacagagccacctggtgggcatgaacaccaggcagttatggggccgtttccttcaaccaagtgtctggtccctggctatctctgcttcagccagaacacattctgtcccccaccgaggctttaagggccagcgcgcagcaccctcacctttcagcaggtccgggtgcacatagcccaacacgtcggagacccccagctcctggcgcgaacaggtgcctccgtggatgtgcaaccaggcgggctcggcgagggcagtgcacagcgccgtgatagacagggcgccaggcagggccgaggccaggctacgctccggctgcttgggcagagcgctgcctcccgggctcctccgccggcgcccgccgggcagccctgcgcctccgggggcgtacatgcccggggccgcccgccgtcgctccgcagtcgctgctggtcgccgccgacctccgcggggcgcgcagagcctgacagtccggtggaggatagcaacgctccgggttcgctgcaggtgaagccgggactgggctgtcagggttgacaccagaggataggggggtgggacccggggctgacggagacggggagggctgcgggaattcggggggcggagacaggagactccggaatgggactgcgggacgacaaccgaagagggccaggggccagatggggtctgggcagactcgagtggggggcggagggatcggggatcggctactgctagagcaaagacccggagtcagggtctcagccagaggatgccgaggggcggaggaccgggctgggccgcggggatcggggacccgtgatctgggaccggcggtttggggtgcgacctgtgcgcagaaaagaccctccccacgccgcccactgttcctcaccagtcagcaggccccagggctgggatggtgctgctcagcccagtcacgggcttctcggctgccgggggccgagcgttcccaggccccaatcccgcaacgcccggacagacccggggccgatgcacttccggcttcctcctcctctgcctccgcctcctccggctccccgccccgtcccccgcgcgcgtcacagcctgggcgcgccgccggctctgcgcagggcctcacgggactggtagttcgaggcggtcccgcgatgctttccctgccgaggtgaggggagcgactacaactcccagagggtatggcggccgcagcagtgggcagttgagtttccggggcgacccaggtcctccggcggaagcgggagcctctgtcggccgcggaagcctggagtgggcggtacgcagacgcgcgcggygagacccgctgtctgctcagcggactctgcccgcccccacctccccctgcgtcgggccgacatgaaggactcgctggtgctgctgggccgtgtcccggcgcacccggactcccgctgctggttcctggcctggaaccccgcggggaccctgctggcctcgtgcggcggcgaccggagaatccgcatctggggcacggagggtaaggcccagcctggttgcgcggccctcagcgctgagggctcagcctgcgcgtagtgcaggcgctcagcctgcaggggaggctgaacctgttcctggcggagggagagtgggatgttagccacgccgagaagggctttacaggcaaagaagtctgcgactgttgggaggaaaaacgtcagcagacaagctgaaatgtcaagggaattgtgttagctgcagaggcaggaaaatgggaaaagagaggtgttaggaaagtggccttcagagtaacttgcgactggatggtcacattttatcccgagggcattggggaaccaatagcaattttagatcagatttgttttagaaagatgcctccagaggttgggcgcggtggctcacgcctgtaatcctagcagtttgggaagcagaggcgggtagatcacctgaggtcaagaggtcaagaccagcctggccaacatggtgaaaccccgtctctactaaaactacaaaattagctgggcgttgtggcgggcacctgtaatcccagctactcgggaggctgaggcaggagaatcccttgaacccaggaggcgaagattgcagtgagccgagattgtgccattgcaccccagcctgggcatcagagcaaaaactccgtctcaaaaaaaaaaaaaaaaaaaaaaaaaagcttccagacgaagtagattcatttgcatctttgtaaaagctgtgaaatacactccctgagctttcccccactagcttgattccagtgctagcccctgatattgaatggcttcatggtgctgcacccagctccagagcctggcctgcgctccgcctttaggtgacagctggatctgcaagtctgtcctttctgaaggccaccagcgcaccgtgcggaaggtagcctggtccccctgcggtaattacctggcctctgccagctttgatgctaccacttgcatttggaagaagaaccaggatgactttgaggtacccaggctggttgggaccagaattattgcctgtttcctccccagggctggttcaggaacctgagccaacctgcgccagttgggctgtacccatgggaaggggcttaggggtgttagctgctgttaattctcattttctttccyctttcacagtgtgtaaccactctcgagggccatgaaaatgaggtcaagtcagtggcttgggccccatctggcaacctcctggccacttgcagccgagataagagcgtttgggtctgggaaggtgaggccaggtccctccaggtggattgggaaccacctgacagccccctctgtgtccctgacagggtcggctcttgggtcccctttttctctcccacagttgatgaagaggatgagtatgaatgtgtcagtgttctcaactcccacacacaggatgtcaagcatgtggtttggcacccaagtcaggaggtaagagtcaagcagggactcttgtgggaagggctctggtgtgcaggcttgtgcccagccttcctctgcttttcagccttaatctagcttttacggagagttccatctgtgaacaaaaaacattagtccctttataaaaacagatccggctgggtgtggtggctcacacctataatctcagcactttgggaggccatggtgggtggatcatctgaggtcaggagttcgagaccagcctggccaacatggtgaaactccgtctctactaaaaatacaaaattagcgggcatggtggcacatgcctgtaatcccagctattcgggaggctgaggcaggagaatcacttgaacccaggagacgggggttacggtgagccgagatcgtgctattgcactccagcctgggcaacaacagcaaacttcatctcaaataaataataaaataaaataaaagcagatacctggaactgacctgtcctttgcttcctgggccacacagacacatgttgggtttcctttcactcttcccccagctcttagcttctgccagctatgatgacacagtgaagctgtaccgggaggaagaggatgactgggtatgctgtgccacccttgagggccatgaatccactgtgtggagcttggcctttgacccgagtggccagcgcctggcgtcttgtagtgatgaccgtactgtgcgtatctggcgtcagtatctaccaggcaatgaacaaggtgaggtccattagtagagctaaagaagacccatctctcaaggggttcacagtctgctaagacacgtacatgagtcagagcaaatgggggtaaaaggtaagatgtgcyacaagagggctctggatagagtgctggaagaatcaggaaagttttgtagaatgggttgtttcatctgaatttaaaagggtatgtaggattttaacatgagaatttcacgtgagaattcaagtgaaaactcaacagtgtgagtaaagataacaatggcgggaatgcttagactgaggggtggtaatgcatttaaatggggcataggacgtctggggtttggagaggaataaagtgggttgggtcggctggtgggtggccttcacaggcacgcaaagtagttacatacagtctgcaacagaacagggatgtttcctcggaattctgcttgagaaacgccagtctggctatagtgtgtaaggcagataagcagggatggggacacgaayggagacacagactcataatcagttgaagatgagggtgagggaaggtaagttaggttctcctttgaggtgcccaggacataggaacgtttaagggcaagagaagtctgtcttgcaggggtggcatgcagcggctctgaccccagttggaaatgtatctgtactttgtccggcttccactcaaggaccatttatgacattgcttggtaagactccatccccccaccccatcccatccccataaatcagggattttagagaaggcataccctatgcagtcctctgcaaccctgggggagtgcttgggaattgagggcagccacccccattccttatcaggcctgactctaccatgctggtttacagctggctgggctggcattcacaggagcagagaacagtcccaggctgtgagggtagcaccagcgctagaggttcgcacagctcgtgctgtccagaagttattattgaatctgcattcgtggctgagggtttttttttgtttttttgttttttgagacagagtctcactctgcagcccaggctggagtgcggtggcgtgatctcatctcactgcaagctccgtctcccgggttcacaccattctcctgcctcagcctcccaagtagctgggattacaggcgcccgccaccatgcctggctaattttttatttttagtagagacggggtttcaccgcgttagccaggatggtctcgatctcctgacctcatgatccgcccaccttggcctcccaaagtgctgggattacaggcatgagccaccgcacctggcagtggctggggtttttataggtaacactgactctggccttgtggaagctggaaaagctgcaccattcatataggagagtaggttagagggtagttctggccctgagaattgatccctaggaaatccaaaacagtgaaaaaaactgagcacttaagcttgctttatattagcaaacatttgggaatcacctattcaacaaaagtgaacttaagtaaattatggtagaactcagcttgttgtatcactgtttaaagaaaggggttaagaatactttatgatggggccaggcgctgtggctcacgcctgtaatcccaacactttgggaggccaaggtgagtgaatcatgaggtcaggagttcaagaccagcctgaccaacatggtgaaaccccgtctctactaaaaatacaaaaattagctgggcgtgttggcacgcacccaatcccagctactcagaggctgaggcaggagartcgcttgaacccgggaggcggaggttgcagtgagccgagattgcgccactgcactccagcctggtgatggagcaagactccatctaaagaaaaaaaaaaaawactttatgatggctgggcccagtggctcatggcctgtaatcccagcactttgggaggctgaggcaggtggatcacttgaggtctggagtttgagaccagcctgtccaatgtgataaaaccctgtctctactgaaaatacaaaaattagccgggcatggtggcacatgcctgtagtcccagctactcaggaggctgaggcaggagaatcgcttgaacctgggagggggaggttgcagtcagccaagattgtgccactgcactccagcctgggcgacacagcaagactccatctcaaaaaaaaaaaaaaaaaaacaactttatgacatgggaaactgcttatgccaagtgaggaaagtgcagttcataattgcatgtcgttttttaggataatcatagtaggggaaagaactagattgcagcatctgaagatataagtgggtgatatttgtgactccttattagttaaggaaacattttaataagaggtttttagctgaggcctgaagttagggaagagaacaggccaggaactatggaacaggtctctctggcctaattagtcaggtatacccactgatgtcactttccttccaggtgtcagctgacaggggctctggccacagcttgtggggatgacgcgatccgcgtgtttcaggaggatcccaactcggatccacagcagcccaccttctccctgacagcccacttgcatcaggcccattcccaggatgtcaactgtgtggcctggaaccccaaggagccagggctactggcckcctgcagtgatgatggggaggtggccttctggaagtatcagcggcctgaaggcctytgagctacctcgactttggacagagtaatgactccccagaaaacgtcatataagactttaccagcccctgagaggaccaggaggagcatccttgaccttcatttaacttggctcacttctcttcagacttgggtagaagtgcagagccacagaattgctttccttccccgcctttgacatgaggccttcagtaaagagctacagaacatsagtacattgttataccacagatttttcttgcattagggcacagtgttaaattttttggaggtaaatatactatttataatcactatatatagtaggagggggtatgtgtctcaggcttttctgaagttgcaagacttaaagaaataatccatctgcatcccaagtcctattttataaggatattcataaaaattccatggtgaatccttgtctgaaataggtcctcccttcccagtttctgtgtaagtctttgcatttaagacatccaatcaataatgaaggaaatttttttctgaatgtaggtttgagtgaggggcacctctgctttcccttagcaaccctcatatacctccctgcaccgttacgctgtgatggcaactggggatagaaaaaaaatggggaaagacaggaatcctaaaagggagagttattactggccacaagccctgtattctcaacagggatgcaaattggttcttcagtaaggataaaaaaaaatcacaagcagttgtttgtggccctcctaaggcccacagcacatatagtgtgtctgtgatattccattttcatggcagggagtgatcaggaagaaggcttcctaggggactggcgatttaaaccagttgagaaacactgccatcagcaggcagtttcagactcactcaagttgtctcttgacagtcacttctaaatgggttctaatgtgacaatggcctccaaaactacagccttccctgaagtttaagctgtgaccttagattttagaaggacagtggggctgtacctagaatagtggttctcgaagaatgcggcctgcagatcctgggagtcccaagaccctttcagggaggatctgtgaggtcaactgttggcactgtggcatgaatcaaggtggtggcagcaaacttctagtagttttgatatgtccttgatagaacaaatagcaatggttaactattaaatgttgacctagccagcgcagtggctcatgcctgtaatcccagcactttgggaggctgaggcgggcggatcacctgaggtcgggagttcgaggccagcctgaccaacatggagaaaccccgtctcttctaaaaatacaaaattagctgggcatggtggtgcatgcctgtaattccagctactcgggaggctgaggcaagagaatcgcttgaatccggtaggtggaggttgcagtgagccgagatcataccattgcactccagcccaggcaacaagagtgaaaccctgtctcaaaaagaaaaaaaaagttgaccttgagaatttataatattctgagaaaactggaagcatgcataaagcccctctgctgtgcactgaagtatgggtgccttgaggaaaagcagttacacagttgagttgcaagctgaattggctgtgttcaaggcatgccctttagaattgaaagaactagcagattacggtatttagacttgaatatttggctgatattttctggaaattaatggaatgagcctctcacctcaagggaaacaactgatagtgttgccagtgataaagctttcaagcaaaaattggaatttccgaaaatctgtactccaccatgagctttattgttggggatattaacaaatgtgatttgtataatgaaatgcatttcatttggaagaattcaatgaaccatttttccaagtgaccagtacgtgatgttacaaaatcatgcatggctcaaagattgattcaaaagtgtaagacaggccagtggattttaatgtattaacaatataagagtgcattaagttttcggagtctacattgcctttaagaaactatgacttgtagtaagccgggcgcggtggctcacgcctgtaatcccaacactttgggaggccaaggtgggtggatcacaaggtcaggagttcaagaccagcctggccaatatggtgaaagtccgtctctactaaaattacaaaaattagccgggcgtggtggcagatcccttgtagtcccagctactcgggaggctgaggcaggagaatagcttgaacccgggaggtggaggttgcagtgagtcgagatcgtgccactggactccagcctgggtgacagagcgagactccatttcaaaaaaaaaaaaaaaaaaaaaaaatcacttgtagtcttggtgtggtatcaaagaatagccacaattagctgaaaaggctattttaaaaacttttccaactgcgtatctgtgtgaagtcaacttacttcaacaaaaaagtttggatgtagaagcagctgtaagaattcaactgtttattataacaagatactaaagagactgtaaaatgccacccttctccttggattgttttggaagttattcttcataaaaaatgttaacgtgggctgggcatggtggctcatgcctgtaatcccagcactctgggaggctgaggtgggcggatcacttgagctcaggaattcaaggtcagcctgggcaacatggctaaactctgtctctattaagaaaaaaaatgttaacattatgatttaaaagtgcattaaccttaatctagataataaaagctttttggggcaacctccagaactgtgaaaaataaatttgttatttaaaaagaaaaaaaaaaaaacaaaaacctgagtttcttagtttttagtagtgtaaagaggtcctaagaccaaatcatttgaaaactgctaccctgaggaaactgcccttcagaatcatctttcaattttgtgtgcatttaatctaaagaacagaaggtaagaatttgaagacagtcggaagatctggattagaaaacctgtttattaagactgggtcacatccagctagtacatttcagtgccctttctggtgctgcctcccaggagcagacactgcaaatttcagaacccccatctagagaaacccctaacctgtgatctagcttccgaggctcagtgttggttcttgtggtagtgctgatgtgtgggtaccactgaggccaggccacagtcgcatgtaccctcctctgggctgactcacgaggctacaggggacagcacacctaatgagcaggtctgtcctccagacatactcattaacaagcacgttcctggctaaaaaataaccagatctttttggccgtgccctcaggttggagaaagaaaacttttaatttggaatcactacaaagacaaatggtttctacaaattattttattagaatgtcagactcaaaagaactaccaggaacatgcctgaaaatgctatatatgatttatgcttgacccatgacacctgctgtcactggatccagagtgagcaagggaaaggaagtggaggtaggcggggacagcaccagccctggctggccagacctgaggcccacagacctggtccccacaaccaggattcctacaatgtacacattcctaattcaggctcaactctcctttacccaaaagtaaatgcctcaggactcaatctgaatcactgtctgtctcagcttctttcacatccacgctgaatttgtactcctggtcacatcccatgtaagcgtcactcatgaagtacagagtgtagttgtgggcaccagtggctggggccacaaagtccaacttcacctagaaagagcaggcagaaatcaagatgagcatggacacaggaagcattctcacccttcccccatgccagaacaaatgctagggccagtggacacactcaccttggccttctgctgcaaggtcagcctcttgatggagatgaggctattggacttggcatctccaatcaccacccaccagccctcttcacgtttctgcagtgatccaaaaccaagaatttcagcatgtaaaacttgatgaccataggcaaccatgaaaatggtacagttacaaaagagagaacaaaaatcagatagctttccaaagtttcttcccgaaatacaattagatttaacattttaatactatcaaaagttgtctcaaacagacttaattttttaagtagatgaattcatttgttggttctggctcatttccttgtgccaaggtaccttctcccacttagtacctgccactaagtccaaggtactactattagaggtctagtctttggggcctaggagctttgagttccttagagatacttttaagtacaaggcaaatctgccagatgagaaaaagcttaggctgggcgcggtggctcacgcctgtaatcccagcactttgggaggccgaggcgggtggatcacgaggccaggagatcgagaccatactggctaacatggtgaaactccgtctctaccaaaaatacaaaaaagaaattagccgggcatggtggcgggtgcctgtagtcccagctactcgggaggctgaggcaggaggatggcgtgattccgggaggcggagcttgcagtgagccgagatcgcgccactgcagtccagcctgggcgacagagcgagactccgtctcaaaaaaaaagaaaaagcttaacacagagctgaatgtgcacagagatatccacagcaggccttgcagccctgtctacgggctgccccgctgtcacaaagacgaagagtcccagttaaaagcagtctttactcagagccttgaaacaattagtttacagaattaaacatgacagtatctggtttctgctatcaaccttcaattattctcccatataaagagaaccagaatttctttctggtggtaaaaaaccaagcacccagaagcacagtaagtggcagtgagaaaaaagaagaaacaaccaggaaagcccaagtgtcctgcagccatcggagttaaagacaaatgcatcttaaagagtcagagagatggacaatactacacaactgacgggtttaacaatgaccagtcatctaaatttttttttttttttttttttgagatgaagtctcacactcgcctgggctggtgtgcagtggggcaatctcggctcgctgcagcctccgcctcctgggttcacaccattctcctgactcaacctcctgagtagctgggactacaggtgcccaccaccacgcacagctaatttttgtatttttagtagagacggggtttcactatgttggccaggctggtctcgaactcctgacctcgtgatccgcccgccttggcctcccaaagtgctgggattacaggcgtgagccactgcgcccggccctaaactgtttaagcagaaacaaacagaaaaaaaaccccatagcctcaagattaattctcacccttgtgagctgattatcagtctaaagtttccctccctcagggacagtgtgcccttgtaccaagcacctagccaatggatagggtgagttgacacctgaccaagccagctaccaggacgcacctgcgggaagagaggcgcaatgacagggcctgtgacttcctcctctcgctccagctgcaccagcaccacaactggcccgccactgcagggggagaggaggggcgcacgtcagtgatggggcagtgggctcagagcacactattatgctgtgcccaacaggcaccacctctggctcacctgcggatgctgtccttatctaccacctcataagatagttcgatattagggtagcggttacaaaagcgagccacatctgcaatctggctgtcagtcagctgaagcaacgcgttccgttcttcatcctccatctccatgatgtcgaaaacactctccactccctgcagtgagtattcagacgtcaggaaagagagaacacgggccaacagcaaatgacacaggcagcaaagagctactaattttacctcctacactatcaagtcatctagataaaacagctgcagaaagaacacagcccacagttggcaggctctctagcatctcaacagggagcaccttcggaggaaccataactaaaagtttaacttactgagactcacctcccgcaacccacgctcggtccacaacactgggctctcaggctcacccacctgaccctctaggctgacccggctcaccttgtctgtgcaacgtttgatatgctcagaggtgaagtgtggcagctgcttcaggtatgagtccttggaccacatggcttgggtgaccatctgggccagttccatagctgccagagcagggctgagccacccattgctggaaaggacatccacgcaggcctggatgagccggattgcctgaacaggaaaaggagtataaaagtgggcggagttggagctgagatgtttagagcaccactgacccctctgccccacacccacactctaccttactaaggatttcctccgtatctgactgcaactcagcactcagctgcatgcgagacaagtgagcctgcaggagcaggttggtcttgacgtgcggatcattgaacttagggttattcagcttgtgggggaccttctgagccaactacaaagtggaagaaaaatagctggtgatgaacaggtgaccctgcctgagaccagctcaggccaaagcaccacgtggcccaggctcacacagcccttcaacaccctgaggcatgtgggtggtaatgggatggagatgggtttgagggaggtatggagcgggaggacatatggcgggggtcgggggatgcgtatgggcgtgttggtggcagggatgccatgtgctctgggcacacaggccgagtttgttgttcccaggatgctctcctgaagtctgctgtcctcacctgcctcaggagattgtcttcatggtgccggatgggaatgttctcatactctgctgcattggagatgatctcgataagccctcgcaccttggtcttggcattgagggacatgctgaagagctctgacagaaaaaggaaatgtgagagaagctaaaaccaggcagagaaggagcagaactgcccgggctcccctgctgtcccctgcagtgtcatcccgctgacaaacacgggcgcacctctcatcccagtgggctcctgacccgtgtaaaaaggctcccacagacaggacacgggccatgccgggcctcaccaatggtggtgtagttgatgtaatagtaggcggcgatcatgcctaggttcagaggcgccacgtccatctcgtcctcgatgctgatgcacttggactgctccaggtcactcagggtctgctccaccagctctgacaagtggtccgacaagtgacgatgggagatgcctatggaggcgagaggtgagtggggagcctcaagaagatgcccagcaaagactgtgagaaccaccaaaggatcacgtgtgctcccaagcccactgaccctgcaagttgtagtaattggggttctgtgtcatgcggcggtacagaaaggtccaggtgaggtagtccacagcatcctgcttgttctcaatggtcttggtgacgatctcagcattgaagtggtcatgcatacagtggtccaggtgagattctactggcaatggctcatataagaacttcttgaagaaatcctgtgggttggagagggagaaggagtaataaagaattagtgacaacacggtcacagagggccaagggcaaatcaacagggcatggtccctgtgtgagacctaactaataccaaaatggaagaagccacacattt

SEQ ID NO: 98023 - DNA, 23629 bp, Homo sapiens
tggctgatttttctgtatatttaatagagaccaagttttgccatgttgcccaggctggtctcaaactcctgggctcaagcgatccacctgccccagcttcccaaagtgctggggattacaggcatgagccactgtgcctggccatctctatattatcatacacagtggtttcgctgccctaagaatcctctttgctctgtctgctcatctccccatccctgctaacccctggcaaccactgatctttctcccatccccagttgtgcttagttggaattatacagtatgtatccttttcagactggtttctttgagttagtaatatacatttaaatttcctccatgtctttccatggcttgataactcacttatttttagtaccgaataatattccattgtctgaatgtgtcacaatttatttatccgttcacctactgaaggacatcttgattgtttccaagctttggcacttttttttttttttttttttagcagagtctcactctatcactcaggctggagtgcagtagggcagtctcagctcactgcaaccgccgcctcctgggttcatgcgattctcctgcttcagcctcccgagtagctgggattacaagtgcatgacgccacatccagctaatttttttctatttttagtagagacgggctttcaccatgttggccaagcagtcttgaactcctgacctcaggtgatccacccacctctgcctcccaaagtgctaggattacaggcttgagccaccatgcctggccttggcaattatttaatttgtttttgaatgaaattcacaaatggccctataagtcagcaactttcaaactttttgatccctagtaagaaataaaaaaaattttttttgaggcagagtctcactctgtcacccaggctggagtgcagtggtgtgatctcagctcactgcatcctctgcctcctgggttcaaggtattctcatgcctcagcctcctgagtagctggaattataggcgtgcaccaccatgcgtggctaagttttgtactttttgaagacacagggttttgccatgttggccaggctggtctcaaactcctgtcctcaagtgattctcctccctaagtactgggattacaggtatgagccactgcatctggccaagaaatacattttgtatcttgtgtatacatagctcgaataatactttactatttctcttctattctttgctaatatactccatcaaaatgcatccactaatgggtcaagacccacggtttgaaaaatagccctcagtgaaaatggggtttgacactcttcctttccactttctcaaatctgtcacagctctaatcttttttctctgccttgggactgttgaatccatgatttttttttttttttttaaggggagattgagagacttggattttcttcaggatatactttctaaagtattttatcaagtgttaaacaatgtgtctatatttgacacacatggtctcactgttctttgtcccaggtgacaaaagggatgaaaagtctgattcctgggtagaggatgaagggatacccaagtttcatttttgcctgtgattccattctcagactgaaaaaaaaaatgtatctctcttggccacttcccctgggtctcctcctctgcctgcccttccaccaggcatgctgttaggtgaaaatgaggcagtgaattcctctaaaatctggaattgcagtttggtggcccgcacgctgatccctccccattccttctctcagtccaccctctgcttggttacactgggtcagacagcagcagttttggcagtaaagaggctgggttgagaaaaaagagtggggaggggctgccatggaagacagggggctacacaagggctgcagaggccagctccagagtttggccaagagtgaaaaagagcatctgagatatctggatcagatcctagagaaggtgcagaggttttacgtggatgggcacgggactgctttacggccaggaaaatggaaaaaggagggattgatggagaaagggggaagaggtgcagctattgaagaaagatcatcaaaagggtctgagtcatttctatcaaggggaacagaacctctccttgccttcctgctctcaattaccaatgtatattaaaggactattacatttcttgttatatatgacgtgtggggtggggagaatgaagaaactgtagagagaagggtccagaaagggggagatcattgggctaaactcaagaatgagtcaggaagcagctttggtaatggaagccaggactttggctccctccggggctcctggaaactgattccaggatgggctgagctatgggagtggtgagtgatgttaatgttaacacaggagtagaaacttccttagcccctggttttcccagtctccctccctaaaactccacaaacttacctcaacagccccagtcttaaaatttttcttgagttcataaatttttttccccaaagtagctataatcctaatgttccctttattcctcctgggctctctaatgggacttagcagggacttatgattcctgcttcatctccccaccccattccccaggcttgagatgtaggagtatgtgggtgaaagtaggtgaaacccgatgggccatgatcaggttcagactatgtttttgaatgccttcaatctggaactttgcttctgattcacagtttccctcctttggtaacattaatttattaaacagatatttaaggagtctactatttgtcaggcactgggaatagagtagaggcagcacagaaaaccttcttatccttttggagcttgcatgcaggataagattcaggttccccggttccgtcatcctgtagggatgctagaacttataacctcaaattaacttttttccaatttattttttctctctttcaataactttagtaacctcaaattaattttttttagatgtattattgctctgtcacccaggctggagtgcagtggtgtgatctcagctcactgtaacctctgcctccctggttcgagtgattctcccacctcagcctcccaagtagctgggactacaggcatgcgccaccacacctggctaagttttgtatttttagtagagatggggtttcactatgttggccaggctggtcttgaactcctgacctcaagtgatctgcctgcctcggcctcccaaaatgttgggattacaggcgtgagccaccatgcctggccttcaaattaacttttttcgtttgtttgtttgttttttgagacggagtcttgctctgtcgccaggctggagtgcagtggcacgatctcagctcactgcaacctcagcctcccgggttcaagcaattcccctgcctcagactcccaagtagctgggattacaggcacacgccaccacgcccggcgaattttttgtattttagtagagacggggtttcactgtgttggccaaaatggtctcgatctcccaacctcatgatccgcccacctcggcctcccaaagtgctgggattacaggcgtgagccaccgtacctggcccaaattaacttttaaaggagattcttccttcatgaaatcactagaactcaaggtgaggttttctcttaaatgtttacagcttatttatttatttatttatttatttatttatttatttatctagagatggagtcttggtctgtgccaggctggagtgcagtggtgcagtctcggctcactgcaacctctgcctcctgggttcaagcagttctcctgcctcatcctcctgagtagctgaaattacaggcgtgcgctgccacgcctggctaacttttttgtatttttagtagagacagcgtttctccatgttgaccaggctagtctcgaactcccgacctcaggtgatccgcccacttcagcctcccaaagtgctgggattacaggcgtgagccaccgtgcccagcatttacagctttacttattttttattttattttatttttttgagacagagtctctgtcgcccaggctggagtgcagtggcgcgatctcggctcactgcaagctccgcctcccgggttcacgccattctcctgcctcaacctctccgagtagctgggactacaggcgcctgccaccacgcccggctaattttttgtatttttagtagagacagggttttaccgtggtctcgatctcctgacctcgtgatccgcccgcctcggcctcccaaagtgctgggattacaagcgtgagccaccgcgcccggccatttacagctttattgacgtacaactgatatacgtcaatatgtctctccatgtaaaatgcatgtatttgaagtatacaatttgatgtgttttcatatgcatatacacccataaaaccattacacaatcgagataatgaacatatccatcacttccgaaagatccccgctttgtctctttttaataatcctccctaccttcctcatcctgcaactactgaaaattcttagaaatacaaactatagtaacttttgatctagaggactgaacagaacaacagcaaaaaagatctcaggacctgatgaagactcaggtgttggaagggagcagctggaatttagaactagttgagtctgagtttagcttgaagcgctcaccaatttgggtagcaaagcagcaaggaaagaacctgagtgttaggagagggtggcatcttccctagggacaaaaaccacaaagtaactgggcctagttccagttcaactggcaccttcaatctttggcctgggtagggtcttatgaggaggattatactgaaggcttaagctaaataaaaggatttttcctatttattaaagcccttttttggtgtgctgattataggtttaacatgtcttgtctctgctgctagactgtgaactcctgcaaggcttttatgtcctcagcacctaatgatccctgataagcactcaaatatttattgaacaaatatgcagccaactataaaatgctgtgagtttctcagtatgtagtgcgggtacatttcccttaagttggtattttctgggtcaggcgcggcggctcacgcctgtaatcccagcactttgggaggccaaggtgaggcgggcgcatcacgaggtcaggagtttgagaccagcctggccaatatggtgaaaccctgtctccactaaaaatacaaaattagccgggcgtggtgacgcaggcctgtaatctcagctattcgggaggctgaggtaggagaattgcttgaacccggggggcggaggttgcagtgagccaagtcgcgccactgcactccagcctgggtgacagagtgagacttggtccccccccaaaaaaataaaaaaataggtatttccatggatacagaaacagatttaatttggtgcctgcatgtgagtgatcagcttggttgggatggggcctctggagggtccaaggctttggaggaaggagagtgggtaggcagttcagagagggacagaaagatcccttttgtgggtaagaaaacccctctgttcatcttcagctacaccaaaggtatgggggctctggtggaggtattctgcacgtgtatctagggtagttactgttaggtacactttggattcagtaccccaggctttgccctagggagggacagttgtcatttcaaggaagactgctttatactgtcagatacctggttcacaccggcttagcagcagtgtgccaccaccccaatcccatacgtaagcgttgaggggtcacagaggtagtgagaatgatgggatccaaggatctcgtctctccagatccactcacaccaggagttaatctctccaacgtcgagctctgagtccctccctctctcgcccgagctccgccccccttccctcttggcggtcctggcgggcttcccctggagggggcggccccagcccgagcgctaggccgggcggagctccggcccgggcggagccgcggccgccgcgtccggctgctggaccgaacttctgccgtgcggacagcaggagcagcgccgagccccattcccccacctctccagctcgccctctgagcctcccgagccctctctccatttcccacaattgtgctggtaagtcccgctccccgcaccaaacttttttttgctgccgagtttgagtcctacgatcggaccacgagctgcactgtagttggtgtatgggggaggaggagagggtgaattactgaatgccgactccacggcttccctaagacggatcagcgctcgcccatttcccgagttggaagacctctcgattttagttgattaaacttatgcagagatggagatgagggtttgcgctccaacttcgctaccccctcccccatttctctgagctctagcagttcccgatactttccctccatctttcaagtatctttggctccctaaaagcttgtcccctcccaactctgccgtggcaaagcccccctccaccaggcacttcgggcccgcctcctccccgttgccctagggaccccgcgatcttgggggccatacactccctccggggctacgcgtcctgccaaccggccgcagacgtgtagctgctgggtcggctgtggagggaggggctcaggctggggcttgtccgaagccaggcgggcggggccgggaaggggaggtatagggggccggactgggcggagcaggcggcatttgcggccggcgccagggtggagagttgtgcgccggtccctgggcctgagctccggctccggctggggcgcctgcgatgtctcaagatggcggagctgggcgaattaaaggtaccggccccctccccccatccccatctggactcagcccggcggtacgccgtgtccgggaagcgaccgagactgggtgccggggctcgggtgggcgccgacgacgtggcaggcacgagctgctgaggatgggagagaagtagctgagagcgaggaaggggctgcggcggggctccgggggcggggctgcggggcagatgtaggggtggggccgaggggaattgcagctgttgggggctgaggcgcagggggcggggacgaggggtagaagtcggatttagtagtaggggcggttgttggggtagggccagggggaaaaggtgctgtagaggcactgggggcgagtcgatcaaggccaagagatgcaacagtagggggcacatgcagggatgggaccgcggggcagacgtaggggaggctccgggggaaaggcagctgagaggatagggtctttggggctactctcgggatccgagctttgggaaataccagtaggctgctgagatgcagggggcggggctgtgcgggccgatacctcgaggggtggggcagaagcatcctggaggctcagaggaaggtcctgccgtagtgaatcgcggtgtttgggaagaggcagaggcatgtgaaactatgggatagaaaggtgggaagttataggggaagctaatggagaaaaaaagacaggacagaggagataaggatggggagaaagaggagcaagtttctcatcacattccataaaaggggtccaagacaaagcctcctatgagaagaattgtgtagggctagcaagccctgcacatgacaggatctcctagagattcacagaagggagtcttctaaggagagcgctcccctcctgctacatagagtttggagggtgaccacatctgaggacatctcatagaacctcaaactaccgagttcatccgcctgcctcctggttttcttctgccctttgaaatgggagctatggtcctgggaaggctggaggtctagccactgggcccagctaccttcaggggatttgcgattctgtgccctgactcagaggcttttccttcatccacccagggtctctgtttagagctctgccctctcctcttccacccctataggggggcgctgtaagttgtagaggagtattaatttctctgtgtaggagagatgccagattatggttcctggcagatagagtaaacaggcaggatacttggactcagtgattcactgttaatctccccgacccaagttttggtcctgtttcccttccagaaaaataggactaagttgtggggagggggtggttatataaacgattccaagaaaggatctggggaagttatgagcattgaaccctgacctgaaaaccctggccacagaagcttcagaggcttgggggaaatagctgaggtgaattaaggtggttgggaggggtgggctgaagggcacaatcctccagccacctagcccctttcttcccstggggctgtctggcttgaatcctcttgtctctccctccttctccctgtctcctatcctgttcccaggaggctgggatgggtttgagagtctgagaaagggcaagagaggagataagcagcttaaagcagagtccagggatggaggcgggaggctgcatggactcggaggtgtgtctgagggtggcttgctgtctgccattccctgccccactctggctgcttccaggcctggggaaatagtgttgctcaagctcgggggtggtggtgatgatgctgacctgatggttgctaaagtgggactgagatgtccctttggataggtcgactacctggcagtaatccactagctgcgaagcatcatctttcccatcagtgctggagagaaaggcactgcccacctggtagctcagcccatgtcttggcagggcaggcctgtgcaagggaggatgctcaagcttctctgtttttctccacagcacatggtgatgagtttccgggtgtctgagctccaggtgcttcttggctttgctggccggaacaagagtggacggaagcacgagctcctggccaaggctctgcacctcctgaagtccagctgtgcccctagtgtccagatgaagatcaaagagctttaccgacgacgctttccccggaagaccctggggccctctgatctctcccttctctctttgcmccctggcacctctcctgtaggctcccctggtcctctagctcccattcccccaacgctgttggcccctggcaccctgctgggccccaagcgtgaggtggacatgcacccccctctgccccagcctgtgcaccctgatgtcaccatgaaaccattgcccttctatgaagtctatggggagctcatccggcccaccacccttggtatggctctttgtggtcccttagtcttctggactccctacctgttccccaaacatttcttaggctttagtcctatgggatcagtgacctgggatgggggcgatttctgtggctgcctgtgcatgggcttggaataactgcccctttgtatcctcagcatccacttctagccagcggtttgaggaagcgcactttacctttgccctcacaccccagcaagtgcagcagattcttacatccaggtacatctcttccagtcttcctgcctcatccctggtctctgctttctgaytttcttctcttctgccctgygctcttccctatccctcctcctatacctacttgtctcttgttcttctgtgtgtctcttctctatctcctggacatctgactttcagcctttctgtgcattcacccttgccctctgggggctacatgctgacatctcttcatctccctccctgttacagagaggttctgccaggagccaaatgtgattataccatacaggtgcagctaaggtgagttcatcctccctgcctatcctgggtacccactgggggtaggagtgaagtaggggtatgacagatacccttacgagatgtccctgctctgccactgcctactgcagccctgcgactcttgttggatgctgagggcttcaggcatctatgactgattttctggggttccctgtctctctgccagattcaagttaagaaatttcttcccactctttcttcctttctcatctcttaccaggttctgtctctgtgagaccagctgcccccaggaagattattttccccccaacctctttgtcaaggtcaatgggaaactgtgccccctgccggtaaatgctctccccttcttctgtcagtaatcccttaccgtttcagttcataaatattaactacaaacctattctgaaagagacatgcctagcacagtgcgtggcacatagtaggtgctcagtttactgactgaatcaatagaatctcgagagtattaagatagggctgaacaaaggttttgtgagaactcggaggaggacattagttcaacccgagatgtaagaaagacttcttttttgttttttttttttgagacagagtcactcgctctgtcactcaggctggagtgcaatggtgcaatctctgctcactgcaacctctgcctccctagttcaagcaattctcttgcctcagcctcccaagtagctgggattacaggtgcccaccaccctgcccggctaatttttgtatttttagtagagacggagttttaccatgttagctaggctggtctcgaactcctgacctcaggtgatccacccacctcggcttcctaaagtgctgggattacaggcatgagccagtacacccggccagaaagacttgaccccagagctgagagttagaaaaggtgaggcatccttattcctcctcctcagggactcagtgagttccttttttctcagtcaataaataagctctcctttctccccaggagtgaaccccacacataaccctagacagtgctccagttttgtgagccactgaatgggcctccatccccttggtcagtgagtgagcgagttggccttccctccagggattgaataacccgagacaagatatcttttgttcaaagagcagagccccttcccagagccacttctccactgaccaatccctcccttctccagggttaccttcccccaaccaagaatggggccgagcccaagaggcccagccgccccatcaacatcacacccctggctcgactctcagccactgttcccaacaccattgtggtcaattggtcatctgagttcggacgggtgagcacagctaaagcaggtgcctggaaaagcctgctgagggtgaaggggaaccatccagtgtcctgggttggggaagcattttcctctttatgagtctgtctctggtcctcatggaacaaaagtgggcagtggtggtatgagaagcagaggctaattgtctaccccctgcctccaagtagaattactccttgtctgtgtacctggtgaggcagttgactgcaggaacccttctacaaaaactcagagcaaagggtatccggaacccagaccactcgcgggcactgagtgagtaacatctttcctctcttccccacctgatctggattcaagtcttcctggccctccagccttcataattaaacccatacctcttttttgacaacttactccccttctcacatgaaccccaaccctccccctctacccctgaccagtcttccagtctttatagttgaagttggaccactcccaggcacccttgaatttccaatcatgtatctgctttgcacctcacagtccctaactccagccctgctagaatatgggctctccggactggaaagaatcttaggggtcctctaatctaaccctcacatgatgcttcaactcctccagatcatctctaacatagccagagtgtcacgctatgtttaagcatcttcagggatgggaaaatcccccacacccagccttcatcatccatatcccagaccacttccatgtgacgtcccactggcccccaaagacgctccacccagcagcctctcagccagagccatctgttcctggccttaccaactcctgggcttcctccagccttgctgaccccatggctctggcctcacttttgtttcagtcaaggagaaattgactgctgaccctgacagtgaggtggccactacaagtctccgggtgtcactcatgtgcccggtgggtaaaaggggagaagggaacagggtgggaagggagttgggtttagcctgtggactttgatgagggttcctagggatactggcgtgaagttttctgggatgaaatcagagtagggcctctgacaagagaacttgcttctcctcagctagggaagatgcgcctgactgtcccttgtcgtgccctcacctgcgcccacctgcagagcttcgatgctgccctttatctacagatgaatgagaagaagcctacatggacatgtcctgtgtgtgacaagaaggctccctatgaatctcttatcattgatgggtagggccattttgcttcctcttacctaggacatccactagaacctcttttcttggttatttctttttctttttcttttcttttttttttttttgagatggaatcttactctgttccccaggctggagtgcagtggcacaatcttggctcactgcaacctccacctcccgggttcaggcgatactcctgcctcagcctcctgagtagctgggattacaggcacccaccaccatgcctggctaatttttgtatttttagtaaagactgggtttcaccatgttggccaggctggtcttgaactcctgacctcaggtgatctgcccacttcagcctcctaaagtgctgggattacaggcatgagacaacatgcccagcctataatatttcttttttcttttagccaccacctccttcagggtttttaattcatatggcttacttcccctcacatgaactgcaattctcaccttatctatcccttttaccagtctgtgtgtgtgtgtgtgtatgtgcatgtgtgtggagggggagggcaacattaaggacttagtatatacaaggcatcttgctgagcactttgcatgagttatctcattgaatcctcacaataaccctatggactcggctcctacctgtaattccaacactggaaggctgagatgggaagatcatttgaggctaggagtttgagaccagcctgggcaacatagtagaccctctctctataaaaaattaaaaaaattagccaggcatgttataatagctcatgactgtagtcttagctgctcaggaggctgaggcaggaggatggcttgaacccaggagtttgaggctgcagtgagctatgattgcattactgcaccccagcctgggcaacagattgagaccctgtctcaaaaaaagaaataatcctatgattggctagtgacactcacccagaaaaaaaaaaagaaaaaaaaaaaccctatgagataggtagtatcattacacatgaggaaactgaggccgagagagattgagccttgctcaaggttatattgttaagtggcagagccagtgtactgaactgtcataatatatcacctataacaactacctgacttcccactgagcattgcaataaggttcttttcagggcctggatgttctaatcttttgatcttgctagtcttaacctctttttggaatctacattatggttcctgttcccagtgctcccccactttttgtttgtttgtttgtttttgagacagggtctcgttctgttgcccagactggagtatagtagcacaatcatagctcactgcagcctcgacctcctggcctcaagtgatcctcccaccttggcctcccaaagtgctaggattgcaggcatgagctaccatgcctggcccctagtgcctttatttatttatttttacacaagtgtttagaaagccaaagacccagtgccttttggagatggtttatggacttctgtgtctctgctccttttgttccttatactacacgtaagtgctcagattttttttttttttttttttgagacggtgtttcactctgtcacccaggctggagtggtatggcacagtctcgtgatctcagctcatgcaacctctgcctcctgggttcaagcaattctcctgcctcagcctcctgagtagctgggattacaggcatgtgccgccacatccggctaattttgtatttttggtagagatggggtttcaccatgttggccaggctggtctcgaactcctgacctcaggtgatccacccacctcagtctctgaaagtgtgattataggcgtgagccaccacgccggctttttttttttttttttttttgaggcagagccttgctctgtttcccagggtggagaacagtggtgtggtctaggctcactgcaacctctgcctcctgggttcaagcgattctcgtgcctcagcctcctaagtagctgggattataggcatgtgccaccacacctggctaatttttgtatttttagtagagatgaggtttcaccatgttggccaggctggtcttgaactcccagcctcaagtgattcacctgcctgtacctcccaaagtgctgggattaaaggcgtgagccactgcacccagcctcagattgtatttattttaaaacctattacttactttgcaaagctcttttacataccttgtgttatttgattccaacaactcagagcggtccagtaggatggataatgttcttattttacagatgaggaaactgagatacaggaaggtgagttacagaactctggctactgttctgctcatctcccagccccgtgaattttcatctctctcttcccccagtttatttatggagattcttagttcctgttcagattgtgatgagatccaattcatggaagatggatcctggtgcccaatgaaacccaagaaggaggcatctgaggtttgccccccgccagggtatgggctggatggtgagtgaccccctgttccccagctaagctaaatcttggatggcctcttctctgagacgtagtcttcttaatacccacaggcctccagtacagcccagtccaggggggagatccatcagagaataagaagaaggtcgaagttattgacttgacaatagaaagctcatcagatgaggaggatctgccccctaccaagaagcactgttctgtcacctcagctgccatcccggccctacctggaagcaaagggtatgagaaaataggctgagtctacagcaaaacggacaggggaagaagtcaggattgctttctgatcattggacaaagcctggggcaagagaaatgtggaggggacagagagggaacctggggacctgagctgggtgagggcatctgtggtttgctggctgcctcagctyctctctacccacagagtcctgacatctggccaccagccatcctcggtgctaaggagccctgctatgggcacgttgggtggggatttcctgtccagtctcccactacatgagtacccacctgccttcccactgggagccgacatccaaggtatgacatgggtcataagatggaccctgcactgccacaccctccccagagctacatcagaacccctgttccttctcaaagcctcctgcttctcctgcaaggggccacagtccacagtgctttgtcttttggtggtaaagggrtcagataggaggttaattttgatttttcttttcctgccaggtttagatttattttcatttcttcagacagagagtcaggtaagtggttctttcttcagaaggtctcagatctctgaagcttcctttctagacactgatggggcccctccctctcttatgatctctggggatgtaaatctgctttcccgtgagggcagtggggtgtaggtatcttattatctcctcagccccactggtagttcctgagattcctacttaggcctccttcctagatcccctgttacttttctgccctggcctactcacccctacccccgtgtgcacttagagcaccatgcctgctctaaccggacattccacacatttcagacgcccacaaagccaagaacctaacaagttggaggagctctctcaaggcagggaaaggggaagggtgtagggaagtaggggaaagagggagaggctctcctgcttctcaagagaataccttcggatccacaggggttgattgctctcatacggcatttctgagatgagtgactgggaggtggggaagtcrggattgagatcttaaactatgcccttgattcttcctagcactatggcccctctgtcatcacctcactagatgaacaggatgcccttggccacttcttccagtaccgagggaccccttctcactttctgggcccactggcccccacgctggggagctcccactgcagcgccactccggcgccccctcctggccgtgtcagcagcattgtggcccctgggggggccttgagggaggggcatggaggacccctgccctcaggtccctctttgactggctgtcggtcagacatcatttccctggactgagttccctggattatggaaacttcgctgtcccccaacactgagcaagtatgctgtggagtcccaaccccagctactctgatccctctgggggctctggccaagggccagacagaccttcacagatgcctacttttggcctcatctctgcctgacaaggccagcacccaaagggttaatatttaacctctttttaaggacactggggtctgtttctggaaatgttctttagatggtggcacattcctttgggtatgttaacctaggcagtgggaggcaaatgggatggtatgtgagctaggagaagggctgaaccctcagccttgactatgtctagagcctcttggggaaggggcacctctcttgaaccccaaatgctctctcttcttattacccaaacccatggctctatttcttcttcacatccattgtctcttcatgtctattccattcccttcggccaaacagacaggtggaaaaactgagacaggcagtttcagagatggacagagaactttattttggattgtggatgtggacttttttgtacataaataagaaaaaccaaaatactccaaagatgacttcccctgcctcctactccagtatgacagaggaggatgtaaggccttagccatgatctgcaggggtctgggagtcaggcccggcctattgcttgggtctctctcyatttatatatctaagttcacagtgtttcttattcccccctaagcttytagaggctcatggccctgtagttaggcctggctcattctgcaccttkccagggaggtggaaggaccctgtgccctccttcccaatcttytttttcaggctcgccaaggcctaggacctatgttgtaattttactttttatttctaaagttgtagtgaagctctcacccataataaaggttgtgaatgttctgtgagtgtcatggagatgggctagggaggggattttacacttcactttccagacccctggtttgggggaagagggtccatgttccattcttcctttgctggccctgggtccaggtaagctgcacttttacacggtgggggtgttctgtggaggaattccaagagaggttgtcctttcctgctttcccccgtgcctgtaaaaactagaccattccagcccagtactgtggagcyctccagtcctttttcacttttacctgcccagatgttgcagccagagcttgagggcaaacttggttccagtgctgactctctctttgtcctctgccatggttgggatcatccgcaggagggtggacatgtgcaggaccagaggtcgggctcttccatcctcctctagttccactgcactgcatggtgacaactcctgttggggctgtgccttgtagcttacaaagaacttacatatatgttaggtccccgaatcctcccaactaccacaggaggtgggtgggtgttgacctcatttgcagaaaggaaacaggttcaaggagggttaaatgacttgcccctgtgttagaactgacacttagaccttcaatgctagccagttagagcaagaatctttggggtttgatggtcagtgtcttagatttcatgtaccttcttaattatcagctgacccactctccttaaatctcccccacaacacaaaattccatcctgaggacaggatagacgctgaacttctcaacatgaatatgttggtgtattagaggctgagggagaagctcttacttacaggacagagggtggtaggtcctgggggagaagtccgggtgtctctgtcccatcctctgcggcagccactgcagcagctacatctggtgtcagccacataagggcgctcacctcatttgggtttggttggatccgggcctggggtcagacatggtgacccctcagtcattgcctctccctgggctgcctgttcgtgatcaaaacctacccgcaggtttcatggagaaaggcaggagcaaggggaaagggcattgcatattcttcgttatctctgactacccccgccacccccgcccagctcctaatcacagtcagaaccaggttgcttgggctcccctgagccctgtttccttccctcactgccagccctacctgcaactgctgctgtgattcctgggagatcacgagtagatacagaacaatgtgatggtatttgggtaaaccccagctcagcctaggagggtaggcagactaggaaaagaaaacagcaaaagtgagaactttccgtcactttttttttttttttaagatggagtttcgctcttgtcgcccaggctggcatgcaatggcgtgatcttggctcactgcaacctctgcctcctgggttcaagcaattctccagcctcagcctccagagtagctgggattacaggcgcctgccgccacgcccagctaaaatttttgtatttttagtagagacggggtttcgccatgttgtccaggctggtctcaaacttctgacctcaggtgatccgcccacctcagcctcccaaagtgttgggattacaggcgtgagccaccgcacccggccctttgtgtcactttttgagactttgttaatacagctttagggtgaaacaaaatggtggccaaaagctgagggcgtggatggtacagatgacacagcagggacatgggtgagggttatggatttggggattccagcccacttatgtgctattgtttcccttgtagccaaggcaggtaggggctgatctatggaggagcttctcccagctacttgtctcacctcccataaacccagagggacccaagagaactggccctggggcaggtgtagtccactctcctcccaaagttctcgaagccctccgtccagcagctgggagtcagagaagacacatcagaggggccagtgcctgactcttccaagtccttttgcttgcctctccctcagcccacacccaagatggtcccaggcatgggtctcttggctcaggttggatcagctgactggttacctcctcctcaagttccacgtgcccacctgcaacaacagtggggccagtaggtgaatggtggtggtcttggccagggagcccccactcactgttgacactcctctcccctccagtggacacagagggagttgcagtcccttgtgactatgaacatgccacattttggggcccactttatccttctgagactgggaaaaacattgttgcggggaaagggcaaatttcttctctgtacttggggccttgtccccagaatactcacccgggggtacccagaggttgggggaaacgctcagggtgcgtgcccttcgggttagcaagacagtcttgtcgctggactgcagaatgacggccacacccaggtccacacctcgatctgtgggcagctcagccccagggaccctgggccgctcctccagggccgcaaaagggcagaaagggggtcgctggcagaaggaagccagctgggttaaggcttcagaagggcggcactgggtgggcgtgacttccaaaaatggggctacaccgcgcgttgggggcggggtcctcgccgccagttcccacccgatttcagtccccatctttggcccttcactgcccccgctctggggcccccttctgccgacctggagcggaagcctagcggaggcgcctgggaagggcctgctcgagaggacaagccgtcctcgcttcaagctgcagtgaatgggccacgtcccgagccctggtccggctcccaggaggccacacacactccgtgcgaagctcaccgactccggacgccgggacaggagcagctgcacccgcacctcggccataacgcgactctggagtcgctgcggcccgcctggcgccctctggtggcctagagaagcttcccctcggaacgttccgcggggtcgtagcggggtttccgaaagtccccggggaaataagggcacatcttttgaggatgacccatgggtataatattaaaccacaaagaagaatacctctaaatgctcagctcctattccttcctatcttctctgtttaggacaatgacccccagaccgaatgacttcaggacccacatgttacttccaaccagccctaagctgaactgtaagcatcctctacagcactatgcacacctgttacagcaggcatcacttcgaattaattatctccaagcgaaacacaccaaataacattttcgataccacttctcctttcacttcactcaaatggcaaccaagtatgcagatgctatctccttaaacttcctcaaacccatgttctctccagccttcattcattgccctagtttaagccttcctcgtattttgcctgaaatattattgcaagtctccaaatagtcttgcccctaccagttcattctctacagtgctgccagagtgatgttttgttttgagagtctcactctacagcccagacaggagtgcactggtgtgatcccagctcactgcaacctccatctcccaggttgaagcgattctcgtgctttagcttccgaagtagtagctgggattacagggcgcccaccaccacgcgcggcctttttttttttttgagacggagtctcgctctgtcacccaggctggagtgcagtggcgccatctcagctcactgcaacctccacctccctggttcaagcgcttctcccgtctcagcctcctgagtagctgtgattacagatgtgcactacccacacctggctaatttttaaatttttttgtaacgatgaaatctcactgttgcccaggctgttcttgaactcctggcttcaactgatcctcccagtgtgttgggattacaggatttaggcaccatcaaaattatcttctagctgttttgaaatgtacagtaaattaataactatgccaccctgatctatccaacaccagtcttacttcttcaaactgtattatctgtgcccactaatcaacctctcttcatcctccccatccttcctagcctctggtaactaccaatctattctttattttcttgagatccacttttttagctcctatgtgagacagaacatgcaatatttgtttctgtgcttggtttattttacttaacataatgacctccaattccatccatgttgctgccaatgacaggatttcattcattcttatggctgaataatacattttctttagcctttcatctattgatgggcacttaggttgattccatgttttggctatcgtgaatactgctgcaataaacatgggagtgcaggtatctttttgatacattgatttctttccttttggagatatatatatacccagtagtggaactgctggagcatagttctgtttttagttttttgaggaacctctgtagtcttccacagtggctgtaccaatttacattcccaacagtgtaccaggcagggctctcctttttccacatcctcactagcattcattctttcttcttgataaaagtaatgaattggggtgagatgttatctcattgattttgatttccatttctctgattagtgatgttgaacattttttgatgtatctgtcggccatttgtgtatcttctttcgaaaactacctattaagatcttttggccatttttaagttggattgttctttttgctattgtttgagctccttatatattctggttacgaatcccttgttaagatagtttgcaaataaagcatcctcatctttcaaactatacattgtcactctctgtgttcccttccctgcctgacccttttccctttctggcctctctgtacatagtgtttactcttctactgtagcacccctaatacttcctggtacttatgtacttatttgtctcctcctactagactgtatgctcaaaatttattaatctttatatccccaaggcttaccccagtacttagcacaaaacaggtgcttagtaaatgatggtgactggcttgagggcagagatggtgtcttatttatctatccttgtatgttgtgtttagtatggtggctggcaattgtttgacactcaagtgtttaaacaattagaaaacacattggtgagagaaaactgaagatattataaaacatctaactgctttaaatgaattaaagctgctgggacaaattatatccgtgatactgagagagagaatttagcgttgccagttttaaggaaccatggagaagaggaaggcgctaatttactgtgtgcttaccatatgccaggcattgagctagctgttctacatacacagtttcagatgtgttagaagcctggagctggcaaatgtggcttcagtccacagattctagtgtgactgcttgggacaatccacctgctaaccctgaaaataattttttcttctactctgtgatagtctttcacattccctacactgtgtgtgttaaaaattacagttcatcagcctgggcaacacagggaggccctgtctctacaaaaaaataaataaataaataaaaaatagctgggtatgtgtggtgcatgcctgtagtcccagctactccagaggctgaggtggaaggactgcttgagctcaggaggtcaaggctgtagggagctgtgattgcgctattacaccccagcctgagtgacagagtgagatcctgtctcaacaacaacaaatcatctatctatctatctatctatctatctatctatctatcacctatctcaacaaaataaagaacaggcatagacatctgaaaataaaattaacttcttaggaagtttcctattgccagggatataggtaaccataggtgtgggtaacttctttatgggaacagatgcatctgatagatgattaaccttgttgatttaaggttcttcccactgccaagatttgatgaggggagactacagcaatggatctaaatatgccaaattctttcaggtgtatcctgggctgcaggggatagagaggggggtttagttgaagactctgcgacttatcccactgcaaataatgcatccaggcacctcctttattttgctttccatccccccagatcttctgaggaagatgcttcttctggatcactgtctcttcatggtgcactcaatgtaagactccagcaggaagatggtttcgtccacctggatctcactggcatccaacctgagtgaaaagtaaaggcatttgcctagactgaatgttcattagcatatttaagattagaggttagggtgggtgtggccatggataactgcttggttacccttgagagtggatggaaagaaagcaggagaaccagtagatcattttgctatttaccgagcatctttatgtgcc

SEQ ID NO: 98024 - DNA, 195020 bp, Homo sapiens
taccttccgggttcactcatagactaggcctagggttaaaatgataattagtatgatgccagtgcacctggccctaagactatactttgaatagcaggactcagaccacagtagcccgaagacatctatgcagctattatagagactaacaactgctgcatttgattcagcagactcagttttccctctttgggtttgggagacatgaattcttatcagtcaataggccagctctcttagcatcttcccatggagcaaatgattcccattcccatgctcataaaagctgattttacttaggtcactgcttatccaccagcgtgggtttccttagaaggaaggacacattgtctaataatagcagtgccttatatttacacatggtttataattaaccaaatgtcaactcatatcagcctcacaatgacctttggaggtagaacaaagcagatgtattataaacccatttgcaagtgctacatgacagaagcaagcacagtgctttctttcagagttggagtgatcaggcaaagctttaagaagaaagtaccatggagtctgaagatcaagaatgggtaaggtttttagatgaagggtgggaaataacattccaagaagagaggatggattcaaacacactgtagatatgtattgagctactactactctaaagcccaatgaaatcagcaggagtaaagatgttctaactttattctgtgggaagtagatgccattaaaaatttttaattcagggactaatgtaatcaagtttaccatgaaagcatttgagtttgatgtaggcaagactggtgaagatgagtccagccaggggggctattgaagaggaagaagtaaaaaatgatgaaggcacaaattgaggcaataacagtggaagggacaaaaatatttaaggacttcattccttttttttttttttattatactttaagttttagggtacatgtgcacattgtgcaggttagttacatatgtatacatgtgccatgctggtgcgctgcacccactaactcgtcatctagcattaagtatatctcccgatgctatccctcccccctccccccaccccacaacagtccccagagtgtgatattccccttcctgtgtccatgtgatctcattgttcagttcccacctatgagtgagaatatgcggtgtttggttttttgttcttgcgatagtttactgagaatgatgatttccaatttcatccatgtccctacaaaggacatgaactcatcattttttatggctgcatagtattccatggtgtatatgtgccacattttcttaatccagaaggacttcattcctaattggatgtagagtgtaacagagagaacactgacagttgaagccataaaaaaaaaataataagcttttatatctcaaggcccataaacaagtgcatgccctttgacctagttgggcctcacctggtgttttagacaaaggaaattaattcccaaaggcaacttttttttctacacttcccataagtatgtttattacagcattatttataagagtaaaaatttgggaacaatctaaatgttcataatatagaatgattacataaattattgtgcaaaaagattataatgataagattacattaaaaaattgaaggatacttttaaaaagatataaatagatatatttcctggatgggaagaattaatgccctaacaatatcaatttttctcaaattaatatataaatgtaatgtaatgccaaaaaaagattttgaattgaacaaattgaccctaaaattttatgaaaaaataaatatagtggacttatcaagacaatttcaaaaggaaagtgacagtgtgctttgcactaacaggtattgtactgtttttacagttacagtaaacaaaagtctatatttttggcatataaataggcatctcaaagaaacagagtagtgtcccgaattcatataaatatatatcaaaatgtaacacatgatatgtgacactagaaatcagtggagaaattatgaatttttctataaggggtaaaattaaaaataaaattcaggagaaaattaactgtctaccttatgtaatagttaaagatctattaaaaaaaaaacaatttaacagagttaattgcaaagaagcaatacaaaaaacccaaaagctgtaacagaaaataattgacagatttgagtacatgaaaattaaaaacttttgtgcaatgaaacagtccataaacaatatcaaaggaagcctgacaggcacaaatgtttgctatacattgaacaaagtgttagtatgtttaataataaaagagatgccaaaaattaattttaaaaaatatggaggccaggcacggtggctcacgcctgtaatcccagcactttgggaggctgaggttggtggatcatgaggtcaggagattgagaccatcctggctaacacggtgaaaccccgtctctactaaaaatacaaaaaattagccgggtgtggtggcaggcgcctgtagtcccagctactcaggaggctgaggcaggagaatagcgtgaacctgggaggcagagcttgcagtgagccgagattgcaccactgcactccagcctgggcaacagtgcaagattccatctgagaaaaaaaatatatatatatacgggccaggtgtggtggctcacaactgtaatcccagcactttgggaggccgaggtgggcgaatcaggaggtcaggagttcaagaccagccaggccaacatgtgaaaccctgtctctattaaaaacagaaagaaatgctggtcgtggtggtgggcacctgtaatcccagctgctcaggaggctgaggcaggaaaattgcttgaacctggaaagtggagattgcagtgaaccgagatcatgccactgcactccagcccaggtgacagtgcaagactccatctcaaaagaaaaacaggcataagattgaacagccacaacataagagaaaaagtcaaaatataataagcacatgaactcaaccttgaaggcaatcagaacactgtgaattagaacaacaatgagctatcatattttgcttatcagactagcaagataagattgataaagtccagtgctagcaaaaatgtgagtaaacatccttggtaagagtggacactgaaacatttgtggataaaaattggaggtatatatgaaaatttaaaatgttcctaccctgtggctcagtaatctcatttctagggctttctccaacaacatatttggagagcaatttggtagctatcaaaattttaatgttcattctctttgagccaaccaagtcatttattttttattttatttatttatttatttatctatttatttttttgagacacagtctcaatctgttgcccatgctggagtgccatggcactatctcggctccctgcaacctctgcctcccaggttcaagcgatcctctggcctcagcctccctagcagctgggactacaggcgtgcaccaccactcctggctaatttttgtatttttagtagagagagggtttcaccatgttgggcaagctggtgtggaactcctgacctcaggtgatctgcctgccttggccttccaaagtgttgggattacaggcagacgcgagccaacctgcctgccaatcaggccattctaagtatctatcctaaagtccatgcaaagacaatcctagcagcacttcttaaaataaaaagctggaattactaaagacctaacaatggaagaatggtagaatatattacaaactatgtaaccattaaaaaaaaatggagtaaatctatacatagttacctggaatatgtgatttcattaagtttaaaaaagaaaagtcacagaaattattgcattttgaatttttaaaatatttgcatgtgcatacagagacatgactatatacacatgtaaaaaaggaggcaaccaccaatacgtcaatggtggttacctctgagacaggattagatgaaggaaggaggatgtgtgatttggaagtactatattttactgtatagataaagatgtagatttctttttaacagtgctaggatttggggtagttttttaatctttggatatttttagcagttttctattttttttctaaagaaagaaacatagttctcccacatatggacatgccattcttctgaggatgcttaagttgaccccaggaggagccctagctgctgttccccattagaggccccttttcagcaggaagtagccagaaagagtccttgcccaaaaccccctaacagcagttagtgtgatatcgccacagggaggaatgtggcatgagttatcaagaaattattttaggcagatagagagtaaaaggggtccttgggaagttttcattttttaaagtatctccagaaaagtttcttgtaaaaccccggcttttagagccaggcgggcaacctttgatatgcaaacctaggccattagaaactgggttcacccaaacatgccgattccagggaccttcttgcccttgccccacatgttcctggcaacatggccgcccccacatatccctatttgtgtagaacatcatggcgccccgcatttgcatattaaaaggctagagtgggagggccagctctttcatgggctacgtgaattacgtgcctagtcaaaccaatcccctgagccctaggcaaatcaaacaccgcctcctccagcctctgcttatatacctggctggtatccgcagcaagtggggacttactcttttggctttggagcgcccccctccctctgtctctgtacagggaagcttcttctttcttccttctccctttccttcttgacccttcttgcctattaacctctccactccttaaaaccaaaaaaaaaaaaaaaaaaaaagaaatgtggttctcaaagaagacaaatgaagtagcaatgataaaactccttccctatttgagaaggaggagagagaaaaggagccacggcagaaaccaacagaggaatgccacagacagaggggaggctcccgccagaggatggcagaggcctggaagccaaggcgtgagaacttcaagaggaggaagtgaaccgaagcccagtgctgcagagaggcctggagggccctcccagagagcagccagtgagtggtagtgatgaaagccaggtgcaaagaattcaagggagccattttccaccctgcctgtgcatttttgtaaaaacagagaagtcagagccccattctaaacctcctgcattagaagctctgcaagtgacacccagacacagtacattttaaacactcaggtgattcttgttcacagccaaggttgagaaccagtgagttaaggcactgagagggaagtaagtaaggaaagctggtgtgcgtaagtcattctttcactaagattggcaggtaaagaaatgagtgaattaaactgtaaagccatcaaaagggtcaaagaagatgtagaagttgtaggttgagataaagaagcctatggggcagaaaagattaaatatgcaagaaaggtagaggaaaggggaaggaaagaaaggaacttgatgtttctagactttgttagatggcacacattttacatatgccatcaccattattattcatttgactggatttttgaggcacatgctactgtgtccaatttacagtgagaaaccaagaatagcaaggacctaacccagtgccagtgctgggctcttcctctgcatcaggctgagaagcaaggtcttggaggaagtaaacggatatggagtccaggactcaggtagggagtcagcttgcaaaggacgaacacgtccgctaagacagagatgcagaaatgaactagaggaggacatcagtaaagaagctgtgaagctggagcacatcagtgcatagagagaaggagatagtcaaagaaccactgtggggcagaaaaggaaaatatagtggctcactgcggatttcatcatctcaggaaagctggggcaaggtaactcactgacaatgagtacccgtggctttgtgacagtgcctgtgtgctacacaacagagcagaaagccagccctgcccttcttaccagtgaggtatggattagccacgcaacgaccagtctgtaagccaggagtacagacgagccaagctgcctgcagctgagtgggaaccacaaggaggaaaagccaagtccctgccttctaagagctgacagtctggagttacccagagtgatcttctatttcactaactgttaaaatagtctgattagaacaactattgtagaattgagtgaccctttgctttgcaaaggtcatatagaaatattctgccactgaggatctcatgtcgcccagtggttctgaaaataaatagaagttgcgtaccttcatggacacccatgaatgaaagtaaatataccctaatcatcacaggaagcatgtgcggtctgcacgtgaaagatgcatctcccatcagctaacagaaccaggtggagtctatgttttaataaggacgtgttattgatcgggaagtattaggttattatgcctaggtagttgcttctgggattccagtccaaaaggatcaccaaagcatcatgggattttcaatggcttcctgtggcttggcaaatgctcactgctaactgtgatttcccagttatccagagtagcagtcaaatcaaaggggaaagcctcatgtttcaataacttaaaacaaaacaaaaaaaaaaacggccaggcgcagtggctcacgcctgtaatcccagcacttcaggaggccaaggtgggtggatcatgaggtcaggaaatcaagaccatcctggctaacagggtgaaacctcatctctactaaaaatacaaaaaactagccggacatggtggcacgcgcctgtagtcccacctactcgggaggctgaagcaggacaattgcttgaatccaggaggcagaggttccagtgagccgagatggggtcactgcaatccagcctgagcgacagagcgagactctgtctcaaaaaaacaaacaaaaacaaacaaaaaaaaaaactcagtaaccttggtttaaagtatttccttggtggccctctgggttgtgtaacaatcggatgcattaattattatggcatcaaatgacaccagcaacatacatagtcagaaataactatttgattcaggcaggtgctattatttgtttcagcactgttaaatgtggggtttttgtttttgcaagagaaaaggcggttgtgtgtggtttcaagaagaagaaaagtcagaacaacatgcagcccattagaaaagataaattctttatttgtggaaaacaacagaagtggggctatttaggcaccgccaatgtttattatattcatatggcagagaataaacacagcacactagaagtttgcgctttgggtattaaaaaaaaaaaaaagcaaaaccttcttaggtcactgactatcttcttttgctcctttctatctgactcctcaggcaaggtgcaattcaaatccctggagaacctctcaaatatagctgctgttcaatgttactcagaaataaggaaagaaatttgacacggagacactccacatcttggctgcctggaaaaatatcatctttgaggtcattcaactcactaagtcatttttattattgttttgtctgtctattttctggtacagtctcaatgaaagatatgtggccctaatcatgcaaaaccgatctggggggaatcagttgtttcttcaggtcttcgcaggattccagctcccccaactacctccgtcgccttctaaaactggcaggctctggacgttttgcatgctgaagaaaatcactgttttgcctccagcaaggaacataaatgttgcaacactgactcctcctctcatgaagaaagagtgaacaagtgcaccgagttgagcttcttctcacagagccaccgggctggggaccggggagcggaggctgaaatccccagacgccggttttctgggctgggctttctgccttactcactccttctccctctttctggattttaccgaccgttcgcgaaacagctttccacacaatggagcttcatgtcctcgtgcaggaagtactcatcgactgatgtggcagactttgctccctggcaaaagtgagtacccatggcgagctgaggccgcctccgacggcgcgcggcaggggctgcgcgggcggccgctctccgggatgcgggttcgaggcccgcgtgctgaaggggagagcggggccaccggcgcgggctcctggagagaacgccagccaggagccagagtcggcagccggcggggaagcccgggatccgcccgcctcccgcccggatgtcccttctcagaggggctaaaaaatactcttaaggtgctttgcctccaccactgcccccaaccccagcttttacaaactgcactcggctcgcattcgcctttgtcaaaggcatcttcacctgtatccttgagcatgagtttcggcgttgattgtgggattctcagaatgcaaattatttgcgtcaaaataaaaagaaaagaaaaaaagagcggggagggggaaggggcgcagacaggtgatgtgatgaaagccggactcgagactctcccatcagcagcagccgccgccgcagcagcctcgcgggcatccggcggggaaagtttagggttagcaatgctgacctgaaaggtgttgctcctcccaaaagtcagcgggggtaggggcagatgagcagcctccgggccagaagccggagctggacggaggcacctaggcagaggaattgcagcccgggaggaagctggaaggagagcccgctggagaagggaggagggaagggaagaggagttggttaaagtcaggcaaactcaggtaactggagggccggcccgagtgctacggcaggggaaggcaagggctggagttctggctctttgagtagaaaactatccttttagtgacctctacctgtatcctggggaagcaacccacactgccctgaaaacaagcaacgtaggggattctatgactggacttgaaaatggttgcaaaacattattattagtctggagggatcactttgtcttcatttgtcaagttgaccgggcaagatttcccacctgaaatcgtgcttcacttgaccagggaagtgctgctaatcccaatcctgaccatcagctgtgcaaacttgggcaagawacttaccctctctgggcttcgattttttttctgcaaagtttagggaattaattaattatatatatatwttatagaaatatatatwatatatatataaatgtttaatgaggtggaagtgctgaatagtgcaagagaggagcagatgaaaatattaatttcagtggttcttaaaaattaggggtgataggtccttttgagaattagctgtgagtcctcttcctggggsaaaatgcatatggcatgtacataaaattttacatgcaatccctgagggtttgtggatactccctgaaagccatgcctgaatcccaggtgacaatcccttattcctcctcctgtatcaagaccacccagccaactccttgctgctggttgggctgactgtgggagtaatccacagccttcttgggggtctggagtcagccacgctgctgaaggagacagctcccctgtcatgggtgagctccccacatgctctctccagagctctaccagcctctgactccaggggacccctcctcacaaccctttttaatgactctcctaaggygacagtccttacccctagaattttcagtcccaccaaccctggagagccatctaaagaggatcgctgtctgaatcagagtgctcttcaggtcacctagctggatggcagggaggccaaggctttgtttggaaatgaagcagtctttgctccctgaggcatagtatgagtaggcagccatattcttttgaacctctgtactttgcctttagaggactaaggactcacatctctggggaccctgggtgttccactagcagtgccagcaaggcacatcagaaaacacacagggctttggagctcaacagactgggcttcagatcttgactcccacactgagcaagcctctgagttttcctgagcttcacttttcctgtcagcacaatgaaaataatgctgctttttttttttttttttttttgcatggttgttgggagaatggaaatactatgaatcatgcctagcccatagtcaatgataaactttttcttaatattaatgtggcaccataaataagtgttcaatagtctcatgcttttaagaacagcttactctctctctcctatggggcttacattagtagaagaatgagtaaaattagttctggtctagttatgcacaaaaaggagtggtggcctcagaatacagagtcagactggctgttcgaattgtgcagtgtcaaggagagcactatgtattgccggcaartaaagtatgtccagaccggcgtggatacttgacctgtctctcagttctcttttgacccataatcttgagtacaaaacagctagtgctgtgcctgcagctaaaaacagccaggcatggaaagaagtgttgtggctgggtccatcttcagaaactgtagagagaaatatctccattgtcatctttcacagtttggcacagatgtagccaactcagcatgtactctctctccatggggtcctggtgcctccattgcaagtggtcagatgatgtagcaatgaaagaaggaaacatcggaaacttaaaaggaaattggatatccacagagtagccaaagatctatcagtatactttggtgaggtattcctgcatgcaaagatagcaatattcatgcctactatttactgagcctttaagatgtgctaagcactttcacacattgcctcaattaattctcatagcaagattgcagagtatgagttatcatttaaagctttaccagtaaagaaactgaaacatggaaatgtacatacaccccccaaccccacaccccacatccgcctagctcaggaaaggcagaaccaggatccaagcccaggtctgtctgactttggcacccactctttttccactacccagtgctcccaagctccccaatatcaggcacttgcatcagccaaccggattaagattcttctaaaaggcaggaatagccaaatctagtgggtgcttttaagtggtgtgaacatgtgcttggcttgtgatacatattaacgggtagcaacaacaagatcacctatgggaggataatattcctgacccttcccaagcccagccattagactcaagattggcaatatccaacattagcaggtgaggctggcgctctgtcactgacttccttggtaatccttttagttaaacagagctctggaatgttcattctctaccacctttagaatcagaacaccacttacctttacctccctgtgctgagcacgttttcattcatttattcgacaagcatttgctgagctctgttttgtgctgggcacttgatgacacagtggggaatgagacacacaggatcccagcccttgtggagcttctatgccagagagagtgacagaaaacagtcgggtgaacaaatacataaataaaatcatttcagatactgataaatgctatgaagaaaatagaggctgaaggctacagagggacagggcgtgggagcaactttcaacagggaagtcagagaagactgccatacaaaggatacccttgaacttaaacccgcattttcaaaaagggagccagccctgtgaaagtctagggaaagggctaccttagcagaactctcaagagaaagttcttaaattggagtaaatgaagcagtaaagcttaaagtctgaagatgggccctttagaagttgacttgtatatagggggaattattatttgaatgcctactatactattctaagctgtgctgtatactctgtttatcttcccaatgatctggtgagttagctatttttgtttttattttacagttgaagaaaccaagagtcatcaaggttaaggagctagtccaaggttatggagctagtccaaggttatgaagctggtatttgaatcccttagtctatttcactccaaagcccacaactacttgctaacacagcatgtgggctttgagataatgtcttttggagaaagtaaggaagccgatagaaggagaatatcaaaagtaaattaagtagctgaatgctgacaacgatttgtatttgatgtcccaaattccagttagtgcacctacaactgaactgtccaatacagtagccactagccacatgtgcctattgagcacttgaaatgtggctatttcatattgagatgtactgtaaatgtacaacgcaccccagatttttaagacctagtattcccccaaaaaagtaaactgtcttggccaggtgtggtggctcatgcctgtaatccaagcactttaggaggccraggcgggtggattgcctgagctcaggaattcgagaccagcctggggaacacggtgaaaccccgtctctattaaaaatgcaaaaattaggcaggcatggtggtgggtgcctgcaatcccagctacttgggaggctgaggcaggaaagtctcttgaacccgggaggcggaggttgcagtgagccaagattgcgccattgcactccagcctgggtgaaagagtgagactccgtctcaaacaaaaacaaaaacaaaagtaaactgtctcaatttttatattgattgtgtgttgaaatgataatattttaggtatactagtttaaataaaatatattaaaattaatttaacctttttcctttaatgtggcttaatagaaatgtttaaattacatatgtgactcacatgatatttccgttgaayagcactgatctagactaataagttgacaaatacatgataggacctttttcccccttcttccaaaygtgacttcttcctctgttcttgtgtcaggctccttctcatctgcccccatattcagttatttggtgaagcacgagagaaaagaggtccctcttccttctcccccaccctcatgctgctggttagcaggtgatcatttgaagtccactataccatgtcactttgggatctgataaaatagactcagtgattatattcatcaccaagaccaatcctctcactcaggtaaatctcaagaggctttcaaacgtcctacaatgaaagggtcattttaaatctggatttaaagttttacctttaaatcacttcctagtacattgtctttgtagttttgggcactttgtaaaatcagacgaggagacaactagagcttcatgtttttgtgcaaagctcattaaataagtaayctcatgcagtaataaatgtttctccctgtcctcttgcttaaaacagcatgaacaaaaagtagtcccagttgccagaagggctactccaggggcatcacaaaagaccacctttggtttctttcttttgtccactagctaaagtggccctcaaatatgtcaatgaaataaagatatattttttttcctgcagtttcatttatttcaaaaaaaagagcagtcagattctggtattgctggagaaagcctctgaagagcaaagacctggattctgcttttgtgtactctactggtttgcatgttaccctctctctccctttttttcccccaactttctcccttacttcctgtagtaagtttggtgttgatgagataatgccacaaaaaatgctaatggtgaaatgtgctgtacaaattggccatggttatgattgataacctgaatacaaatggcatctctagacatgtgcctgcagggaggagttgcctttatgtagctggagcaaaacattatgtaagattctcttggaataacatttgttcatttccacttgaaatccaaatctgggggaaatggcagtaaagaagctgacaagaatgaatcttagtgtatctgtcactggtagactgagttctttctctagtctgtataggttccagagagagaacacccaattgaaaaaggacaagctggttttattcactggccagaaatggaaaatgagagacctcttgctctaaaaagtcaccttctccctagctgtgggaagctgcaggattgtgatgagttagatgtggggcggggagctatgtaaacacatgcagggagaaagtacagaggcacagacacagataaacatgtttctccatgcgtcctatggagagaaaatggcggcagttttcttctagggrtggggagcccagcattgtaacgctatgttaatgacctaaacggaacaaggggtagccagttctggtttgcactggtttcctgcaggcctcttgtatttggcaaaggatcaccaagctcctgcgacatcccaggccatctggagttctttaagcaagagtatctatagataaagaaactagggaagataacaatttaagaaaataatgagctttcccagctatttctctagggctgccctggtaatatttctacatcaacagcaacacatatttttcagcattgtgtaagccaggaaatctatgctagactccacggggaaaatagaagaataaaacatggttcttgctctggaggagcatagttcctagttgggaaggtggacagaaacataaaagaccrgtagcatgtaaagaacattttctaagtgttacataaatgatgcaaacaaagttttgcaattctggagggcagcatgcccataacctctaaggtatattaagaaagacaaagtagaaaatgggcattgagggctggaagcctaaagacacaaggagagaaggagagagccacctcacataagaaaaaatgcacagtggtgtggcagtggaaatgtacatgggttcgggggtgsgtgatgtggaaaagaacagttggcttaatccagtggctccagatctgagctttacatcagaatcacctgagaagcttttaaaaattacaaatgcctcagccccactccagagcttccatttaattagtttaagactggggactggtctcagtggtgtttctgattgattttgttttgtttttgtttctgtctcaatttcccagaatattctaatgtgaagtcagagttgagaatcactgagcaaaaaccaagatttttatatcatartcatgggacataaaatgaaagaagtaatcttttaaaggagattaaatggacaaccaagagtgtgacctttaatttgtagaaactgtatatacatgcacatttgtatgtagtcttttaaattcacagataattcctcgtggtgattctgtctacttggatgatgtggctgaaagcctttgtaaccagctgcctactcttgtcctctgtgtactttgggggtgtcctatagtggatcctagctaagtggggcacaatgggcatctcacaggagcttgtttctaccaggctttttgtaatcattgccaagggctttattatcatgcctaatagtgcccacagtagctattttataagcatctgcaatcttccctcacctctccaactttacaaattgagaaatggagtttaattacttgccttgggccaggagactagctggtgatgaaggtgaaatgagaattctcagggaggtgaaattagaatttccagctactgaattccacataccttattaaactcccarwgkgagtctacccactctcctgttggtgttagaatgttatttcttacatgaatgaatcagtgtcacagatcagtaggtgaagatgactggtttccctaagctgccaacactgtgattatctgagtgtcartgacccataggcagtcacagtggtcccgagagccccgtccctgatgcctgggagctctcagtctagtgaagtttggccttgcatatttatagtttatccactctaacatctgggaagtgaagactctggttgctattccactgctcctagccccacactttacggctgttctgatttcccttctctgaagctcttgttcactgaaaggatatcagctttttgctacacccctgaaaaaaagaggagaaagcccagcattttaaacagctgcttttttttttcttttggatggagtcttgctctgtctccaggctggagtgcagtggcgcgatctcggctcaccgcaacctctgcctcccgggttcaagctagtctcctgcctcagcctcccgagtagctgggactacaggcacgcgccaccaagcccggctaatttttgtatttttagtagagatggggtttcaccatgttggccaggatggtctcgatctcttgacctcctgatctgcccgccttggcctcccaaagtgctgggattacaggcatgagccattgcacccggccaacagctacattttaaagaatcctttatatgtgttgggagcttctgggttcactgcccacggtgagactagggstggggacggargttcttctgaaggacagtgcggggaaaaagccagagtcttggcaatacagcctctttagacaaaaagataggtcaatttgtaccattcccaaatggttgggttttctttyctctgtctcaaaatccattactgatttaaaacaatttccaaaagctttagcaatagcaaaaagcaagcctcttaaacagtgttgctccacactgattgcacgtgagaatcacctagggagctttagaaacaactatagactcactgaatcaatattctgggaaggggcctggacattcgtatttatttacagttctccaggtttataatgtgcatccagggctaagagctactactggtcagctatgatccaaatcttaattacttatttgtatttcttcttttgccttgttttagagtctcatggcccagaaaaccatcaaactatatttttgttgagtagcaatttcatcattctgttctttaaaaaacatgattttgagcataatttaagtttgctacttctatagagagacctcacactcagtagcctcatcactaaaattttctgtgtgcaatttagaaatcasattgccagaagcttsctaattaattatgagactgaaagataaaggttaagctttcctgccacctatatattagatttcccaattgctatgttaatctttagttaaccaagacttgctttcttgtctcagccattttaaagccaattaactctgttcctgttcacacccttattaaaaatataattacagcagtagtctccagggactgtcattgggtaggcyttaccaaggtaaattagccaagaaataactaggctgtgtaacaccctctcagaccctggaaatcattttggttgcagaagctacttagtatcagagtaggctggggtactcataaatttggatttggaaaaagccaattccaagtcatcctaaatgtggaagaatctgtgatttygagaatgattctggaatcagttatccagggtccagccaartctgatacaccgatcctcagaaggttgtatyaataacaaaaagaaaccaggtttttgtattagatttgatggaagaggctgggggacagaaggtgatgtagcattttgttttctggggtgctgagattgtgggattaggagaaaataagaaaaaagatygcaggggagaacgatggacagaggcctcctgttagtcaactatcatgggcatcagaatttctttattcactcaactaatgtttatggaggttctgctttgttccaaggacccattataggagctggagatagaaggatgaagttcctactctagtgtagtttagattccagtaagaggaaacagatatccacactaaaaacaaacaataaataaaacccaataaattagtcagtactatgaaaaaaatgcaatgaactgaagggaatagagtttgctgaaggctgctttcaatagcttgtacaagttgcactgtctgaggaggtgcccttcaagctagcacatcartactaaaaagaaaagcatgccgagagctggcagaaagaaggcttcaggcagaaagaacaacagcaaaagtcctaagactggaaaaggtctgagttgttcaggaaacagaaaggarmccattgtggctggacccgaggtaagaagcaatgagggaaaggtgggaaaagagcaaggagggcccgaggtcatgggatggagttaggctgttaagtgctttgagagcctaacatcctaactcattgggaggttttcagcagggtaggaacatggttggcattgcctttgagagctcttcccagcttctgtgtggagaatggcttgaagactgaaagcagagggtttgtaggaggctgatcggaagtacaagcaagaggggagggtggatcatgccaaggtgacagcaagcaaggtggaagaggtgttggattcaggatggaatttggaggtatggccagcatggctttcagatggaggggaccagcgaaagtgctggaaaacctagtcctgctcaagatgattgttcctgccctacccttgttttagaccccttgttttgaactaaaacagaataatatctagtgctatttaaaaacattaggaattttaaccttaacttgtttaagcagaacaaaacaaatccctgcctggggagaaacttctgtttgctgcttttgcctcttaaccataaaaatttcatcctgtctcgtaagactattctgatggcttttgttgtttttgattactgtgcttttcgtaagtgctggaaaggtcacattcgcattactagtttatctcttttctgagtgttttgacactttggctgtgtttaccaaggccttcctgctgtcagacatttacatggggctttctacagttgatcagtttctccatataagtgctaatataatcgcaagcatttagtgggcactgactgtatgcaaggccttgttttaagaatttcatgttttaactcatttagtccttccagccaccctttataataaaaagtgtgtactcttattatcattttatagatgaggaaactgaggcaaaaaaagaggttaagtcatatgcccaagatcatacagctggtaagtagtaaagccaggttttgaactgaatccatctgtacagctctgggttcctagtaactatgttgtgccacttttctatgtaattgaagctgccaccttcagaagtagacttgtttctcctgcaaaaaccccaaggtaccactaggagacactaaaactgggccgggcttccgggagttggactggtggggagatggcataatctagaggctgaatgatccaacccccctccaggaaggcctcacatctaaaccacctgccatctgccaaggtgggaggataaaccaccccccaccccgccgccaacagggcactggctggtgaaagttgccaataccagaggagtcttgatgaaatgccctctcttttcctcaaactctttctgcctactattcatagtwtctgtgttgtacccacccacctgccacttatcaawgactgaagaaaccaaagttattcaacaagccatgaagcaaattctaattgctccccacggccatctgaggctggcctttggaaacttaaaaaaaaaaaattaaaaaaagagagtcatattaatttatttgttaccacattatttgctttaaaattctggtggcttctttccagtgttttattagtagaagcgaaataagcctaggaaacacaatatttcattctgtcttctctgcttttcactgcatatctaccttcaaaaatgtcttctctcaagttacttggtttctcaataactagcgtgaaagtaacagaccttccttccttcctaatgatartaacaacaagggatttacagaattgaagtttatataaggaaatgcattaagattttaacttaagtaagtgaactattcagcaatggctataaagacagtaattgtgatgatttgtcttctatattatatgtttaaactagttatatattttaattatataagatgcaatttttttgctccagtttccatagggtaattttcaacagagattaacatgcgttcattggaagtgttgaatttacctaatcaaatcatcaatttgtttattcaactttaattttcaaaaaaatgttattttaaaatattatatgatatgtgtcaggtatttcttacggttgacttccaaatttaaaactgcaaagaaaacagaaatccatacatatagttgcagtaaactatactcaattttggaagattgcagtggcaacatcagtgaattaaagtttgaaagctatttcaaatctttgcatattctccaaataactcagaatcctacaaaaagctaaatatttaaaaaaatttatcttcaaaccaataatgtaagtttcttctttattgggatgattttggttaaatatttagcagaaagtaagggtgaatatatatttgatataggtatgtcctaagctaaaatcaagtcatttaaagatcagagcaattaatggcagttatgtgatcacaggaatcagtctatctcctccctcagggtttgattcaatgagttttatttttctcttagcaacttttcttattttacttttcaaaggacatcattgaaaccataatagtgttcatatctgtgacttttaaatttttatttatttttatgcatggtttaaaattcatttagttcatttaaaattcaaagatataaaagagcattcataaaaatgtccccctctcctgtcctccagcctttacaaaaatataccatatatattaatatgggctaaatacccttttaaagttatctcacacgcaagatgctatgactgtgtgaagccggagcctacagactattgctgatcccccagtagtagtagcagtgactctttagtggccctggagcttcctttctaaactcaagtgtatatttaatgtggctatttagggatgaacagcagtattttcagagaaaagtataraagaacagatgaaatcacacaagatgcacacatctgggtattggtgggcatgtactttcagcagtgagtttacaaataatctagacagagttaagtatcaggtttaagagtcctaggatctaagcctgcaygggttcagtcttctgcaggaacttgggaatgttggggttcacttaggcccccagtgttggcatgtacacccacttkcaggaggctggaggtataagttcctctctgcatttgtctcaggtcatcacaggcctcagaagtttctcaacagaaaaggattgcatgggttggatgtccagaaggatacgtggagttaaacatcagtcagtggagctagaggcttgctaagacttgggaagaggatgagggaaggcaaaacctgtcacctaaaggggaattctagaatgtacttactacactcatgacattaccctaccaccttcatttatcaccttgtgtcaaacatagacttcttggtcaagaccactatgctgtaagctacctgagggcaggactatgacttattctcctttgtttaccctgccccagtgcctaacagtgtctttggaattggaatgttcaataagtgggttaaacttttgaaactgaatatttcaaataatcacagataacagatggttaaaaaccaagtccttctcagcctaactagtgccaaaccaaatcattgtccatgtctcctaaagaaatgaaagttttctaattacctatataggtctggactcaaaactataaggcagcacactgtctttggtgttgacctatgtcccaggttgtccatggtcatcacacactaatgaccacttgtatgtatttcatctagaggatcacacagagtggtatgctaggcccaaggaataagtttacctgcttatttcacttctccactgtcatcctactgtgtttcaggaagaatttcttttacctctgcttactctactaagatgccccacataagcccccaactccttttcttgtccccctcccactttgttgtctattttcttctgtcagaccccttcctcctccaaactgaaccttcctgagaatataccaaagaactcaataaaccattcagcccactatagttcaataaatgagcactttgcattttaatagtggttcaacctcaagtctctgttggtggaaatgtcactgtgatctaggtgagggaaacattttgagagcctgtgggaacctccaatagcaccttatagtagcttcttctggtgcctgtgtaatactacaatttccagaagccttgttgatatccagctaagtgaaaagaaagtcctcagttccagagttcttacttctatttcttttttttttcttttcccttttgtttttttttgagacagagtctttttctgtcacccaggctgcagtgcagtggcgcaatctcggctcactgcaacctctgcctcctgcgttcaagcgattctcttgcctcagcctcctgagtagctggaacagatgtgcgtcaccaagcccagctaatttttttttttttttttttttttttagtagagacaggatttcaccatgttgaccaagctggtctcgaactcctgcctatccacctgcctcagcctcccaaagtgctgcaattacaggcatgcgccaccgtgcccggcccttacttctatttctaaatagcaatggattccactcttccaaggacccagaacttgccctaggggtgagggtcttttgtacatcttgcaactgagaacttttgctagaatcagacagacaacatagatctcagctctaattttccaggagtgaagctgtggagcaagtgagttacctctctgtctcactttttcatctgtacaatgaggctactaaaacatacattccagggttgctgggagaaaaagacaagacaaggtatgtacaacacttggcaccaaggaagcacacaattcatgggagtaattactatcatcctcaccaagagttcatgatttactgggggacaccaacacatgtacagtcaacagggtaaaatgctaagggtgtggggcaagtgttgagtctgagctcagtagaaatttatgagcctcaaaggccctaaaacatccttgaccactcagttctatttcacacccttcttgtacttcaccaacaaaccagcaacatgcttctggttggcagcccttataaaagaatttaccttctatagtcaagtccaaagctcttaactgcttaccacatgacagccaataagacaagatattggggcaaggaagatgactttttttcagggagccagcaatcctagaagatggcagactgatgtactaaagaaccatcttaagttgatagattgttaggctccttttatgttaggggaagggggaataggtagggggttaaggtccacagktgactggtgaccacaggcatctgggcatcagcagggatctaggaggttgcaaaacttctttgttcatggtcaactattttccagattgaccttgtttctataaatttttaagatggcattgttatttgtgtgcatactttctaatctcctcaggggtctgtttcaaaagagagatggtcattagttctgaagttaaactataatctaaattctttccatcattagcttggcctatgtataggaatgagcaaaggcagttagcctgtgaggttagaagcaagatggagtcagctatgtgatatttctcccactgttacacatctctgaatacaagaggaatacatttcttctttttgctgtgtttgcttcaagcctgtaccactgagaaattgggtgatccagggaagttttacttctcttgaacctcaggctctatctttgtaacaatggagaaatcaatgcctgcattctaggcccttttgagggtggaggaagacaatggttgagaaacttctcatctatagttgatcctcaatgcgtttgccccttttcctgtggcactgctttgtatttggatggttcgagcagtgcgtcacacatggaggaaaggcaatggaatgatgacaaatagtttgttgatttggtgctttgtacattcacccacaaatggcacagtttcagggccactgtccttgccaaatactatctgaagagctaggttatgagcctttggaacccagatctgataagcatggaggaaaactcctcaagggagatgaagctaggagattagcagaatatactttctccatttgtcccacatttgatgccagcaggcaaaccagagccagctgggcagtgtacaattcccagaaataaggaaagggtagaagcacctgtttttcctctagcaaaaccaaggcaaatggaaaagctcagaaatatatcagcaccattagcaagaggcacaacggggaaggctggaaatgtgctgaggaaaatcacattgccggtcaacgcatagctacctgctggagaagagagtctgcagacacacctcagcctggacaaaggcctccaggaccgggagctgtgctctgcaggaactgggccccaggcactgaggactgaaaaccagcccaacaaagcatacytgtttccatttgtgagagatgaaatgatatgggttttgtgactcactaaaccacttggaaggccaaacaattacaaaagcaagatgcctggcttcttctagccacatggaggggccctcagacttgagtagctgtgtgccacttgtctggggtggctgcaccaaaaggaacagtgaggtttagatgcttgttattgttcattgttcagttttggttctgtctatttacttctaattcctcaaatattattgtgattagtggtatagaaaggaaacgttcatttgtgagcaaagtgtgtaataagaatttaataatgaaattcccagaaaaaaaaactcagatagctaaagaaacagcagtaacatgagctccaaatatcttgagttgtattgttaaggtgagaatccataatgtaaagggaataatgtaaagggaatgctttgaaatcaaaggcataatccaagtgtgataacctaaaaggttgtggatttcttttaaagtagaaattacatgtggctttgggaaatcatcagctgaagcataagctatgcttatggattctcgctgtgttgtcactaagaccgattatataaagacttggcaaatccatgtacaaatgtaaaacttcccacaatggtatttcatggggatctccttttacaaagtggtcgttgatcaggacatttttcactgatatattcctttggaagcaatgaattttagataggatatgattattgtacaatgtgataggtagctctgattattcaagcagctagggcattattcagtggcaaagcattaagctactctggaatctttcttctgtgtaagcaggcagctgctgttgagactttctctttgtgggtgaatttgcccaaccaatggcaagcattcattgggagtaggggaatgacgctgatcactgttaatgacagttgaaaatgaaatgctttaatgaatctcatacttggacttggctgctgagccagagccctgtacttgaagagcttaattatgatgcctcaaaatttagatcttgaccctgaactgctatgacttcctcccaccctcagttttgagagaaactttaaattcgctaggggattcaatgttttacatgcttggttatgcaaaatgggaacagtagtgtccaaacaatggaataggcttctatattattattttcatttaggcagtataactgacatgattaccaaagtcatgttatagtacatgtatacaaattaatttcataccrggggacttcactggggggaaaaaagggaagtccctatttgtgaaaactatgattttggtttctttctgagtaaagcactgctaatctctttggtgtacaggaaagtatggtattatgttctaaaaatcagaagccccagaccttaatttcaactaatctgatgacatcattttgtactcagagtttcatttcccaacaatttcatgtttcttagtaggtggggaacccagaattgaaaggcatcaaaaacagctaaatataaccaaaaacctgctaactcaccagctttctaaaattcaggaagtatctttaacttgattgctgaatctccaaagacatgatgatcagatgactggttaatgggtattttttcagactctacatgattatcagaaatggctgccctggccaattgtatacctaygaagaggtattatgtagaagaacttatattcatcyacttaatgtggacctcaaatattaaggatgttcctaatrtgttctagaccggagtcagcaatacttttcataaagagccagatagtaaatatttctaggctttttgggccatatagcctctgtcacaattcctcaactctgctcttgtcacacaaaagcagccatagacaatgcataggtgaatgaatgtggctgtgtttcaataaaactagactctcttaatgccaagtatttgctggaataacacaaattaatttatcctcaaatctgtttaacctattaatatgtcagtcaatattacattaatattttatgaatctggtatcatattatacatgaatttatctgaacatttggttaattcatgaatatttactcaatattaatactacatcatgaatctgttatcaagtcatatacagatttcttaaaaaatttcccttatttagcrtacttgtgaataacatcaataagcaagtatcttaagttaactatcaggttatatagcagatcctctcccccttttgtaactctttctgttacaagggattttacattattatggtattgggaagtaagtctatttatcctgtccctatctgtcttcgtattaaccatattctgttatagcttttatctttgcagacagaatagttcaaatcttcatgatttgtccttaaacaacccccacttcctcatcctcttgaacattttatgcctccatcactgtctcttcaggtcttgtgagtccttgaagtgcagwgactaggctggaacatggtgttccaggttggtcacatcacctcttcctaatgatgccccattgtaccttttgactatagcaaggaataaacaaagtcagaagtgtgaaagtgggggagaaattgagaaagtgcaggggatttaggggagagaaaaatggactacaggaaaagaaaacattgacttttgcaaagtgctctaaactggctacaaatgcattccktaattctttaaaccttaattgtaaccgcagttaagctttccggtgtgttggaataagaacaaaactaaaatccttctttgtatagaaattatcctgcagtaacttagagccaatatctctagttaggatgagcgcagtggctcatgcctgtagtcccagcactttgggaggctgaggcaggtggattgcttgcacccaagtagtttgagaccagcctgggcaacatagcgaaatgctgtctctacaaaaaaattaaaaaattagacgagcatggtgtcacgcacctgttgtcctagctacttgggggcactgaggggagagaatcacttgaacctgtaaggtcaaggctgcagtgagtcataatcacgccactgcactccagcctggataacagagttagacctgtctcaaaaaaaaagaggaagagatctctggttagagtttgtctctgatggatactaaccatgcaagtagtttacacaaaccacattctttctgtagaatgagaaaatcttggatataatttagcataatgagctaaataactctagactgagcttcgctgcccagacaggactctacttgtgatctgggaagatctacccttgcaytgaattctctcctcttctctcctgactctgtgagaaaagtttgcatgaatttactgagattagttatagaaggaactgtgtgtcattgaaagtcttgtacagaagttcacattaaaatatatcatagtcatctttgggaatgattctgcaaaattcataaaacaaagatctctgaaaccctaaggcacactgtgctggaggctaagggaataatagtgagctgagtggtttctgcctacacagagcttctaatatattgaggaaagagatctcaatcaaattcaattgcatttataagtatggtaargacaacaaaggagagagacattattctgtaggagaataaccctgtcaaagtgatgactgatttaagatcaaaatgggaaggtaaaattttctcagtacctgcaaaggcactgaggtgggagggagcatgccaatgtagggaaatgaagaaacccagtgtgtatgagccaagctgaataaaacatgagaagaagctggagaatgagagagaccagtccccaagctctcaaggagcaagaggaagccttttcggcatttgaagtggagggatggcatgatctcgtgcgtagtttttaaaagaaccactcaggctactcttttgagaatattgtgggaggccagagtagatgcctatagacttatacagaggttaaggcagttgataagagtataaacaatgatggtagcttacctcacatgctttttagattataggctagaaggtggcccaagcccatataccatcatggcacagtgaatacgttttccttctggatcgtggaaatgaatattgtgccacacagcttgattgacactccccartgacttttaatactgtgggatctctggcacatacttcagaagatgagaaaggagttttaattaacctctgtttaggaattccatagacataattttcattaacatctacttggtatttcatctccatraattctttccagtgataaagctagttggtttatcctccaggactgctcagttctgaacagtgggtcttaagtactctttggatttctttgaaggctttttttwatttttgttgactacctctctactcattttgccccagaaaaaawgtagtcatttctttgataagtgaaatctaagaaaggcttatttcatttggtacattaaagagatggaagaaagtaactttacataagaatataaatgccagctgtccagcatattacagaatagatttctaaatttgctgaaaggttaggaaaatggattcttatrtaggcttaaaatttttataatttttttggcattctagaatgaaataaagaaaatcggtatcatcttgatctcatcacccagaagaaaaaaaaaacactgatacatggtgaaatattttcctctctcatttttaaaaagaatcaggaatagattgtatacatatttttcaaattctttctacttagtgttatatgatagtcaataatatatgtgtatgtaagtagcaataaatcattcctgaaaacttgttttttaagcttgtataacattccgtcatatggatgtactgattttgctaatttgttaagtttaaaataatattcattttcatttctttgactactaggtataattaattttttcatacactcactacccttcatacttcttttattgatttcctttttatgttaattattaagatttctatttgactctcaacattttcttaatttttttatcattaatagatgtaaaaaaattcttaatttttaaaaaataaacccttttcatcttaaagatagcaatctattttccataatacttgttataaatatttccccagtttgatgttggtcttttaattttgtttaaagtatttttgacaaataaataagtttttgtggcttgaagtttgttcatttttttcatttgtgattacagtttagttgttgattcaacacatccttattgagtgttttgtgttcagcactaagcgagacacaagaggtaagacagaaaaacaaggtgcaggtggttttgccacttagagattacaatttaatgaggggatagacaaacaaaaccaggtcattataaaatagtatactacaagctatgcaagaggaaatacaggtgggaagaagtacctgatctggacctgggggataagggaaggcttctggaaggaaacaaccttctagctgagaatgaaggaaaatggcaacatgaatttagagagaggaaacagtatgtgtgaaagtgttgttcagtgtcctaaatgttaaaggtcctctttccccagaacatggagtgtgtgtgtgtgtgtgtgtgtgtgtycgcgcgtgggtgtgtgaaggagcagggcagggtggtggtcaagtgtgagcaggaggccactggggaggctgcggcagtccgagagaaagacaatgatgttgggcagaggatgtgttgaataactcatcccttttcactggacaagcaatgcttcagtgtatattaagttcttattcatagcataccgtctattccagaataatctaattagttttattgctatatcaattcttgggccaacaccacactggttttgagtttaatgaaacgtctaaactggtaatgcatgcatcctctcatcacttttcattttcaaaattgatttacctattcttgccaatgcgtcctcccaagtaaactctaaaataatttcaaaagtcacaaaagcatacgtgtgtgtatatgcatgtgtgtaaatacatgtatatatgtgtatgtgtgtttcttccaaccatttttcagtttttggagaataagatgtttttattcaagttgctgtcagtaaatattttatattacatgacttctctatacacacacacacacacacacacacacacaatctcccattggtaatttgattgggaatgtgttaaatcaggagaacagacattctttttaatattgagtcagcccatcaagaagcattgaatgttttcccacttactcaattcttttatacttctttttaagcctttatagtcttactcatataggtcctgcatatttattgacggggtattcttttttcttttataattttagcttttaattatgaatggatttttcttccattatctcctctctggtattactggactacaggataaatattaatgatgtatatttactttttatctgattatttaactgattataattaattataagtgttcatagttaattataaaagtttataatcatggtgtctttaaataatgataattgttctccttccaaaaattgcatctaatttttatttggtgtcttacagcattgatcgtaacttctaatactaaataacaatgataatagtgagcgtcctgtcttaatatcaatttcaagaagaacacctcttacataacatttttaaaagtgtgttatgtggaagctaataaaataaacttgggaaatgcgacaaatgaaaattctctctcccaggcattcttaattcatattaacatattaagatgagatctgcaacaaagagatgagttcaactgagtttaacccagtatttctaaaatgtatttgactatggaagtatttttccctcatttagaattttacatcagttatgacagtcaaaattatattaatttgatcttctttctttttttagaaaaataattttcatactttcttgtcttttctgtttgatctctcttttgccatatggactatgatttgggtttacttttaatttttttcaataattgagaagctcgtcacccttctttttatttctacaagtggttacacttaaagtttccaagacatttctatccatatcttatacttagcaaagtcaaagacatgaccatacagttttctaatcaacttcaaaatgaaatgttatctttgaataaccccatcaaaagaaatttaatccatttttacttccttccaacctttcctcagtattggtaagaataatttaacattttttattcatgttactgtcagtaaatatttyatattatatgacttctcttttgtgaattatgtgatctgttcagcaacataatcctttacaatacattcctgagcagttctatggttatctgatttctgtgtccataactattgtctttttataccataaatttctcatttttttactttttaattttaatatcttaagattcgccaccttttatcccatttatccttttagggtgtataatgtaggtcatctacattttgagaagtgcctgattctgtttactatagtgtcagttttaccccttactgccttcagtggacaaattagtactattatttcatttctggctcctctacaaccccttttaatctaacccagcactcttttccttccttacttttatctcataatggctacctgtccttttccacagtattttctatttcagttgaagatgataaacagttttctgacattgacattaagatgatgtttcagttttcttgttagacaattttgttcactgtctaagctacttatttttcatgattactcgtctaggaataaaaatcaatctacttagacccaatatttttgaacactgagcatatgtaatgtgttcttaaacctgttcaatatgtactgggctctaaatgtcctggcctacagctggagggcagaatgacatgtcctagttcaatatcagcctctaacaggaatgctactgatgtagttttctgcactgagataggatcttcttttcttccattgcctattctcctggaggcaaaatagagaacataaaaagtcatcatctttggtatgttcttctttaggggctttttctttctcccagcccaacccccatagtccttacttgctagatgtgtgttccaggattcagttcaccactgcccagtcttctaacatccaatttcattgttttctgagagttgagaattttcatacagatatagaagggatgctgtgcttgtttgaaatggttctatttggcagaggatagccgaacagtttttaggcaaagaatgaactgtctacttactttctttgaagaagccaacaatttggttttgttgccaacagcaaataatatattggctaataattgtggtttacagtgacatgggtaatgttagtcataacatgtcttccaagtttctggctatggactaactgtaggtcttggagtttggtattatctagaattttccttctccctcctcccccacctcttatcttttagcatagttgaagattggaacttcttcccagaaatctagcatcttcataagtcctttccggttttaagatttttatcttatattttatatatatattacatatatttcctgtgaatcttggctgaatttctcatttaataaagtccaagttagtatgaataaataacatgtttcccgattttacacacatacagaaattcaaacacataatgaactctctggcagcctttagcatttgtaagtgctctctcaccaggaaaatcctttaatagataaccaagtgtcctggggaagaagggtgtcaggaaacttattatatttgtgtcactttcttcaaagggtgattaagtatatgtctccaaagatgtgatgttatcatctttgagtatcacttgaattcaagtcaatatttattgagaccccatgttgtatcaggtgccttactagaaagtcgacatatagagatgcataagacatgatctttttcagtgggtaatttaaggtctttcttctactgctagcattgtcatgtgtaaggctggtgggttgagtctttggaatttgtgaagattcttccaggttgtttaaaaaatcttttgattctcacaaatgtattttttctatttcttagaattatgttctttatggctaccaggaaatcctttgaaactggaattagattgcattattccactggggtaataggattggtaaggtaggagtgtctttgaagaataatgctaaataacccagacactaaggctgaawcttcagcacagctcttaaggcatcctgtaagtaccctctgctgcttattagaaatcccaaagccctgctcccttaggaaagyggcccatccccatcctcatcataagatgcaaggcatagctaaacatctcaacttctcacttgagtattatatactctcaggccaggatactttccaactcaagagtaagataacattacattctgatcttcttgtgtgtgtttttatgttttttttttcattttatttattatttttttttttgagacagaaattttactcttgtcacccaggctggaatacaacggcgcaacattctgatcttcttttgagagaaaagtttcacacaattagcctttgaaatacacattcctttaagtaccatgaaaacattgtcccatacaacaatatttctaagaaacacacatgtccctcccacaatgattttttcttgttaccaccaataaaaattagagctgtgttgtttttgttgttgggtttgtttttgtttttgttttttggtgactactgtgaccctcaaaaaatcaatccgactttctcgatcttgatttgcaacaccaaggttaccaaacaaagagaatggttcaatgagggaaagctcaactacctgccctaaatatttagtatagcaatgctgagcttttggtaatggctcaaaattctcatgctttcccactaaatgaaaaggggagctttgctactagtaaaccatattcaagaaataattcttattaatactttgcttctttcctatgaattattgctttgtaatggatgtttgacaagttactagcaaagcagtcttcgatgagcacagagacccatcagatctgtattaacacctccaaccactggagtttcattaagtaggtttctctacccctctccttcaggccacagataggaagaatgacattgggtccaaagttctggcacaaagaatgatgtctgccttcctgtgatgatttcaaattcagggtaataattccaactatctttccctggccatgatagaaagctcaagaaatcttggttccttgtctcttttcttccatccagttggtctttctaattacacactcaacacaatgttctgctgagcaagacatctgctgtagccactatcacccttggcataaccagatatttaaaggtacctaaaggagtttagcyatattttgccaagatcctaagttctatggcataagaatccatccacttctctaytgcctatagaaaaggacagctcagtctttctgaaagaattgttctcaaacaagaaagcatttgaggtaacatgtcaacaaggtggactggtaattggtgttcctttcagagccagttggaggaaatggccagctcagacattctcttctccccagtgtcctatgggaacaagatttacccagacacagctgactatgagaagtcttcagggatttacaacctgtctaagaacaaggccaatgggggrctcactttgcaacacgtccctatttgattgtcagaggacagatactctattaacaaaggaatttgcactggtattttcagggacacatcaagtaattgccacttgaacgtttttccaggctttcaaaggaatgtaagaatggcctaaggctaaattacattcatgtctttagtgagtcattatattactggcaataaagtatattattactttactttcagatgccctcacatatttttttaaagtagaaaggagacatattatggtcaccattcttaagagacttaactaaaagacactaatttaatcttttagttacttaaaaatagctgttgctcacccactatgtgccagkctstataccaggcaccaatatgaaaaggtgagtattctctggtctccctaagcacagtctagtggaggagacagacaaaatgcagccatggccagaagggggagcagttaatgaacaagtaggcagagagtagggaggggattctgagagacagtacggacggactgagggtaagttgtacatccctgatattttgggcaattgcaaatagtttgatgaccaaatcacaaggagaagaagtgacagcaagcatggctgaaaatgtaggttggtgtcaaattgtaaaaagccttgaatactgtgctgaacggtttgatccgtgaatcaggtagaggacttgactcaggtctcttgactcaaaggtcatgttttttctctgctagattgcacttatccttccaaatgctagtggacaccacactgaatttgatcaaagatctctcaatggaaatatgtaaatttcctgtaagaagcaattggtaggttctcttattatcatctccatctcacagataaggaaactgaagtataaagaacttgagtaacttgtccaaggtcacacagctagttaggtgatcccagacaatttggctccagagtcactagtcctaactacaacaatttagcctctctttatctagaggtctttatgcatttgtctgcattctacttacgttggtattggtgagtaaagattcccttccagaataggtttgataaattgccaagtctgaaactgaaaaattaatatccatgataacagaggttttggggtcaaggagtgaaaggaattcatcccatcctgtctctaaatacttttttctttaccaatttatgggaatttgagaccagatatmtggaaccaagcagcctcaccctattaagggaaagaaaaagaacagaagaaaagaggagaggagaagagaagagaagagaactaaaagtatctgcaaaaatattaaaggatttgaccgagatctctgagatgctccaaagattgcaattgtgcttactatccaagttaatggctgtaaatctaagagaattatgatgtgcctggtaaatattggttgttttgttttaagtcttcatggagaaaatggaaaagacattggcatgtaggatgaagtcacagcaggacagacaggtcctgcaagtgtttctttagatgcattgatattcataacatccaaacaggccttaaggctgtcttcttactttacacttaccaaaggggtaaaatatcattttccttggacacacaaataataaacgtactctcacaacatcacttgaatgttgtggttttgcaaatatactatgttttaaaagctatagccctcaaatcccttactagacatcaatatttgttggaatttcaacatcaaagatttattgtgaagggggagggggaggagttactccaaaggctagaaccagtgcatataccataataacaactctgcatgcattattgcttctaatcttcataattttgagtactatctttattgtcaccatttaatgaagatgttaaggttctgggggcttaagtgacttgcccaaagttacacagcttggtagaaacagaatttaccacagaacttgtgtgttaagccaaataattttctagttccatacaactaaaaattggaaggaaaaagtagagccttatgaatagagtcctgagcaagaaggatgaacaatctgcagatgaagtactctgtaaaggaaagatctgggtttgaattctaaccctgcctccgttcatctgtgtgatcttcgcaaagtctgttaactctttaaactgttggatatttataaaatgggactggtgctatttggcctgatatcttacaggggaagattcagtcaggccaggcgtatgtagggtctctctgacctggaaagccctatataaagacatggtaccattcttagtgttaggactgaaactacatccctagtgtcctgacacctcataccaatacmcagaaaccctaggctcttccttcaatcccatactccttcctcagctgccaggacagcttggttaagaaaagccttgttcttggggagyatatccatgaaagtatctctatttcgttgcagtttcacattaagtaaaattagagtgcccttcacgaagaatatatawttgaaagccctcccactgactgctggacaaagcacttgtcagtcaacaaaccaggtagattgagtctgccctcagagtttttgtattctgagagtgactagcaactttctctcatcctagagcaacagggctttcagaggacaggttctggggcagcrtgtagccacgatagaattggtttgcttttgtgtccaaagtcatgattatcaggagagctgccatttatcaaccacctctttgatacttggtgtataggacaggcgtgttaactatattatttctaaaccacaagataagtctgtgaagtatttttatccctggtttacaaaggaagaaatgaggctctgcgagacatgccagaaagaacatgctctacacaaccarctggttacaatgtgcggctttgtccagcactacctcttctttcttggcaatcatcagagccactcaaggcttggaggactgtgctggcaaaaaagaaatcttgtattttctaaaactcacacccacactttggaggggacaagattgagatcaaccccatttcctactcttttctttatgacagtttatcagagcattttttccttatattcactcagtcctgagtttctatttagttgtgataatagatacatttttgaatttttaataccttsgggtgcaaatttggaatctatggaggataagggagtaacaaaatgttatggaaattgaaatatataaattattaattttccctctcctctacagatttacaatcactttatttggggatatcaagtaggttatgtggttactgtagtactcatttaataatcagattttatttagagaactataaaaggtacaacttaagggggaaatatattttagatgatgtttttttttcaatttccaatttttgaagaatgacgtgkttttaaaaacttttaaagaatttctcccacatttcactccctttaaggtaaattgatagctgtgaaaatggcaccttggaaacatttctgtcataatcataggagagagtgagaattattaatattctcagccatgtagcatcataaagtagatcacagctgtttctttcagaaaatgtcatttgattttcgatcagatgtatggtccatctcacaatctaacygcttccacatctggaatatcttaactgaaaatgtccacagcattacacggcctggctcagggggagaaaagaactagggcctgcatcgaattctgtctctcactcagctgatctgcattcctcctatagcatttccttataattaagaagagctcatagatttgggaactkcatgagcctctgtaaccttctggtgagggtgagaagctcagaactgcatttctatgcatttttccctagtctttcctgcttcggaggagaagccctgcaagagcttcctgccaagggaccctgctttctcagcagccggatccggagagccagaaatccatcttcagctcctttgaacttggctgttgttaatcatgctgtggttgtcctttaagagcaaaggcttcacggagagcagatcagctggctgtagggagggtttcagcttctcattgtaggcagatcatctgctaacagcttactgagagaaagttgaggacatgtggctgaaacactgtcagagctgctgtgaacacagtccaagtgagcaattttatgacccaaaccaagcagacactaagtgctttctagtggtggaaaaggagcagagagaaaaagaacaaagaccaagtggtggaaacaaaaaaaatatatatttctttcagcagctaacatatttttctgtttagaagattggtatctcctacttaaccacaaactacaacacataagatcaaataagattaaatgtccggtttgctaaatagcagagcgaagaaactaaggtcaagatttcagactcttacatctgaggaaagagagaggcaaagagaagatactggaaatgccaatatccagtcaatgaaataaacagaggctactgtaggcatccccagaagcttgccttttgtccagtgccatgggaaccacagaaggcactcagctttgcagcttcactcagaattggggcaatgctccayagagtcaagggcatgttattataaagtgctccatttgtttactttggcaagtggaagatgactttgctaagcgatactctgctggggctcagggccagcactgctggagtaggaaaagggagacttcctggggcaagscttctcaatcttcctgccagcagcattgcagtcggagcggcactgaggtgtcaacaaaaggatgatgaactgtgtcagcagtgttagcaaatggctgaagtagaacggagctgcccaggatgctgccctgtcgctggggaatctgagggaggctgaaagatattgtaaaagagattgaagggctggactggctggaggaatggtgccatcggcatccatgccacaatactccaggactgccctgcctttgtcaggacagccatcagaggcggttttccctctaaccaggatgggcatcactccttgggcttgccagtcttacctctcctcatgcaattgcatgtccaaggcatgccctcaggggatggtgctgatccagggtggcaaacccaagtggggagaaaatgctgaatctcatcctctcagagatctgctgcagtcagcgactatactgaggtgcatgatctgagcagcagtcgctggttggggaggcttctttgtggagtgggtctcagccacagcctgagggtcctctcttggggatgctaccagttaattgggtcatcttcagcctccacccaaacttaggcctgtaggtccatcaattactatatcagcctcaaggactgaacaggtgggaggaaggactagtgtgagtgatggaagcagctgagctgaggagtgctggcacctgtgcaaatccagcaagaatgacatctggctgagcttcagtcattcacctaagcaccaatcgggggtcactcccagatctgagcaatgagggaaacttcccagggggaaccccgcacttgggtagacctgggggagcagccagaaggaaaggggttgaacctgtagttgattaagattcagagaaagaaaaaacaaaaacagaaaacgatcatagtttcagacactcccaatgagcctgtgacctccccraaatcctatagccaaacacacgggtggatctggcctcactttcccattctcccacttgtgacttttgattccacatcatagctaaggtcctcggcaaattggattaaactttggatttaaaaataaaatagaattaaaataaaataaaaaagttggggacaggagaaagtggtttccaagaacctacacctctctaccctgaaatgactgaatattgtgttcccctcaaaattcatatgttgaaatcctaacccccaatataatggagcctttgggaggcttcatgaatgagattagtgcgcttacaaaagggtcccagagagctctctcacctttttccaccatgtgaggttacaacaggaagtcagcagtgtgcagtccagaaaagagccctaaccagaacctgaccatgctggcaacctgatctcagacttccagcctccagaactgtgagaaattaagttatgtggtttataagccactccgtctaaagcactttattatagcagcctgaactgattaagacactcctgagaacgattccttcggggaaggtcttgattagccttcacctagcccagtttgcaaacacactggagtgtcctgcccatggcaatgttcatgtagcagcctgggagacagaggagggggattcctgcaggagcaatcttcccaaggaggcagttcctactagctaactttcttgtcctgcttgtgctcattgaaggtccaaacctgtcccctgccctatgtttgttttcctcctaatcccctggctgatggagtcaggctttggagaattcctttaagagtcttagttggccttatggatcccaaaacacacccttctctattgatgccagattctgagcaggctgacagtgcatgcatgagaacctttcataaaataggactattttttattccctttgctttttctttgtgttatttyccctcttcactccctgtccttttaccttaccatatacatttgtcacctccttgcctggaaagcctagtgtcacctccctgccttttcacagcctataggattgagtccaaacttgccagcttggcctttcatggagtgcaggtttagtacaggactgctaaacacagtttcagaatgaaccattctcctggcctttatcattgccaatatttctctttattttattttattttattttatttagggagagccgatatttcataagagttgatggactgctttgcctggaaacttgagaattcatatttttattcaaaatcgttttcatttttttgcttagagcctgttaaagactgaggccctctctctgtcccttctactcccagccaaacccaatagacacatgtgagcaagttgtcacctgacccgaagctccagcccctggaaccaactgaaacaaaatgtatccttgcattttccagcaaggaattgccttgcctacaaaaatactctgtactttaatatgcagatcaattattaacagtaggctgtacctttcaccaggttgtaaaaggatgactgcgtagagccacagcattctccttgtcagtgtaggaaatgcagaggaggatgttacctccggcacttgcctctaagacacctaataaagatgaggaaggctccagcctgaagcgtgggtgaggtgtccagctgcccaaaggcgacaggtgagatactcaggtccccttcctctttttgctgtcagttctgattctctcctttcaatctttctcatctgtgattgggaatggcaggggtggggtgtgtttggggcatcagtggtggtaaaaatggtcttatgggcagggccatgttgaataagagatgagcatggagacagcgtattaacttaaaaggccaacaccgaggctcatttgagaccgtaggaattccagggagacagtgttgttcaggcatgggatcgaagatcaggagggcggctcaataacacgctggcccggtcacatgacagaccagtccttggagtgaactgggagacaaggaggctgctttggcatggagctgagaacatctctagatcgcactggaaggcagagagaggccagacagggaactctgaagagctgccacagcctgtgccagggtgacatcarggtgagttgagatgatttttttaacaaacttcatyttttgcagcagtcttaggcttacagaaaaattgaacagaaagtacagacagttcccacatacccgttttcccccacagagtttcttctattaataacatcttatgttcgtgtggtatgtttatcatgatgaaccgatgttgatatatcattattaactaacaagtccagagtttacattagggtttactttttgggtcgtatggttctatgagttttaacaaatgtrtaatgacctgtatctatcattacagtatcatacagaatagtttcacttccctaaaaatcaccctcccttccttcctgcaaatctctgacaactgctgatctttttactgtctctatacttgtgtcttttctgaaatgtcatgtagtcagaatcatgcagaatgtagtcttttctgactgcttctttcacttagcaatatgcttttaagcttcctccatgtttttccagggcttggtagcttctctccgttttagcactgagtgatactccattgtatggatgtactgtagtctgtttatccatttgggcagactttccagcaagatagaaggcagaagcaatggaaagggtggatgaagggaaaactgcaaggaacacaggacaagatagaagcaagagcaggaaggttttggagaagtggaaaaacaagctagagagataggcacagaggcctaacctggggtaaggcagggccttgtaaccaacgctcagtgagagaggcagcccctcactgacctgcaccaggcctttcctgattttatagacagagtgtcatgaggtcatgagggcaggaaccatgtcagcttcatcctgagagcccagcactttgtaggcatctaataaatatttattacaccaatgaaaccttcaaagtctcttctaaaaaagcaagttctcccagacaccagaagacaaatggcctagcagcccctgagccagtcatctcgggcagttgtgagctggttgcttatttgaaccctccatgccacggggcagcatcaagcttgcctgacacacacctcctgagccaggaattcaccactttgccaccatctctgcctggcttgggagatgctccgtggacagaaccagagccgtgctgcagggaagcagaaaaaccaaaggagatgcatgccaatctaacatgccagtttaaaaaaaggcattcttgcctcagagtaagaatccagctctccatgcactcgtctttcaacccaatcacaaggcatcagaattagcccatatgacctctatgggacaagaagagcaagcagggtgatttgggtgctaagaaatagctgtgagaggatgatgcggcagctgtgccctccagatgttcggagagaacatctgtgcaacaatagcagtagctcccatgcactgatgtgagaacccagcctaaggggtacagcaatctgggtggtagggggtagctctcagagggtctgacaattcacctaaagattgcaggaccaataggaacctgccagtcagaatttcctagctcagtggtgccctccaagcaagagagcttatcagccagacctgtgtcttggtgcaacatcactgcttaaaatcaagtcctcccaaggcatggtgtccattttactttctctggatgaaatgaagacagagaatgaacccagtaagatgatagagtgctttgctttggatctgttcatatcttacccgtgtttgtgctcacatgagttacacagtcagtacaagggtagagagctcttgagaatttcttacctaagggaaagaacttgggggctgctttgctcaaaggctatttttcagtgtggggcttatctagagacatatattttgctccttgtccccactgctgttgcataactacgggagttgagggtcactatacacagacacagatggtagagatgggggcagtggttgggcaaggaatagctgccttgccacttcgaagtctcctaaatggcatctctgaagaagaaggatatgtccacagggagaagggccccatggtgactctgttgctcctaatgtgccaggctcagactcttcaaaccacaagaagtggcccagcgagttccatgtaactgcaaatgcaagcaggaaaaaaccacactcagatctcagcacagcatcagtcttggggacagctggcctttcctaatgcagcagcatctggctgcttctgctgtacctggatgtcttcagggcagttcttccacacagaggaccccaaataaaagcagaattcctaccattaagctttccgtatccaaaactttctatgtgaaagatacagcatctgtgtctcacaagaatctgttttcttggggcatctgctatttggcagctaaccaaaacagaattcccatcttattttcttgttcatttgtgctacatggaagggactggtcctgaatattcagggcaacatccagcatttggtagtagtggagagaaagagaagagaaagctctggactgtgttcctctgtctgggaatgtgactctcacacctcccaaatcctcccattcacactttttctccctgactttccagaaccctttttaggcttagctccttttatcttaccctacacgctttctttctacccacactggtgggtacttttcagccatagacattggagcacatttaaatatgctggagtccttagagaattaagaggtgggggagagaggagggcacagagctgaggatggcactagctcattcacaaggagccctgaatttccagggacattaaagaacagatgctcatgacagagcatagagctctgccctaattgtttgtaatgttgaactatgtgtcattcgttcactcatatattctctcaacattggaattgagcaccaattatgtaacagagtaggtcttggcaatacaaagatgaatgaaacataccccttgtccccaagaagtatgtggacacgacaggcacatggaccaatgatggtcatgtcaagcgtgatgaagtccatggtcctgagggacacttggaccacggcctgcatgagagggcctggaacccaactgggcggatctagaaagaattcctctggacttgattcctgaacttgaaggtagagatggaaggagaagagttctgggtagcatgttcctggcagaagaagcccactgcaagagcaaaggcactgaggaagcctggtggtcactggaaaactgggattcaagtagctgaaatcgtaagggtgcagcctagggagaagtgagacccgtggtggggggcagagccaaatctctgtatccaaacctttctatatgaaagatacagtgtctgtgtctcacaagaatctgttttcttcgggtgtctgttatttgagtgctaaccagaacagaatttctaaagatggtctttgaggccaggtaacaaggctgaggctaagaagaactatggaaggtctgttggcaggagagatgtatgattagatctgcattagcagaaggaaagttctggctgaaatctgcagagcagtttggaggggacaagacagatgacatggagaacacttaggacgctgttataataaaataggctagaaatgatgttcctcagaagtccctttctccctgcacacctggccacctcagacttcctgttcaaggggaaggcaggctggggagagaggtttcttgaaaataacacatctgggccgggcgcggtggctcacgcctgtaatcccagcactttgggaggccgaggcgggcggatcacgaggtcaggagatcgagaccatcccggctaaaacggtgaaaccccgtctctactaaaaatacaaaaaattagccgggcgtagtggcgggcgcctgtagtcccagctacttgggaggctgaggcaggagaatggcgtgaacccgggaggcggagcttgcagtgagccgagattgcgccactgcactccagcctgggcgacagagcgagactccgtctcaaaaaaaaaaaaaaaaaaaaaaaaaaaaaaaaaaaaaaagaaaataacacatctgttaattggatcatttctgtgtggtcaatgtctgtaggggctttgttttggtcatcatagtataaaatccccattatgtaatatttcctcctgataaaagctcactgtgtgtctataccctaccagcttccttatagtatttgctcattaccaggttcaaggacctgtctgtgtggctcttccccagagcctctgttggaaagaagatttgtctttggttataagtagatacacagtggtcaagatgctctagcacagtgcagcagaataagatgggctcagtagggaaagatcattcacccctaaagtgtacacttattcttttctgattatgataggattatgttgaaattaaaaattgtttcaacgaaaaagcaactgattgcttaggccaaagcagaactttttttttttttcctgaggcaaagtctcagtctgtcacccatgctggagtgcagtggcacaatctcacaatctcggctcactgcaacctccatctccccagttctagcgattctcctgcctcagacttccgagtagctaggattacaggcacctgccactatgcccagctaatttttgtatttttagtagagacagggttttgccacgttggccaggctggtcttgaactcctgacctcaagcgatccactcgcatcagccttccgaagtgctgggatyacaggtgtgagccaccatgcccagccagaattatttttagtactgtagttaagagggcacattctggagcaaactgcctgctaagtgttcgctgtggggcattggggaagaacttaatctcttygtgccttggtttccacatgtaaaatgggataattatattgtccccctgtactggtttgctggggctgccataacaaagtaccacaactgggtggcttaaacaacagaaatgtgttgtctcatagtgctggaagccgactcacctcagaagcatggactcccttacctccaagtccaaggcaatggggctctctccctcttgcctcttgaattcctgcatctcatttcactgggtaaacagggaggctcctgtgctccagcaggaaaaccctggactgggaagcaggatgtctactctgatcctgctgccccaaagctgtgcggctttagacaagtggtttgacctttctgggctcagtttccttgattttcactattatttgaagggcttggggtcatggaaatcatgaactcttcacactgagaggaatcttcataatccattttgtagataacgaacctaaggctgaagaggtcaggggcttgcacccagtcatagagctaaatgaggtgcaaagaacctagaactccggcgtcttgactcccacctgggacacattttatcagtaatagtgaactctcatctgttgatagtgttagaattctcacatttactccccataacaactttctttttttttttttaaacggagtttctctctgtcacccaggctggagtgcagtggcacgatctcagctcacyacaacctctgcctcccgggttcaagctattcttcagcctcagcctccctagtagctgggaatacaggcatgcaccatggcgcctggttaatttttgtatttttagtaaggatggggttttgccatgttggccagactggtctcaaactcctgacctcaagtggtccacstgcctcaacctcccaaagtgctgggatcacaggtgtaagccaccatgcctgaccagcacccttctgaagtaggtgctttcagaaatctgaaagcatagtgtcggttagcagggttggatctcttctggtactgtgaggaagaatctgtgccatggctgtctgctagcttctggtggtgtgctggtcatccttagtgttacttggcttgcagaagcaccatcgatctctgctttcatcgtcgtgtggtgctgcccctgcatgcatgtatctgtgtccaaatttcccctttttataagagcaccaatcatattgaaatagggctcaccctcataatctcatctcaactaattatatctgcaataaccctacttccaaaaaacaccacgttctgaggtcctgggtgttgggatttcaacgtatgaatttggggtgggagggcacaattcaacccaaacattacctaataaagttttcaacagtaagtaaatgagttaactcctggaaagcatttaaaacagtgtctgacattcagaaagctctcagtaaacgttacattatgctgggtataaataaaaagctcccaggacagtggacggcattgagattccaccggtttgtattagtgtggcctcgccagtaatttacatcttctrtcttttttggttggtcagggcttaagccataccaggtaaatattttgaataatactcctagctaaaaggtgcaaggagtagatactgtgggttctgatttttctttcccgttctccaagctgtgtacacagaaccatgcaagtcgccccaaccagggaaaaacaactgccatttcttttaaaggggaaccaatgaaggtcttgtcctgatgagctcacaaaagcaaacttctccatgtctgtcgctcactcagtgggctgaagcagagccttcacgctaagctttggagacaaagcttcttagagaatgtgcaacgtgggctgatmccaggctgcccaaggagcagctgacgagtgtraaagtgtttgctcaccgattagaatcagtcctttaaaaaataaataaggtatgttgatcttttatgtgatgattaaacaaatcagatggcccaaaatgaattccaggtaaagaggaataaaatatcagaaggcaagctgctgaaattagcaagagctgaactcgaaaagcccgactttccaggcacrgctagtttcttcctagcaagttcctgacggagctgggtggctgccccaggtgactgcagtagcaggagattaaggagacagcacctgcctgacaaaaaaggttgctgacacaataggccaaagttaaattgagctgccaagggaaaatgattggggatatgcagttaacagttgagggagataccagaagaatttgtgtccacagagagattttgatggggctgactttgccgctgaccgactcacctcagaagcatggactcccttrcctccaagtccaaggcaatggggctctctccctcttgcctcttgaattcctgcatctcatttcactgggtaaacagggaggctcctgtgctccagcaggaaaaccctggactgggaagcaggatgtctactctgatcctgctgccccaaagctatgcggcttcagacaagtggtttgacctttctgggctcagtttccttgattttcactattatttgaagggcttggggtcatggaaatcatgaactcttcacactgagaggaatcttcataatccattttgtagataaggaacctaaggctgaagaggtcaggggcttgcacccagccatagagctaaatgaggggcaaagaacctagaactctggcgtcttgactcccacctgggacacattttatcagtaatagtgagctctcatctgttgatagtgttagaattctcacatttactccccataacaaccttcttcttcttttttttttttttaaacggagtttctctctgtcacccaggctggagtgcagtggcgtgatctcggctcacyrcaacctctgcctccagggttcaagctattcttcagcctcagcctccctagtagcyrggaatacaggcatgcaccatgacgcctggttaatttttgtatttttagtaaagatggggtttcaccatgttggccagactggtctcaaactcctgacctcaagtggtccacgtgcctcaacctcccaaagtgctgggatcacaggtgtaagccaccatgcctgaccagcacccttctgaagtaggcactcttatacccattttactgatcaggagaccggcttgcccaggatcctgcagctactgaatagaggggccagaactttgctggtttggtgmgcttcctggtacacaccagctgcctccaatctccctttgataatcctagccacatgccaccgcgggtgctctagtgtaggctggcaccaaccccacccagcaagagccaggatctgcttcttgagggcaggcaggtttatcacacagcggggtgcagaagagtagtattcatcttcctagtgtaaccacttataactacttttcagtgaatcaaatagatttttaagcaagaacattgtaaaaatctgcttaatcaagggtggagcaaaatgagttagccagggccaccctagctcagatggggtggtagctgcctctgctccacaatgaggtatttacacttgctccccaccctctcctttgccccattatcttytagttaaagggccaggtgcaccagaacacaggtgccttragtagcaccagcacctctcagggtcatagggaagagctgtttcctctgggtaaactgaggcctcaataaggcataaatgccttctctgggtgaagaagatatgccctctaagatctctccagggtgaatctagaataagttgtagtctagatggcttggcagcactagccagtgtgacagtaagtcttgatgaacatcagtcagcgtcatgctgagggacaacctcgaggagagggaatgtgtacttgttacaacagcacacccaatagaaatagcatgtaagctacaaatgtaactttatattttctagcaaaaaaaaaattttttaaagaaaccagtgcaattcattttaatagatcttatttgtttcaatatatcccaaatattgtcctttcaatgtgtgataatatagttattagtgagatattttccattccctttttcatacaaagtctttgatactcagtgtgtatttcactctgacagtgcacctcaatgtggtgcaataggcgagggtctatgtggtacatcccgtgcccagtgtgcacttaaaggctgtagatccatatatggcgactgtctcctagatagatgagcccagcaaggctcagtgggtgttttgaggtccatggtctctcaggtcccgttccaccccgacattcgacgaatcagagaacactaatatggttgggaacacttttatcttgctccccatagtctgaacagaaagagacgccacagaatacaatcacgactctctccctcctacggactccctccccacaagcaatcaatgkgctggtctcagacaaagacacctagtcaaggctggtgaaacctgctctatttcctagtaggcctccacctgtaattctcagcagtttgtgtgtatagatagaattcctgccttctactaatgtgactgttcctgctcagagatctagagttaattattagcaaattcacagtgaaccagagctaggtcttgctgtaaggctcctgtgttttttagaagtacgttgccatggggatttttgtccccactgggttcctcctcaggaccccagacagatagatacacaaaccctgggcccataattttagttagaaaaggcccaagcctagaacctcagggaactcatttggaagctttttttttttaggaaacttacctttcctatttgacatctcaatcaaacaggtgtttggggagaataaaagcatactaccttagaagggactggggtcatctggccagacttgtggaataaagagaatttcattccttgtataaaataactctaaataatggtaagctcttaggagacttgatctactggctacatatacccactatgaaattaacacattctggaatttagatggaagaatatggaaattggtccttctcagtgtatggacgaagcatcagaaatgaagagaagggccaagcctagagagcaaaactaaagactcactggtctgtgggcttcctgcccaaggagagctgaaagctaaaggatgcttcacaatgtcctacaagttgtttttctaaagtccttccagcggttgaaactgtgtttatgcaaaacaaaactttcctttgttgctataatctagaggtggactttggcttaagtcatgccaaaatattatcattctaaaccagtaacacctatatttgttgagcatttactatatgtgtggcactatgctaaacttaactaccccttttcctcatgtgtaacagtcaggtgacttcacagctgccttgtggatacttgtgttatttgaaagattgcataaacacatgtaaaatgcttagaagtctaccacctcatcttacctacagctttggtgagtccctgctttggccaagtagaatcattccctgtgaggaggggaagaggataagaaacaggcagagttgaccttacaggtagacacaacaggcgagggtccatgtggtgcaatggatcccatgcacatgcctgattcagtcattctagttgagtaggattgtctggttggttgttattattttgttttttgtttgtttctttcttttgttttataagatggagtctcactctgtcgcctaggctggagtgcagtggctcaatctcggctcactgctgcaacctcttcctcccgggatcaagcaattctcctgcctcagcctaccgagtagctggggctacaggggcatgccaccacacctggctaatgttttgtattttagtagaaatggggtttcaccgtgttgcccaggctggtctcaaactcctgagctcaggcaatcctcccacctcagcctcccagagtgctaggattacagacgtgagccaccgtgcctggccagtttttatcttgaaagcttaagggtctcccacttaaattcaaatactcttctgaggataaccttttaatcagccaactatcatgaatctcaattatcaggaattccagttattccaattatcaggaattctttatatcatcccaggaatctaaaagagcaaggtcttataggtaagggcaaactttctgatgccttggaattcagaccctaagtagagatggtcatttgacatctagtctgatcgactgtagagttacttctatacaaataaattcaagttatcacagggtttctttcagttggggacaatactttgaaaacttttaggctctgaatgaataacttggcaaaagaaaatgttagggtccttcaaataccatacttgttgtggttttctcacagatacaccagtctataaccctgaggtttcaacactccactcagttgtgggctttttatctaaatcaaaactatcacatgcccacatgtgcatctgcagccaaccacaaatgatctaacaggaccagatttcactggagctctgtgacccttctcccagtgtgaactgaagggaaaaaaacctggagcctaagggactcccttttccgtgtcctgaagaccactggctttggttaagccaatatgatgggctcattgagagagagactcaggacctcggatcatgccacactctctggccccagaaggcataccacaggctgccagctttgttggagaacctgagacttaaggccaggatatatcaagagccctgtacccagttctgtgatgtcttaatacctttgacaagagacattggcaactcactgggtgtccattggggggcgacaaggaaacagactgatgaaaccagagaatgtgacaactaattacatgttgtttcctgtagaagagaaattctcagaggaacgtggtgactgtctgttctttaatggactgtcatatgaaagcaggagaaggagattcttccttactccaaatgacaaaactaggagcagtgaaatgagcttataaggtggccgggtttttctagcaattggagctctctgcagtgagtggacacttggcagggtagtgcctactccgcatttgatgtgttcacaccacggctagaagtaggtgtcgcaacttccagttgaagagggaattcttttccttgggtgggagaggggctagagaacgtctcaggttgttgctaactatgagcatggttttataattgtttaaaagtgggtaaacaagaagagtgtgtttatggtgtctgtattccacaaactattatttcccacattaactgtttcatatatggaaaatctgagaaacaggaatgctaacaaggttgcagtataatttaaaaatacttctgagagatcattgtatcccaaaggcagtgcccagtgaggttaagagcgtggtttgtggaatctgagcccacaggggtttaaatcctgcctctgcccttcttagattctgtgaacttggacagattccctcacttatttaagacttcacttttcagcccttgagatcccacctgctcaattatctaaatgaaatctatcactgtggaaacagcaaaggcctcctgctgttgagcaaaatgttttccagtcctttgtttctgtgtgaaataaagcagctccatcccagtgctaaatgatcaactgcatatgacagaatgagcttatttcatgctcccagtaaatacaagaccatagactactctggatggtagtttaagtttaagatgaaattgcttcttctgattgccttcttctttattgcttctttctctgttgttccttccttctcttgtttataacactaacagtcaaatctatctgtgtggaaatctatctrctatatagaacgctacatcacaatttacagaggggaaaatatttttgtcggcagtaacatttcactggaagaggcactatttggccacctaactctgggatttaggctcaggtagaatcagtgcctcagtttctttaggtcagccattatgagttgttccttatttgacctagcacatatatagatggtggttaaatttagcaaaattctcttcacaaaggtttcatttgtctggaagactctaagtactgatctggtcagagtaccatcaaagccccttgtttgtcatgagaccgtggaccaacatgttagtctttctcatgtaaaaaaaaaaatcatcaacaaatgcagtgggagttggtagtcatgagtttgaggtagtacaatatccttaaagtacacactcaatcatgtgtgataattggccaactctacctaacaacagttgaagacctccaaacagctatcaggactactggaatcatgtctccagaagaacctggagaaacattcacatttgtgtggaccaaggaggaaagcaacccagacgacttctacttagaagcacaggcacatagagcctgtgttattggcacaggtatttctctcctaagagcyttttctgcttaagaaggcttgaggatctattcccattaatcataaaaaagggatttgctgggctaaattattttagcctcctctttatgccttacttcacaaagaattgcagttaatctgtaaatgagttctgatgttatgaaaattggatatggcaaattgtgttattaagtctattaagggatgaagaaggactcttctaaaagaataacrtagtctgagtggcagctctcacttaatagacatctacctagaaatgtttctgaacttaatggacacatgatataattcaaaattaatataagcacacagcacctctccccataaccttattgaaattaagggttccaaatcattcttctctcccttttacttcacctgcaacatgtggctcacccttctttagactaagagctaaactctaatgcctagttaatgtaaaacaatgccaggattattaagcatgattctgataagttttaacccctaatgagattatccttggttaaataaattgaatggctagtggaattccaatgtaaagtcagcagaggttagctggttgctagatatttaactatacataccaggaagctatgaggacaaatttccatttgcacagagccttgagaattggccattttaggactaaatgtgctgctcattacttttactcaaggacatactaatgaccaatatatgtttaaatacctactatgtacaactgctttcaaaaacactttsaatcttgaattgagaaggtaggagatccatacctgtattaggccatcctcacagtgctataaagaaatatctgagactgggtaatttattaaaaaaagaggtggatgaagctggaaaccatcattctgagcaaactatcacaaggacagaacaccgcatgttctcactcataggtgcgaattgaacaatgagaacacttggacacagggtggggaacctcacacaccagggcctgtcatggggtggggagagtggggagggatagcattaggagatatacctaatgtaaatgacaagttaatgggtgcagcacaccaacatggcacatgtatacacgtgtaacaaacctgcacgttgtgcagatgtaccctagaatttaaagtataataaaaaaaaaagkggggaaaagaaaagaaaagaggtttaattggctcacggttctgcaggctatacaggaagcatgatactggcatctgttcagcttctgtggaggcctcgggaaacttacaatcatggcagaaggcaaaggggcaacaggtatgtcacatggccaaagcaggagtgagagagagaacaaggtgccacacacttttaaacaactacatctcatgagaagtcactcactatcacgaagagagcaccaagggaatggtgctaaaccaaggtccccaacccccaggccacggatcagtattggtccatggcctgttagaaaccaggccacacagcaggaggtgagtggcgggcaagcaagcaaagtttcatttgtatttacagctgctccccatcgctcattactgcctgagctcagcctcctgtcagatcagcagcagcattagattctcataggagtgcaaacgctattgtgaactgcacatgtgagggatctaggttgcacactccttatgagactataatgcgtggtgatcggtcattgtctcccgtcactcccaaatgggaccgcctagttgcaggaaagcaagctcaggactcccactgattttacattatggtgagttgtataattatttcattaaatattacaaggtaataataatagaaataaagtgcacaataaatgtaatgtgcttgaatcatcccaaaaccaccccctctctgccccgtcccagtccatggaaaaattgtcttccacaaaacaatccctggtgccaaaaactttgggaactgttgtgctaaaccactcataagaaatccaaacccatgatccagtcacctcccaccaggccccacctccaacactggggattataatccaacatgaaatttgggtggggacacacatccaaactatatcaataccttcataaaagcaattaaataactgtacagtgtgataggcaataaatgtcaaatgtcatatgtatgaggaacatagagaggtgctgttatcaagtcactgtgtgacccactgagcactcgcaatgaggcacaggtagtaatgtacctgctcacttgcttattgttgtcccaccacgctgaattgggagcttcatgagagcagggcccatgtcgcatctattaccacaactgccttattcgcgtggcctgtagctagcaatcagtaaaaaattacagcatggatgaagctacagaaagaaagtaaatactgacaggtgggcaaaatttttagatatggatatttaatgatgggatgaacagatgaatcaagacaggaaacaaggcttcgcgtggcaaatatatcctttcatttgcccagcaaacatttgcagatccctcactatgtgctagacactgtgggcacatttctgtgtggattggtgtttttctctctcaaaactggagagattttgagatcagcctgtatgtagtgagatgaagaggtatgtggttgagatcaggagtagttgggattctgtgagggatagggctccttaggtgtagagagccttgagacctttgttgtgaggatagtgaaaatcaacaaaagaatttatgttaaggaaggttaaaaagtcactctaaaggtctcagaagtgcctatgacatcatgaggagatgtccattcctgaaaactttagccaggttacaaacactttaagaaatcctatctcaaaacttcaagaaaagtgagatctgtatttacacagatagaatttccaggactggattatatttgcacttttttgttaaatttttacttaactagtatattaatattgatagtactttgtgacttttttcataaatataacttttaaaaaatatggtmtttctaaaaaggtttggtgcattgttaaaatgtggttttgatttattcacagacagaaatcttctctaacagactatacttccatttcgtaattcagtgaggtaatgggactcagttatactaaatttatcatagagcaaactttgctagttttcatctgttcattacattttatgtaatggcagacagtgtaataactaataccgttaacccaaccatctcttccctataatgtttctataggaacatacagtgtacattttgcagttctctacacgcagacaaattctaccagtgtgtattctgattacaagctagttgcttcataggccatatgtctatcttcagtccctatgaatcatgtaaattacagagcaaactgccgatactcagtatatgtatatgacacataagagtcaagtatactcagctcctaagagcaagtgagaagacaaagaagatctactgtgtgtagaaatacttcttaaatcatctttcctgaaggcctagtttgcaactgagtcgcaaaaatttggtttcaaaaagttaagcttgcaataataaaaagataacccagtttaacaatgggcaaagtgatctgaacagacatttctcaaaaaatgatatagaaatggccagtaagcacaagaaaagatactcatcatcattactaattagggaaatgcaaatcagaacgacaatgagtcacctcttcacagtcactaggatggctatgattaaaaaaaaaaaagacaggcaataaccagtgttggcaaggatgtggacaatttagaaccctcatacactattggtagacatgcgaaatgaaatagtcatttcagaaaacattctggcagttcctcaaaaggttgaacataaagttactaggtgaaccaacaattccactactagctatatatccgccaaactgaaaacagatactcaagcaaatacttgtacatgaatgtttatagcagccctattcacactgtccacatacttgaaaacaattcaaatatccatcaatggataaatagataaacaaaacgtggtaatttgtacaatcgaggattcagccatagaaaagagtgaagtactgatacatactagaacatagatgaacctcaaaaatgttatggtaagtaaaggaaaccagtcaaaaaagaccacatactttatgattccatgtgtatgatatgtccagaatagggaattccatacagacaaaaagtagatgagtgtttgccaggggctggggagaggtggggatggggaatgactggctgatggttagtttccttaggtggtgaaaaaaatgttttaaaattgattgtagtaatggatccacagccttgtgaatataccaaaaaccactgaactgtgtaggggtgggttgcccctccacacctgtgggtgtttctcgtaaggtggaacgagagacttaggaaagaaaaagacacagagacaaagtatagagaaagaaataaggggacccggggaaccagcgttcagcatatggaggatcccgccagcctctgagttcccttagtatttattgatcattcgtgggtgtttctcgaagagggggaggtgtcagggtcacaagacaattgtggggagagggtcagcagacaaacacgtgaacaaaggtctttgcatcatagacactgtaaaggattaagtgctgtgcttttagatatgcatacacataaacatctcaatgctttacaaagcagtattgctgcccgcaggtcccacctccagccctaaggcagtttttccctatctcagtagatggagcatacaatcgggttttataccaagacattccattgcccagggacaggcaggagacagatgccttcctcttgtctcaactgcaagaggcatgccttcctcttatactaatcctcctcagcacagaccctttacgggtgtcgggctgggggacggtcaggtctttcccttcccacgaggccgtatttcagactatcacatggggagaaaccttggacaatacctggctttcctaggcagaggtccctgcggccttccgcagtttttgtgtccctgggtacttgagattagggagtggtgatgactcttaaggagcgtgctgccttcaagcatctgtttaacaaagcacatcttgcaccgcccttaatccatttaactctgagtttgacacagcacatgtttcagagagcacggggttgggggtaaggttatagattaacagaatctcaaggcagaagaatttttcttagtacagaacaaaatggagtctcctatgtctacttctttctacacagacacagtaacaatctgatctctcttgcttttccccacagaactgtacactgtaaaagggtgagtttgtggtatgtaaatttatctgaatttttaaaataaaaaagaaagttaaaaaatgttaaacttggaattaatgatggtttttttgaagcagattagtaactactgaaattagtccttgatttttggaaaagcctttaaaaaatggtaagtgggagaagttataaacaaagagatgaatgagtcacagaaaattgggagacaaatagatgataacaagggacagtacagaaagactcaactgagttttatcaaatcactcaggcagataaacatgggggctgcatgtgcatccgtatgtgtgtatatgtttatttacatctaatatacacacatgatattacatgaaatattataacatataataaatatatattcatactggaaaaattctcaaagaatataccaccaaatgttaacaatagctgtccctgtttagtgggatttcaggtgacttagatcctttccccctttggcctctcagtrtcttrtaactttgtgtgctaagatcattgatagttgaacaataagaagaagaaagtgagtgtggaaggatgttgctagagaaagtgtattcttgattatatggaggaagtgggggcagtttgtgaagtcttccttacgaatagcatcctatttgagaagaccagtcttcacactggaaaaaatgcatagagcaaggtgggcatcacttgcagaacagtttggcacaggactacctctgaaatattaaggcttaggagacttgttcttagaaactcttcaggcaaagtttacaaaaggccttttcctccttgcttagcagattctcccaaggcatccacatctacactctccgtaagtcactatatactggacctagcacacatctgtctacccatcattgtattagtctgtcctcacgctgcttataaagacatacctgagactgggcaatttacaaaagaaacaggtgtaatggacttacagttccatatggctggggaagcctcacaatcgtggtggaagacaaggaggagcaagttgtgtcttacatgaatggcagcaggcaaagagagagagcttgtgcagggaaactcctgctttcaaaactatcagatcttgtgagaattattcactattatgagaacagcatgggaaatacccgcccccattatttaattatttcccaccaggtccctcccacaacacgtgsgcattatgggggctacaagatgagatttgggtggggacacagagccaaaccatatcaactatctatctatctatccatccatctgtccatccatttatctttaattgggatacgtctacaagacaactgatacctaaaagtatgggaatttcatttgctaagtcacaaaataacttttaaaccatccttatattatacctaacatgatctgagcacataatattgtctaagtcagacccattcttgcctctctgagcttacactcttgtcaagtgtgagccagaaggagttggtccaagtagagcaagtctcacaggctttgtggtactcagggtgggggtcttacccaacatttcctcccagaagctgaaaggcagagacaagaaattcatcctgaaagagttcacaagggtaaagtcaaggtggctggtccccagacaggtcataggaataaggttctggtcatacaacaggaggcaaggagcccaagtagagggacttgggtgtggggcaagtgggagggtttcattgaaaaactaggtagaagacagggagtaatggtggataaggcaaaggacagcatctaattcaggcctgtcatcaagctagagaatgttcacagcagtgttgtttgaaagagaaaggcatggaaaacactttgttgtctatcagcaggtgtgaataatttaattgtggtgttttcaaatagtgagatttccagcagaggaaattaataaaccagagctgcatgtgtcgatgtagaaaaaaacccaaagtgtccagacatggtggctcacgcctgtaatcctagcactttgggaggccgaggcgggtggattgcctgagctcaggagttcgagaccagcctgggcaacatggtgaaactccgtctccactaaaatacaaaaaattagccgggcgtggcggcctacgcctgtagtcccagctacttgggaggctgaggcaggagaattgctagaacctgggaggcagaggttgcagtgagccgagatcgcgccactgcattctagcttgggtgacagagtgagactccgtctcttagcaaaaaaaaaaaaaaaccgaacacccagtgttctcactcataggtgggaattgaacaatgagaacacttggacacaggaaggggaacatcacacaccggggcctgttgtggggtggggggaaggaggagggatagcattaggagatatacctaatgtaaatgatgagttaatggatgcagcacaccaacatggcacattcatacatatgtaataaacatgcacgttgtgcacacgtaccctagaacttaaagtataataaaaaaagtaaaaagaaaagaaaagaaacaacaacaaaaaaaaactaccctttaaaggaatgcatataaacaataatttatttctttcacattcatttcacagtttgcttactgaagcatcagtgtgtctttcaattggatgtgatgtgttttgaagacataagaggcaggaaagttttggttgccaaaaataaagagaaacagggaagaatttagcttctgaactggatggtcactcttgccagaggccttggaggagggcaaggttttgcattttgtttgccaattttttccttaaataaagtgccctggacttcaggtcagtcttgccccttgagctgctaaatgattctgccagattctttcagctgagctgtgcggggtcctgaagacctgctttgacttcctctgcaccaaactgactcactccccagggaacaagatcaaggctgaggaagagaaaaagcagggcatgaatggaccctatacccaaaatagtaattccattttctccacctgccattctaccatcacagtgaagcttttctaaattgtaagaggctcttgtaaaaatgaagccactcctgggagatgttgaattttatcagccaacatgtatgtgggtgtccatggaaaacaagaccttggcaaattataccacaaatgggctggggcaagtgggaggagagtgataggagaacgtttgaatcaggacaaaacgagtgaacaatgtggaggcaaagggtgggaacaagatgtgctttgccaaccagacaagtttttcaaggctaatttttctagagaccatcttaagaacaattgcaacactagacaaaaagcacacaaaccaaaaaaagaaaaaaatctaaacccaacagcctaagtatcagaaaccatcttcttatccatatggttaaaaagtcaaaatgaatttattacattttcacagaaccatttcctgggccggaactcatttctccttaaataaatactataaaattttcctcagaacaaatcaagtcccctctataaccccagaagacaaagtacatcggcagtaaaaacagacacaaagtctccactgttgtcagaggtagcatggcctggtgggaggacagggagctcatgctgccgcatcagtcgggaggagggatttgtcttctccacagggcaggatccctacaggaaacaggacaaaytgagaagggcttgacaatggaactctttacaaaggtgtcagcagagtattcaaaaccacaggagaattgagtgtcagggctagcaactgtacggttccagagccaacccatgtcggaagggtcagagggkgggacagtcaccacaaccccagaagggagagttctgtagaaagggccatctggagggaagcagtgaccttcagtcagcccaaggtgacagccaggcagcaaggagatgagtaccctyagcctcactccttcccttsctccaacctcctaccaagcctccctgtgggtcaagctcatcctgggagtcagaaggcaagagagcccctagatgcagtccacatagttcagagcaggttgcaggtcaggaagggtgaagacaggagaggcaaagggaagacattgggcaggtcttccagctcacggccctgtcatgcctgcagtcactgtagtacagactgaatgttcactgtgtcctgctttcagcatttaagatgcctctgagataaagagcctgccttgagtctcacgggacrtgctcacattttctgaaaccatgtagcttgcactgttaacctcttcctcggtttagaggttttaggggctcgtttcacaaagctgccccagcccctcatgttaaacaacctgagggctgtgactgggcaaaaaataaataaatacatttgcattcaacattgacaaaatacacacttaagtgagayttttttgcatcacaaaaaaataagtttttacttttttcaaaaagtaaaggttctttaaaagatatcatctagagtagaattaagggctattattagaaaatcacagtggtccctaggcaagacattttgagggatgaacttaagcaggccccagactcacgtcttccatgtcctacaacccaggcataccccatcatcccataccttcaatttatccaaatacttcctgtttcagttggcaaattccactgccccaagcttccaaatgtcttccactgctggcttagccttcttcctaaatcccctccccatagtgtcctggaccccattaaaatgccagcaatgaaagcatctcctttcccctgtctagcacagccaggtacatctgttctgagtggtcagtgcccaaaacagcccagttgctaaacagtttgaccatcacctatgctcacacaggagttactgagatgatggtcctcaactgcaaataaaaaaacacaggccactctgtaggagccattagctcacaacttgctgggcaggctcaagttttaggactcagcatgctgaataacacctctatccaatggtaaatttctctggaaatgaatccaaaaacctctcagatgacagatcctgggactttcaagttgttacatagcagcaagggttgctgtcatgatttgtttactctttgattccctgctgtggctcatttgagatcttggagtgtttgctgcagtaattatggcaggatttttccagagtggttttagcatcagtgaaagaattagtgttcattactccttaattctatcactcaacaaattataggggtaaaattagatcctattaaaaaaaaaaaaaaacagggaaaaacagcaaacagaaacaagccggaaaagaggaaactaaattcaccctctaatactgataagcaattcttccctaccactaaattttaaaccttcatcagagacagtactttgtccgtttgttcaatactttattcttagtgcctattacagtgcctggtacatagttggccctcaatatatgtttatttaatgaactgattaaataaactagactcaggctctgacccttgtgctaaatctgtgctcacaatagatgttttagggcatattaaattttgaagtcagttcatctctatggaatttataggcaaaggggctttctttttttagaggtaggttcttgttctgtcacccagactagagtgcattttgcattttgagtgcagtggtgtctgccastcagactagagtgcagtggtgtgatcatagctgactgcagcctcaaacttctcggctcaaacaatcctcccacctcagcttcctcactagcagactacaggcacatgccattgcacctggctaattttttaattttatttttttatttttgtagagacagaggtttgccacattgcccaggctggtctaaaactcctgggctcaagctatcctcctgcctttatttctattttgaagcaaacaaaatgatgcaaatgaataaagagtcctaggaagaagtgtcctctgctcttgactgtccactaactccagacttcatagtggccccctttgcttaaggcatatgataaacttctaatgatgcttgaattatatttccaccagcaggatcagttattttcctcagactcaaattttgcaatcaaaatgcacagtgtacacacggctgcttatattgcagcacatagcatctattttaccatttcaatttgtgtgatttcttacatgatggattgtgggatgacaataatgtgttctcagtgaagcctcttgactaaaccaaaatttgcatttttataaacctccatgaaacagctttacttagtaagattctataatgctatactaaagaaaattacgtggtagcttctaaaagaaatactccctccatcacagagaccgagcctcatatgaaaacagtaagcagcacacaggaaactcatgctgtagatgaatttggagagccacctcaggttatytgcattatagaatgctaaacgcagactatgcaagaaaccagccacctagagagatctatatagaagtagagaaacttccataccaccagcaattttggctttccaataaatattgagtgatgtccaaaagtcgtataattcaaaaagtctagggtaaggaacaagataaaagctaaccctygtgggtgttggtaaatcaataattaattggagatcttccatgatatttcctcataagaatcattgctaaaattgttgtaatgactacacagactcccaagattgcaatagtcaaacaacacaaactgttgaagtcatgaagggatatgcaacatggctccttggttaaccttttggtagggatccagtttccaccatcatgaagtcctgttttcaatattaatttacatcattagaatgcctgctgttccatcagcattttcttgagatttcctgggccattctcagaaaccagagttagaatgcagaaattaatcatatttcattttgacctaactattatacccagatatttataagcctgaagtatatttttgccttactgataaaccaataagaaagaacttgaatatctcataaaataaggtctttccgcaagccacacatatctagatatggataatagagctaaataatcaggtgtcgagtccaatacactgtcaatctatgtttgacaagcatccagttccttgccttgagtcattcagttcttcgttgttcttgctggaatgaaagcctatacaaaacctagcattaatgaagttaatatgaaactaattagctgcaatgctactgcgggaaaayggccaatcatcatttaatgaatgattctcagttaagcacttcagaaaagtatttcctctgccccataatcacccagcttcatgaagatcctgctttccaggtttgaggtgtgggatccagattcacttataacctaatcaggaaatgaacaggatgatcttgtactgaagtcctatattagtaatatatcaaatgaataaagaaaaatgtaaataaagttagaacttgtagtatcgttttatcaactcgcagtatgtgaaatccatgatgtacctgcaccataaataaaacaagatcttcaaacttcccagggctatttaattcttccatgatttttgttcacaaagaacaatcattgctcagcctattcattgctccttttggaatgaaatacttttattactattcacttcaaaatatttttaaatttctgttgtgattgctccttagacccacgggtttattaaaagtatattgcttatttttaaatatttagggatattttagttacttgtctgatattgattcctaattcagtttctctgtggtcagaatgcatgttctgtatgacttcaaccctttgaaatttgctgaaacaatgttatgattcaggatatggccttggtgaatattccatgagtacttaaaaggaacatacattctacagttgttggctgtagtgttttattatataaacgtcaattaagtcatttcttaatcatgttgagaaatcatctatgcccttactaattttttattttcatgtttaatcagatatgagaatggtgcgytaacatcttctatgattgtgtatttgtctatttctgcttttagtcttggaagtttttgctttgtatattttgggtctatgtaattagatgaatgtagatctttattttcctgatgaattgacccttttatcattatgacatgtcactttttatatttaatagtatttcttgcattaagttttaatttatctgatattatgtataactctaccaactttcttcagrttagtgttatgatggtctttttttcccatatctttattttcaaccttcttggtccttattagagtatttaatccatttacatttagtgtaattactggattatttgaatttaaacctaccatcttagtatttctttttctgttgtctcacctattctttgtttctattttaatccctgcttgcctttataaaaattttaaacaatgacaatttttaaaatattttcatttatcttctttgttaccttattaattaggcctctgttgtaattcacctagtgctaacccagggattatagcatccatctttcactcattacagtctacttaagttaacttagtcctttagttagcatcatttctgtcttccatactactgtatgcgttttaattctacatatattattaaaattataagacatttttattgttgttttaaatagtcagtttaaaaaatgtaccctatatttactgttttcaatgaactttcttttttcccacattacatacttccatgaacacctccttttggcctatagaactcctattaatatttcttttagttcagagctgctggtatgtattttctcagttttagtctgggctcactttctgtgattctctcatccctggattattgactttcaaaactcagtcatattggcagcccctagcccagtgacactgtctcaaatcccagaacaatttatttaatgccacatctattcttgctccaaaaattggcaaatgcctcaagaagaaatgaagagaagccagtatgagactcgcctcaatctacttcccttttctgtgggatcttggatccctctcattgaccaatatctttaaagagttagatgatagatagatagatagatagatagatagatagatagatagatagatgatagacaaacagattgatgttatttttagcagcagcattagtgtgaataagctactccattttagctagaggtagaagtaatttcttcttagagaaaaagtttgtatagaattgaatttaccatcatagccattcttgaatgtcaggccaattgaactcctaagactctagcatatacaaaaaacagaaaccactatttcttatcatatgtttaagggtgtgtatttggaaccaatttagccacaaacttccagatgatgctgacataccaataattactattaaaaagcaatataatacacagggaaagcaaatatagtcaattgatatatgagctgttgctcttattgcaaggattgtaagagttctgcagtgtggccattatatgtgtgcctcacaacttgtattcattgtaagcttcctttgagaatttttatctaagaataagtctaccctcattttttgtggagtatcagagcttcttctcctatttgtcttcaagattgaaaggagaatattgaatgctgattctctgaacatctgcaataatgtattccaagatattggcaaaatcagtccaaaggctcaaccatcccagctaattaaattacctggttaactctgtggactaccaaatctaaatggatgtaagagaggaagaaatttgaaraaaataaagattacacagttgaaaaaacaagatattctccagttatgaattcttttccccaagagtgtcttttgtgtacattgttattacaaaatccagttgtcacattaaacaagccatgctatccaaagcagagttgattgtggctggaaatttattccaatattgaaaagatgtgaaagggctataacacgtatcagacaatctagaattgaccactaggggacatgaccatgaagccttagacaataattcatatttagtttgaagtactattctgaggcaaaacaaacaaaaaagaatgattatggaggactcaatcttaaagtgtctccaagcatgtcttgttctgtctcaaaccttggcctcaacaatcaaagctstgtatcattatttgcaacacatgaatgctaaatggtatcatttctgactatggacctatgtgtagttaagttgtgtgtaggaatatgaggatagaaactattactatcaaccaaatggtaatattggacatgtttcaaagattgtctgaaagagcttgtccatggagactaacccttaacaagtcccaggtttctcctctcctagaatgtgaattccacgttcaccagcagaattcagttctgctgaaatartcatggaacagtattgttttaatttctcaaacttttcaaccatatgtttataaaggtttataagacaaataagactatccctggcatataattctttcagtaaatacttcacatattcttccataagaattagcctcttctgtaaactctggagctaccccaaggtaagatcgtactactgtaaataagcccgaatcactagattccaaaggccaatggttacccaggcattatttgtttatgacctaagaaaataagtccatagaaataaattggcttgaacagaaccatcaaaaacccctttcaatagacatctcaaatgaaataggtggttctamttcctgagaacacctaaagaacctttgtgtaaaagaagaaatcattatttccattcagtagcaatttttgaatggtgtaacttgctatctccttgcctattggtacaatgcagagaaactgttcaaaggtgagccattcggtaaagaacgatagagttaatcagagagtctctgttatgcagctacatggaatgcaggtgttcattgctggtgtttttacccgctttgagttcttgtttgtttttgttcctatagtaggatgctgcactgatttgggcagggcaaagtggtggttgatggaagagcagaacacctgggaaagtcatccagagtaatttttgatcccaagaaaagatcagcagaattctccttgagtctctaagtcttcacattgtagaactgcttaggtaaaaactaattcaggaaatgtgcagttataaaactttaataagtcacccattaactgacattttaaatgtaaatgtactaaggggactctttatttccctctcattcgtaagtggaccatcctcaacacagagacccaaaccagaaacttaggaatcatctttgattactctctttcaatcttatcaaatcttattagcaaatcttatccctgaaatctttgtccctgaaatatatctcaagtcttacctgtcctcaccagttccaccgctaccatcctaatcctggcatcaactctgaactggactgagtcctccagcagcctggttccactgcttctattttttttccattgtctctctccattycattgtacacacagttgccaaaataatattttaaaatctgtatcactaatttaaacgcttgtggcttttcagtgtacttagaagaaaatccacacttgtagaccctgatgcattcagcccctacctgcctccccagtcttataccagactccatttctcatatattgcagccatgcttgccttttcaacatctcaagcaatcgaagtgctttctcgatttgagactttttgtgcttgctattttcattgcccggaatgccttttctgagaatctcaagcagttgactcctctgcattttttatgtataagctttacatggttcatattcagagatcccttccctgagcacccttagtaaactgttcttggctttgttgggtattattggaacttaccactgcctataattattatgtttgtcatcaggtttacttgtttcttgcctgtgtcctccactagattgtaagccccagatatcagctaattggttgtataagtttccattctttatatagtctttgaatagtaatcatgtacttagtaaagccactaaggcaagtggccaaggagacgtggacagttatttatatctaatccaatctgaagaattattccaagcaaaaatgacgtgactgacggcttaaaatagctaaaaacttatttagttctatctcaaacctcagcttcaataagcaggctttcagccacatgttttcagtatatgaattgccagagcttcctaccaactagtcatatagtgtgtctaccttaacctggtacctttacttgggttgcatttcatcagcagccaagtccatctatttgtcacagtgtctctagtacactgcttctacatagtcagcaatcagtgaatacttgatgcctgcatgcatgaataaatgaacttctcaggaatgctagggccagagaaagttgatgtttaaaaagttagaaaatgtaggcacttgagaaggattaagaaattaacataagccttcyttgaatttatcattgaaatctattattcaatttacatgtacaatttcagcaatacatatacttcctttagtcaaatacatctccctgtagcacttaccatgtctctgaccctttgccttgcaaattccactctgataataccagcagtgaatagaaatttaaaaagccactgtcctcactccttccactcatgttctaatgtaagcctttcttttatgcagcctgaatgcacaattcacttgtcattatctcgcatcctagctgctcctcatgaaatggcattcctctggatttgctgagtcctaatgttcaggcaaagtaaatcccacatcattctggcaggctttcaggaagacttagggactcgttgtctgctagtgcaaataacagcaaagtgtggtaggacttcctccttagttcagcgaagagccaggtccttgtcgcacggccatgaaaaattaggctcacagacgatttcgagggggagaaaaatgaaatttattgggcaaaaatggggaaattagaaacaggggccctctccaaagccagagtccctgctagagtacttcccacctcacaggttgaatcccaggtgccacccaggaagaggaggggccagactcctcccctctgccagcagagcaaacttctgtggctccaccccagtgtgtattcctcccagtgcgcaagtcggttggagttttctgggaaccgccttcccacctggctgtctcaaaaggactcccagttgcagaggtatgtgtgattcaacaagatccactggcagaaaatagaggcaaattaactcaaggagtccattggaatatatcaacgtactccccttccactcacaaggcaatgatttctaaaacagtgaatcattttacttacaaggggtcacaatggagacaggatagaggaaactgcccgggagacacagggacgaggcatgtggagaggtagaccttggatccagttctgcagccagtgagctgctcactcagacctgttgctcccctccagagcctccctttcttcatctggggtatgaaacaactrgaccagcttatctctgagatcccgctcagctctgaccctcctgttggagaaggcttgcattctgagactgcagtcccaagtagcaatctcttcggagggcatgtatgtgattacgtacttagtgtgctcacatagtttcataagaatccggtaaaattcattcttatgctacttttgtattcccacttattttgaatggaaaatccttgtacatatttcctcaaattatggataaaaagtatacaaaatacaccctagaggccaagaagctccttttggtagaaagaatgttgagccctatgaatttgagctactcaaactttgtggtttgttttgggagccaatcttgaatataaaatattttttgatccagcagaaaggtgaaatcacattgaagtttacaaaatagtaatgctaagatagatagattttcttgtgtgccacacttatgttgtaaccagaacttaattcaccataatcattgacaagtcttttgttactggaaaggataagggttggcaggtcttgtgacaaatgttagaatttaatgcccaggatttttcttgatgcacaggactcattggaaaagcggcagctatttattgtgactatgaatcacgtccacagatgaatatgattaagtgctaaatccatagcagctcaagttttttaaagccttggaaaattggctttaaaaaatatcacctgacaaacctcaagctttttctgtctcacaagacttttggaaaagaactaggatcgacagtgttttaaggctcacaaggaaaagaatctaacacttgtaaaattatcttctgtgcaagttttattttccaacgtgaatctgggctgccaagcatactggctctagccagatcttcattagccgatccaaaaagacagtcggggcatttatccagataatgcaagccaacactaccctctgagaaaacaaaaagtaacttgcctgatgaagcaaggaacctcaccgattattccagattaatgcatctccttttactggcaccatgatcagatattttcaagacaaagtacttggcaagttggaatccagctgggtcctttgatttttgaattcactttgcttctgtgattatggccacagttttgaaaataaagtcatgtggatagagttgtgatttttagggatcaggatgcctcataaaacaacaatgctgtattcttttgtagaacaagatcctgcctaggcctctttcctagtattaatctttggtcatgatgaatgtgctcccaaccatccaacctatccctttgcaaccaggcttttgtgagatcaaataatttttagagttgaaatgaagttattaccagctctaaaataaggtactacaggagggaagtaaggaccgacaagagttaaatcactttctagggttgcgcaggtaactgggaatgaagccaggatgacaactctacttgctctttcattgtatcttatgcttctctgatgtcttccaagggatagcaatataatcaatagtcttgaaagaaagatctttgtagagaaagggtcagcagattatgtttgtaattgactagatagaagtagttttgcttttgcaggttaaatggcctctataaaatgtaattacccaatgggttcttcctgcccactacacaaagaccacagctctgcagtaaagagtttaactgacacaaggccggccacgccatgtgagagacagagttattactcaagtcagtcttatcgaaggcttgtgggctagtggtttttcaaagacagtttaggggaagaggtgggggtggctaggaaatgggtgctttccactgattggttgaagcggagaagaaatcgtaaggggtcaaagctgtcctcttgagctgattcacttataggtggggccctaagggtgatttggcaggtccgggtgaagccatctggtacaagtggagccaaccatgtcagacatgcaaaaaacctgaaaacatatctcaaaaggccaatctgcaatagtgatgttatctgcaggagtaattggggaatttgcatatcttgtgaccagcctacaccttagcagaattcaggctcctctcctccccatagactggggctctctcatggctttacaaaggtggttgacttttggggaggggctattatcatttaaaccataacctaaaagtcttccaaagttatcttggcctcagcccaggagtaattaaggcagcttgaccactaaaggtaagagcagagatggctaaatcagatctccttcactgccataattttctcactgatacaatttttgcaaaggcattttcacccactacccaactgtgtcattgtagcatgaaggcagccatagaaaggaataggcatgactgttccagtggaactttatgaattaacactgaaatggaaatgtcatacaattgtgacatgtcacagaatatttcatttttaattgttttcaactattcaaaaatgtcaaaatcatttttagcttggtggtggactggatttggtccagagcagtagtttgcctgcctctgttatagagtaacacatctgagcccatgagagaattgatcctgtaccttgggtaatgctcttcctctctggctcctttctacacctcagtcacttttcccctgcaagagtgttgtcacattagactgtaaaattggatcacttttatatttcatctctaacatgccttatttaataaaagtcattctaggtatgactaaagttccagggctaacttagaaaaggactgaagagaagaattccttctgacaaatgcggacccagccacaaatgccagtgatattgtcccaagtattggtggcttgggttgcacttgataacagagggcaaaagaaagtataaattttgcttgttaacatagctttagtggaaaatacagaaaatgcccccaaactccatgctaagatcatgaactaaactgttacaatgaaaggaattacttgggtttctataaaaacagctgcctcaaggaatttgccacattccttgggtctgcctgagctctggtggcccactgcttggataggcctggtttgtttgctaacttaacatgcttgcttaacggccaaacattcccttgaaattcaaggactttctgtcccgctgacactgtttatttgtatcagtagagtggagggctctctggtgacactctagttttttctgggttataagcagatgcaggtctgtagtttttctgacttggatggggccaatgggtctaagccaagaggaaaatgcttttttctttttcgtgtttatttccttttttttttttttcctatcttgattggagtacccttagaaggaaaaggagagccataatcgttctctggaggccaaaagaaggccgaaggatgccaaaaattgtcacagtggtgacttttggctggagccagtgcagaatgaggggctatgagtgtgtcactagaactgtaatccagatctcttccatgaggtcaggaaccctgattcgtattgctttttccatgctgtagaacatgacaccccactcaatcacttgtgctggttcattgttacttgttatagtagtcattgttatcaagactttttggttgtaagtgtcagaaacctaactcaaacagagstaagcaaaaataaatctataaataaatataattagctcaaaagtctgaactcactggattgatcttcagacataattgcatgcagtgttcaagcagcagctaccatctctccttcccttcctctctcttatctctgctttcctctgtgttaacatcctgctctgataagctttctccatgtggaatgaaagacgggctccagcctttccaggctcctaagttccttgcagctcacggtcccagaaggaaagagattgtctcccagcatctgtctccataaaaagaagccaccgtccttgcttgagtcatgttctcactcttggacttagcagagtccagaggggcttggatactctcacttggatactctcaatacgtgccagcaaggggcacatattcacccttcattgggcaaggtaagcctgttaacagtcccactcgaatcatggggagtaagcaaaaggaagttctgaaaatgaaagaatgtgggacagacataaaactcaaagctgtgcactatgctagtaaattattcttgtgtacttaatatgaatatggcttttataaacagtaagcaaatcagaagccaccctgtgaatcatcagttatctctagacatttctggattccttctttattccctgataatcttctttccttcctttcactgcgttgtaagtggaaataacacaagccaaaaagaccctctcctgctctcaatacacacatggtctagttcaggaagacaacatataaacagcaggcatacgagcaatttcagtagactgtgatgcctgcccagggtgctcgtggtctacctttcatggaccaaagacaacaggaataagagcattcatcttcctctgctattgtgagaatatagacagtgcaaagacttggatgccagtgctaacatccctgcctgacctgactttgagaaaaggaccgccattttcagcacaacccacaggttctctaaatactcaaagtgtgaggctagcagataaatttggcttatagagggagcttcataccatggttagaacacagcaagaaaggaacaaatttttaatgtattaattgaaaatcagatttctcagctgggaagaagatattagctggaacacacacaaaaaagtatttttaaaggtgcccttttaaaggctgccaaaactcacccaaagtagtattcaaatatgaagacagatgtcttttcaagacgggaaattttagttccgagtatgaaagagaattttatttatttgttttttcccttgccttttcaggcttttcactgacttcgaggggatgagggtatgtgtgcttaaagtagatgccagagtgtcttcttggaacttcaggtttccatgagtagaaggaagtgttgaatgaatgaggacccacggccctgtccagtgtggacatgccataaccctgtgctgagcttcctcatctgtgttctgggcttacattgaatatggcataagcaaccccgaagagccacaaaactctgctctgttaagggaggagggcaagtcctccctggaaggggttgtctcatcaaccaggaaatggtggtcaggatggatacagtagcatctatacctcagcccccttgaagtatcctgatgtccactccccacaaaatctaggccttccataggaagtcaagaggatattgtgctgatataaatttggaccaccagtgagtttgccctcagacctggtaagaagtgcatatttcagatataagatattgctctggcctcagctacatacagtttccataaaggaaaactttgaaggactgcctgcaggaaaagaatagcctcgtgttgatgtatctagggacagaactctcaggcaggacaacagcttcctcaagtcttgtgactacactctttttcccaagatatctcattgcatctttaatttagctcctaattcaaagccaagctcatggactgtttcaagctctggaccatgagcttagctctgaattaggagctaaattaaggatgcaacgagacatcctgggagaaatagtatagtcacaagacttgaggaagctttagtgaaaagcagacccacccagcatgtgtaattcttccatgaggtttcatctcacagtctgcatgtcttgcaagtgggcttagggccacaggggcaggagctcttggtactcagaatgttgtctagaagtttggaggagagagatcccttccaacctaggtcaaaaggcagaactggtaaaggacttgcagacatgataactttgagcacaatatctgagagagcaatccatggaagtcatttgaggaagagcattgtagacaacaggaatagcaagttcataagccctgacctcaggaacctgcccggtacattcaggagcatcaaggagaccatactggccaaatggcacaagtgtgaggaaagtgttggtaggaggtgatttcagagggatgcctggaggccagatcctggagagtcttgtaggtcattgtataactttgacttttactttgaatgagatggtaagcacttatgagcagaaaagtgtatgatttaacttacgttctaaaagaagtattctggctcctgtattaaaaataaactgaagggcaaggagagaggtggagagacccattgggaggctaacgcagacatttatccaggcaaatatcacttagacctcggtggtgcaagtaaggaaaatgagaggaaattgcatttataaaaatctcatttaaagatagagtcaacaggattcatcattggattggattggagtaaatgagagagagagggaaatcaaggatgattcaaagttggttttgtttttttttttgttttttttttttatcttgagcaactggagagatggagacaacattttaaattactttgttctttggtaacatggcagtaaacacacttataaactgtattacaggtggcaatcaaaataagcacctggctgatttgaaatatggtttaaaaaaaattacaaagtaaggaagatgaacttgtattgttctgcccatgcaaacaatctgtaaaactgtgtgcatttatatatttttcagtcattaatatttacagcgggagagaactgtttgtgaaatcatgaattatcttttgtttgaattttattttattaatgagttagaagtacctttgtaagccattgtaccttttttctaaaggtgagagcctaaaactaccatgttgcaatggaataagccctggttctagcttcacgccctgggagtgacttctattagctttggaatctccggtaactcctttaatcctttgaattctcactttctatgtcttaaaggtgatggctgcccatttcatcaactgtgaaatggcatccaagtcccaggtatcgttaagaaccaacggcttccattttaaacagaagttttgttaaacaaatatttggttttacaagggtattataattcatacccttattcattgttcttccttgctcccaatagtcgatgggttttttttttagctgtggcttatgtgatcaaagaggtgaaacaagttagctcaattggttatattctgaaattaataaggtgttctttttgcatgtgtatacaaattaacttccctctgtttcttggccacacacctcacctcagcttcacaaatgagtagaattgattacaacatgaatcagacaagagagtgtagatctatcactgttattgagaaagcagttcaaaaaacaagcattcccgcatgttagtaacatgtttttataaaagctgtaaatgtatatttattcatatgatttaatattttttatcttcagtttttattttaagttcaggggtacatgtacaggatgtgcaggttagttacacaggtaaacatgtgccgtggtggtttgctgcacagatcctcccatcatgtaggtattaagcccagcatccattagctattcttcctggtgcccaccctcccctgaaccccctcccctgacaggctccagtgtgtgttggtccctgcaatgtgtccacgcgttctcatcattcagctcccactaataagtgaaaacatgtagtgtttggttttctgttcctgcattaattcgctggggataatggctttcagctccatccatgtccctgaagaagacatgatctcgtttttttatggctgcatagtattccatggtgtatacgtaccacattttctttatccagtctattattaatgggcatttggcttgattccatgtatttgctattgtgaatagtgctgcaataaacatatgtgtgcatgtatctttataatagaatggtttatattcctttgggtatatactcggtaagggaattgctgggtcaagtggtatttctgcctctgggtctttgaggaattgccacactgtcttccatagtggttgaactaatttacactcccaccaacagcataaaagccttcctttttctctgcaacctcactagagtcagtaatatttcttcaaatatgaaggacttgacctcagatcctttatgatgatcataaatacataaatagataagttaaaaaataggaaggacagtgtgatactaaataactacaaaattagagatgtatcaaaaagtatttaggcactaaaatagttgagagatcattttcagagcctccaagagtttctatgccttgaattatttgagcatccagtgcaagctttcagagtccttgcttccttaaatataaaacaagaagtcagatacctttgcctctgacttctcagaggtctttgagcttgacagttctataattctatgagttttctacctagaaactattccttccattcagttaggaaatatattcaagtatattttatttaatcttaaactttggaatcccattttggtaagctgctgttatttgaaggtgttgacgtatcctctgggatctgagaaaattattatcaaaaccaattaaaggaatcatctattttgtgcgattggttttgaaatctgtccagtgggctctttctggaggcaaggatcctggttaccaagagactttgctgcaaataaggcaaactgggatgacatttggggttgggatccttctcaggaccaaatgggcacccatcatctttgggtctagaagactgcactggcataaagcagctgacttcctgtagccttgcagaaataacaatggggtgtgtgtgtgtgtgtgtagtgtgtgtagtgtgtgcagtgtgtgtgtgtgtgtgtgtgkacaatggtggggaacagttggcagagcaatgagcaagaaatgggaaacgacactcagaaaagcagcaacctaccctgagcaaatcaaagaatttcttagaatgcaacactagctgtgtgtatgaataattggcttgcaaatcacttcctctatttgcttgttatataataccaatcatttcagtgtcactgacgaaagcccagaagggaattaccacttaccagccagttttacatatggcttttgtgaggaataaggccttgaggatgagggtctaaatctctggcccacagatctggacaggcagatttcaagctgatcattacatatcttttgagagagacaatcccagacgaattggcctggggggcaacatgagaaggcaagacaaaagaacattgtaaagacttcacctagaatccaaattgtagttctctcagcaagttatcaagaagcaaattaactgctagattttgtaatccaaagattatttaatctgtttagctttgtgttggaaggatcgctactaatcatctcttttattaaaatatgataatgatagccatcctttattaagtgcttatgatataccaggcactttgtatacatgatttgccttattcagaataaccctgaaggatcaatattattgtctccatatcaaagagagggaaactaaggcatacaaaagttatttgctcaaggtcaaacagcatggtaagaggaactgcaatttcattccaggtcttacggataccaagtccsatgcctgccagcttgcacctgttaagtcatgtgatacttaggaaatgtacacatcaccccagtgcagaggcctttatccacttcccttcattttgcctggattgttgctgtgagtgagaaataaatgacatgaaatgatcatgtatatcactgtcttcagaggatggttagttccttgctctggattgtttttctcttttgttggatatttattttgacttctctgcaaactaaaaatatgcatgctctagtttctcttgggtacataactcccaatatattgtgaagaatgaaactggcctacaaagtttaattaagaagcagtgaactagagcttacttagacaatacttgtactagtgtgggttcatgttgtccatttgtctttagaggtgtagaaccttgaaagtcagctaattaatcactattactgttgtgtacagtattggcaatctcctatgctaaaattttttgtgatgatttgaaggtgggagggggcaatatttactaagtctctcaacctacatggcaatatctgaaacctgcttataatgtagtaatagcttaggcaccacctatttctgaaacataaatcatcccacaatataagcctcccagttttattcatgcgtcttaccatgtataaatatcttttaatataccatttatttccttgagggacagttatttgtagcataaatctgcctggataaaatagtaaaaattgctatgccccagtgaattcagtttacaaaagcttacatacgtgaatgagacattggaaatgtggtttatagttaaggagaatggatcacrcggattatacctgtataacttccctagaaggttgataccactaagatattaacaccaaaaaactgaaaatagtatttttcatcttactttgttatgtaccctttgtgaatttctgaaaaacacctttctattatgatgggataaattacggtgtggtaacaaacaagcccaacctgtttgttccggtcaactagttgctttataacaaaccaccccaaaatttgtttaaaacagctatcatttgattgtgctcacaagttctgtgagttaggaaataagacmcaacmcagtggtcttatgtctgttgtgtaatgtctgggttctcagctgtgaacactcaaatggcttggaaactgaaatcagctggaggcttccttattcatatgtttggtgcctggctgggatgactcagattagttggggctcttgacaaaagcacctatacatgaaccctctcaggagccttggctctatggtggctggattctgagagggagcatgcagagaaaagaattccaagacaatggatgctctaagagaagctacttggccttttctgatctagtcttggtggtcatgcagcatcacttttgccacccagatcaaaggggaagaggagacagactccacctgtggatgggagagtgtcaaattcacacagaagttgtatgcaagctattcttggtcatcttgctcatctatgaaatataccctcctccatgcattgacttacaacaagggtttatttcttgctcaaagtctgctgtgaatctaggcaattctccagagcagctgttcttttgttggcttagcaatccaagctgctgcttccatcttacagcttttccatatcaactcatgattccacaaccattgctacgaggcaagagtagtatggaggatcacacactactcttagaaaccaccagctggaagggamttatatcactcctgcttacatttgatggctcacatagccatgcccaaattcagtagagcaagcatggccctcctgtgtacccagaaaggaaggagagctagaaatattggtaaatagcaatattgtttaccatagcctcagagatattgcctcgtggtgaaaccctataattcccctcaattctgatttttgccctttatcaaatcattttattcattcyttcatccatccaacaaagatgttttatatgcctactattagcaacwatcagtagcttgttcctggagggaatgcagctgctccccgccaaaacaccatataattcactctagaaaactaaaatttcagatgctttgtcattgattattgtggggagaaaatgtctctttcagctccgactttgtcctgtctcctctaaggcatgtgaaataagatttttttttcctattcttacctcctatggtcccattttatggttttcatgcactactgtcagtcaaatatttatcatatrtctttcaatatctttccaatatttatcatatatctttccccttgtaggccttaactttatgacccactattaagcacgcagctgtatttccagaaaatgtagatggtttaattcaatactgcatggcaattaactgtcttataaattaaatcattttaatccatcttagagttatcatgcataattagtctgacagcacaattctgtttgttgttgttttaaaggaaatttagatatcaaggctgcaaagaatgcgtaagtctaggcagaaggctcttattttccaaaagcagagcccatcgttgcatttcaacaatgaccgcaacaaaaaccatcaggagctgtttggggcctgtttgtgctttagtcttcaattagaaaaaaatgtgtttctgatggaaaaccatagaacaatcctcactctgtggtaagaaagaataaagagaaagaagtgggctctatgatagactgaagcaagaatactattttagactaggtagtggccgggcgtggtggctcacgcctgtaatcctagcactttgagaggccaaggtgggcgtatcacctgaggttgggagttcgagaccagcctgaccaacatggagaaaccctgtctctactaaaaatacaaaattagctgggcgtcgtggcgcatgcctgtaatcccagctactcrggcgcactggctcacgcctgtacttgggaggctgaggcaggagaatcgcttgagcccaggaggcagaggttgcagtgagctgagattgcgccattgcactccagcctgggcaacaagagtgaaactctgtctcagaaaaaaaaaaaagactaggtagttatcttcctgggtggttttggctatgtagaaaatcactcttactctcrattaatttatgtaccaaatcatgctttgaaatatcccactgaaaaggtctaaattattgatatcttgggtcaagttctgacttgaaggcaaatagtaggaaatacaatggcatttattggaggcacacactacaaatattgtagtatctttaagatgtgtttaaataaacaagtagatgataaaactataaattagagtcactaagactctctagcagagacccttaccttttgaagtgcaccttaaaatggcaacaacacttatcagaaattccataagaagcttagttgtctgctactctattgcagtatcatatgtgtgagctgcatgaaaactggatattattattatcaaaggttattatcaaatggagcacaattttattaataacaatattattattatcaaaggttttaatttgctaaaactatacagcttccttaggtcttccaaactaggtcagccagttaaccctcagatctggagtaccacatttggctgagtcagaagaaataaagatgctctcaaaaccacaaacaaaactgataatagacattctgataactttaactcccacagtaataaatcttgggtcttttaaagttggtcagatgtacacagagctgcttactaattatactaaaatagttactaagcaactcgacattttgatttccaagaatttcagataaagattatgaactttatttatttggtgctttagagtccaaggcactattttacagcctaaagctgtatttctcaaggccatcttcttgcattcttctaaaacttaagagggatcatctgtcctcaaaaatataagaaattctgtaaatgtgtatttttgtgtatatatatatttratatttaaaattctgtatctatatatacttccaagaccccttagaacttacacggtacctgtaatttgtttcttttttatacttaagtacaagtaatgttagtgatacatttaaaactaggaattaccttgtttgcaatatcaaatttttgtaaaatattgagttaaaaaagtctcctaaaattaagatttgaactattataaatggcttcaaagatcctttcgtttctaagagaaggaaggaattaggatttattgtgcatgtatttcataccaggtgctcatctacagttattgaatccttgcaacaatcrtatcaggtaaacgctgttattcttctcttacagatgaaaaatctaaaccttctaaaatgaaagtttgtccaagttaacatgaccaattaggagagcttggattccaacccaaatctgttcagtatcaaagctcactctcttccatccttgccccttctcagctcacatagtagctttcagmaaacagtagctatctamcccagataaaattaagcctttttttccttaggagaggctagaaactgaatcttctaccccctttattggcatcacacaggcacaaaaatcaccaattctcaaaaaccctatactcccaagttcaacmcaaattgaatggttggaatattgttggtttgtatggaataattaacccacatctaaaaattaattatacaaagtgaagtggagattgaagcagttttctagataattaaggcaaaaataactgcaatttttttaaaagacagtttgaaatatttagaagggtagattgcaaaattatccaacttaaggtagtcatattcagggagtttagccaaaacacctctgaagttcattgccttacaaatgagtataaaacttaaacctatgattaattccctgttgtttttctatctgtattatacatataaatatattttatatattgtcctyctgagatttcaagagcaattttcttctaattcttctaatttcttctatggattcaccatagtgaatccaccgacacgtctaccctgtgacaatcttgttctccatttgattgcatgaaaaataccatatgaatttgacaaatcattggtttttttgtttgtttttctcttttgctgcatatcattgcctatgcttcttgagcactagaatatatttgtgcatgtataaaccaaggcctttcttctgaaaattaatagtactttgaatctcttctatattctggttcttttaaactgtggttgttttaagtttgcctctcttgttttaggatttattctttattttgaggccctgatttttcacaaaacatttttctcaacgaatcctgagaacactggacaatcatagcttttagctatcatgagtcccattaccctttggcctccagttaagctctgtcctgcaagacataaattgtctgattatcaactcctactttgagtgaaaaatggttgaatgaaatgaatatgcagttcatttcaacaaagcaagaaatttgctgtttaaaattgtgtttttataattcttgagatggaaatatagcagacctctgtgaatctgagaaggcatttcatgcttccagaaatgaggggagaagtggcaatgatattgctcatgaacaattggaagcaatgatactagagtatgcagcaaatctcagggagatttcagtggtacagtaactggcctcacaaaagtgggatttattgcattaaatctttgctgtcctttctggctggtttgatatttaagaaattattaaacataaaattgtatgagcagttacctatggtaggacaaaatggactgacctctaatggcttggtagatgggataattttgggaagagagagtggagctcagttcagcatcctactctcctcctcaacatcatttcccattcttggcccttgagtttagataggagttgggcatgtgtgtgtgtgtatgtgtgtgtgtggtgaagtgggtagattcctgttcccaacccaattagataactccacttccatctatcttccttgcatcttctccagctcatttgcaaaagaatgaaagaagccttgcttcaaaaaggtttagagggctaaataagagcacaaactggattttctgaaaactgacctgattgcctgggtaattaarctgtcactccagcaaaagcatttgtctccaaaaagtactgaggttgtctttcatcactctaagtctagacattctgaaacctccatcctctcctgcagagagaggaattaagtctccacatttctaaaccattgacagtctgtggggtgccccattgtgttcctgacttcctattctcagaaggagttataacgatgacaatgatgcatgcatgagacatrgaggtcctccccagccctcggttaggaagtaaggcagccacccatgtactgaacacaatagtgctttggaaagagctctgttaaaagtgagtctcaaaaatgtaaaggcctttacgagaggaacttaatctccagtgtgataaaacgatgcacacattacaaggagatggatgttatgaaaacaataagtacacccaagagtacacgtacaaatctgcattgcaattgatttatttggatgcctgtttcttcctacactatgagctccttggggccatgaaattcatttgttttatctatatatactctctttgatatcccccaccctgacagctagtgyagtcctttctaaatagttgttactaaatatgtcaaatcaaatgcctacaaggactggttggtagaaccagattctggaagtgaccaagcaggtctagcttcataagaatgccatcatcgtagatttgagggtcatgatgaagttgtactaggatttatggaggttctttgtcaaccagttcacaccaccagtgacttaaggaaactatatgtcgtctattgggaacagtcctgcttaaagcaattagcagggacaattaatttggagggaagtctctctccactcaacagcattcaaataccctmtgcattagccatgttttgaaaaactccaattgcctgagtcactgatagacaaacagaaatgcagactattttgtatgcagttttataaagaagtttctaaccagagaagaaaggtgttattttgaaatattaagctcttagttgttctttcatttcagtgaacatttgttgagggcctgacatgagctaggcacatggcaaagttttagagatgcaaaggtaaattaagacccctgtgttamttctcatgygggcaaagcaagcacattttttaagttgcaataatgcaacaatggtggtgtgtacatagtagggcaaaagcatagagaaagccatggaaatcctcaagccaagttcaaagagtcctctaatgtatggcatrccacaacaaggaccttcaaagggtgcatttggtaagaaaaggcaacctccaaagattcatccaatcctaaggtttcatagagtagggacttcttcccttagctggaaaggaaagaagtcatttggtgtgcagtagacataaattaggggccgtccactttttcttgcaatgattcatctaatggaggagcagaccctggagagaaacatatctcttcttgtcttcattttgttcttcttttattaaatcacccrcaggacaaccggatgctccagcaatagattatagaaaaaacagatgggtatttctgtgcagtcagaaggctcctgtgcccttttccagcataaaacgtttrtgaaaatcaattttcagtgcctgctgaaccaggctgatgtgagaactagctttccacagttcataatattcactccgggatgatttgacagggctgatattttatcacgaatacaaaggagatgagcaccattctcctaatatattcattacttgtctcaccaccctggtaaataatatgcatatggtaatttgagagacacagtgttcccattgctcttttttattcccagaactctggctgtcttttctaaatgctgcaaatcaaaggcaaagttacctcacgcacctgtagtcccagctactcaagagacagaggctctagaccaggacttgaagttcagcctgggcaacacagtgagaccctatgtctttaaaaaaaattgcctaaaaatttggccaggtgcggtggcccatgcctgtaattggaggaactttgggaggccaaggtgggcagatcacttgaggccaggagtttgagaccatcctggccaacatggctaaaccctgtctctactaaaaatacaaaaaaaaaaaaaaattagccaggcatggtggtgtgcacctgtaatcccagctacttgggaggctgaggcataagaatcacttgaacctgggaggcagaggttgcagtgagccgagattgtgccactgctgtattccagtctgggtgatagagcgagactctgcctcaaaaaaattamattaaaatttaaaataaaaaattacttaaaaatttgattttacattcctcctattctcactttctggtgcccatacaacacataaattacattcttctctatgtttacctgcatctctagggaacaaagcccctttcacttgttctgttactatagaatgttctacaataccccaataaagattcattcatttgttcatttacaaatatctattaagcacctactgtgtgtcaagcagtatgctaaatcttaagcatgaaacaaaagaaagataaaagtatctgattcagggactggttgttctgttgttctgggttttttttttttttttttggaagcttgttgaaaatctgtggcatcatacaaaacaaaaaagaatgcaaaactggtgccttaaatagaaatgtattaataatgagtgttagagctaagagaaggcaaaatgtctacagaacacatgatttcaattaacaacagtgagtaaacgratgakctggaaaaaaattatgatcgggcccatgatttttttttgtcgttttttaaaaattttgtttgtttttctcatactcatattattctaaggcccattgattttagaaagaaaatctgttttataaacttagcatattaaaagcaaatgcatagctccattttcttagaaatgcgtgaatacataaacatgttttactgagagtaggacttaatttatatgtattaaactgtcagaatatacaagttctttgtggtcagtaattctttcattcatttaacaaatatttcttttgctaccatggatcaatcagtcattgttataagcattgggaattaagagtcctgccctcaagtttacatttaggtgagaggacaatgaaaacaaataggtgaacaaatataccagataactagaaattgcaatatgkgccatgaagaaaacaaacgaggtttgtgtgtctgtaaggaggtactttgcataaggtgatcagagggagtcaatcatgatgataggggaggaatgtcagacagaaacagaatatttacctatcgtttccagaagatagtgctgcctggaaaatagcagtatacatttatctaaattacagatttgcaaaatacagccagtggtctattttcataaagttttagaaccatttttgtaaataaagtattttgaaacacagccatacatattctttaacatatttcctatagtcgtcttcatactgcaatagcagagttttatagttgcaacaaagaccctatgggccacaaagctgaaaatatttaccatcttgccctttatagaaaaagtttgccgactctggctctaaattccttatttgcataatcataacttttttgtattttttattttgttgtttttagacttgtaagttcatatcaacaatttatagaaactctgttaaaatatacctagtgaagacagctgacatttattgggtgagattatgttccaggcactcaagtactttgcatgaaatgcattacaggtaatgcccagaacagtcctatgtggtaggtgctattatcactcaagcttatagatgaggaaaatgagaacacagaggttaagtaactcacacagcaagtaaatggtggagccaagaatcaaaaccagacaacctggccatagcactattctaaactgcctctgtcatttaatattctgtaacctcaccaccataatagatctgccgcttaatactgcctatctgttcctaatttgcaaaaggaagaagcatcgtgcaccatcttgcaccaaagaatttagaatttgtgttggagccaaattttactgttattccttgcttagcatttagaatatgaagaaggtttccaagtaatttcctctcaagcttcattragaagctttgggtagataattggtgctttcaagaatggtcctgctcacactggcaatcaagactgtttctttagatatttagaagtgctcattattaaattcactagataattctgcagccttctctcttgttgtggctataagatgtgccattagagcaaatattgccttcccctttctccccatttcctaaaaccccaacataacttcagcatccccatctaaaatcgccaggtgattccacaaaaatcccggatatgcttggcacaacctgtgcaaacccacctgaaaagtccatttcagaaagccccaattctgtgatattcagttcaacctaggcatcaaacactyagccctagccctgatactatatatctgctaatttctttggaaggtatctatatttctaggttttttgtttggccaacctattcacttctgaataggctgaagagatttgccgaaggttggtgtaagcttccaaaaktcacttgtacttaaacattttcacatccagtgaaaaaattaaacattcgagaattgccattttttccaactctgagtgtgggttatgaatagctattgagttatgacatggtgctgagcagtacctaatcacacaggtgggcaggatccctgccctcacagagtggaggagacgggaaccagttaagagaaaatgaacacgcaatgtaacaagtgctgtcatgaatgcaggatgatagagtggtccaggggcmtggcatccaatgaggagttgggggtgggagggcatagtccagaaaggctccctaaagcatagacttagaaggtaaaattgactagacttagagtgtggggagggggaggattggaaatcaatgattcaaggatgacatctggtttcatcatttacatttggttgaactattagccttttttcagtatatgtttctagacacacctgaagttgatacctgtctgttcaaatggccacacattctttcattcttcatggttgcttttttgtttcaagatagcaagaaaaccaatctttcctcattttgccagtaaccggctgtgggattttggacaaactactttgctcagcctcagtcttttcatctccatagggatattgaacaaaattatgtctgtggttctctcctcatctgaaattctaccttttaaaccccttccatgtcatagtgctttcatgacccccatagattcatgcggcatttcccaattctgagccttaggatagtgtgtctgttagaattgtgttacactttgtgtcagttaccaaacctaattaaccaaggacttaagcacattagggktttktttttttttttcaggtattaaggaatccagatgtaagcaatacatgaatgatgaaatagccaaacaacagtgttggggacccagactccttctatctttgttctcagtcatccctgttcccaagatagctgccccatctccagcttcaagtctgtactccaggcaagaagaaagatagcaaaaaaggcaaaatcaagggccagctgaattggcttagtttgaaagagctttcccagaagttcttagtggaatttatttaaatcttattggccagaactatgtcataggccacccctagatgtaggaggggaggctggaagatgttcttttttttcagttgggtacattaatatactaagcaaaatgagggttgtactgataaagaagaaacagagaagggatgttagacaggcaactggcattgtttactgaagtttattcagatgtaacattcaaaatatttaaaacagttctggcatagccactgaccaatcagaacagaaactggccagcatgttatagccagctgaatggcagccctgatgtttttctgctttgcattatagttactgtatacagttgtcatctctcctccccccacatcataaggcctaagtccatcaaggacaggattacactttgcatgtgttctttacagctctcaagaaagattcacacagagtaagtgttcacttttgtgaaagagaattaattgttgaattattcaaattgtaatccagggatgagacaacccaaccaagaagtgttcaaattattacctagtctattttctcaggaatgaatgatttatgtgattggtggctgtatcttcccaaattccacaattgattataaacctggccaatacagatggactttgaaggttgctcaaatctcttacagctactcaaaaggattattacrgactagaaaaagtattgcctgcagtgaaaagcttcaggaataatagagttcagtagccctttttcttcatttattacattgaataaaactaataaggagccaccccaataatcaaatcaagtcagttccttaaagacttgcatctggttcttccagcctataatgaacataatagcgcatcatttcttttcactcagatcttgagtaatcataatgctcagaagttgggatggagcattatagttaatttaattttcttaaaagcttgaggtcaattggaaaattcatgtgttaattctaattctttaaaaaattacatttttaatgtttgtggtttaattttcaccaatgtaattacttcaaagacttttattttctctactttgctcatttctaaatgatattttaacatctatattttttatttgctctaattctccagtttattctccattccatgcaaatcttgaattgagatgcaagtttatcctaaattattwgragaactgataatgggctaccaagaaaaaatacatacatgcaatatccaatttccaaactggctttggtaagacatatctttttgagaaatcatttccattaaaacacctctcagatgcaaattattctatggagtaataaaagttagactataatgggcattttgtttcattactttatctttaaccttttagtttggttccttttaatatttgaagtatgtgcttacatctgtcgtcttctaggaaaatccctatttttatgtttgtatctggattattttatagtatgtggggttttttctttctaccacacatcttcaattctaagaggaacttttttctttktttataattgttgaccaggattcattttattrttagcmcttgttgaaaattgtagggctggcctggtgcagtagctcacgcctgtaatcccagcactttgggaggctgaggtcaggagtttgagaccagccctggccaacatggtgaaacsctgtctctactaaaaatacaaaaattagctgggtgtggtggcgcacgactgtaatcccagctactcaggaggctgaggcaggagaatcacttgaacccaggaggcagaggttgcaaagagccgacatcgcaccaccgcactccagcctggatgacagagtgagactccatctcaaaaaataaaaagaaaataaaattatagggctaatatgtttatycaaacctcctatagctcaactgcctacaaaatttaccttttaactgcatggaaaatattccctctcccatatcaaatttcaaaaagctatgtatttttttctttccttattttttgtaccttttgaccaatatctgtcctttctcctacccctcagtccctgacaagaactttttaaatacattttattatctttgaaattggaatacatcttataattttgggcatatcatgatttaactggaagattttttttcttggtagtaaataaagtaatggcagcagataaaacaattgatagcttcttagatgcattgaaataaagtaatctccaacagtgacagtgtcctttgaagaatttctgaatgatccagaaacctgctgtgaaccatgtattgtttttgactggtgccctattgtatcytcaccaaaatgaagtttaaatctttgaaactggaaaataagacagaataagtatatagatattcttccttttgattctctacacagggtgtttttctcaatcacacagttgaatctcactggcttgtgcctttcacatgactaatgaaaccaaaatgtgcatcattttraagcatgtcctgttttccataaattccaatctctccacagcaattccatcacaaaacagcaaacaaatcaaaamataaaaaacttcctgactgcccatctcctcaatgaaaatgttgtggttttaccatgatgacattttctttaattgtggtaaaatacacataacatagtatttactgtcttaactattcttaagtgtacagttcagcagtgttaagtatatcggattgttttgcaaccatctccagaaatcttttcatcttgcaaaactgaaacttccawmgtatcttttaaaaggccattcttactgaagaattctcgcatagaattgaaatagctcatctctagctcttagctatgcagcccttctaatttttgtcgaacattttcaaatagctctaagcctcaagcctgagatttagccctaacccaggccagactggaccactaaatttttaaacattttttccaaactatactctctttaagtatgtgtgtataagaacaaatggctatttcagtctataaaatgaaattaatgaaattaaacattttaatattttaaccctttattttgctttgagatggagtctcgctctgtcatccaggctggagtgcaatggcgccatctctgcttactgcaacctctgcttcccgggttcaagcgawtctgcttcccgagttcaagcgattctcctgcctcagcctcgtgaatattttaacacrttaatatttaagaatgtttcctcctggttgattcccactaaaatgcatgtgtccttccattaaaagagcccaagcactacagtgtcatttccatatctcttttcttgtcttgccttgttatttaatgactgaatgcttctttgacatcagagaataacctttcatgatatgcactcaaatgtgtagatgaatcagataaccatatccttgttaaaggagattattctgaaatatatgaaccaatgggaagacagaatttgtaagacaggaactttcttactggatttctaggaacgctggacctttctggtgatgcctccagcatgtccacaaaggacaggaggccaaatggctgaaactcactgcatgctccttctggtaccctttcagctcctcttatctcttttctgtttggagatcctccatgagattttctataaggtaatgaaagttatgctgcttaaaaaaaagtcttaaaaagtggagaaagttcagacttatttaaacagacctggattcaaactacagtccagtcacttacaacccatgtggtctttagaccaatccctaaccttctccaagccttgttttctttgtgagtagaatgaggatcgtaatgtctattgttatctctgagtcgctgtaaggattaaaaagtagagtgttattgcatgcgtcctcaccctcagtaaaygtttgctgatagtattctgcattagaaattgmagagtaccagacattattgaagcatcactttttctttttttctgtctccttctactcatctgcctctgttagaggagctcaggaaaaagtattagctaggctttttttttttyctttttctttctttctggaaggcaatagttctcaaagtgtggactcgataccagcaacataaacatcgagtgggaatttaatagaaatgccaaatgtcagaccccaacccagaactgtgaatcagaaactgggggtggagcttagcaatctatgtttcaagccttctaggtgattctgatgaagtttgagaaccactgtaaaaagtagagattcacgtgggctagccagctaaagtgggagccggtgaggttgagggtgggcggaggtagtcagtagcagagacaggaaacgaataggaactgggcctctcaaggaagggaaaccagatctgaggacctctgcagctgcagttgatgagtcttcaccctgatgctgcctctcccatgcatgactcagtcaacttctagggcagtgattctctcctgggcaattttgcctcccaggggaatttggcaatgtctggagacactttttattgtcatgactggggagttgctactggcatctggtgagtagactccatggatgctgctagrmaccctacagtacacaggacagcccctatgacaaaatattatccagtccaaaatgtccacagtgctgaggctgaggaagcctcttctagagattgtcctcccaagctgctcgtctctttttccttcaccaactaaggctttaccttgtacctragaaattcarttggcttttttgaaccttatatgggttcatacatgggcctcagagagtccacaaacttgcacaattctgttattgtgtatgtatttattctgcctgttggggaagggagctttcatcaaattctcaaaggttgtattctatgttcattctgcgtatgatttccctacctcacattttctgctcattcatcacttctctttgccacactgccgtttttctacttcataacttctcagctgcttctcacattgctgctttcttatcgtggccatatttcccagttcgaattccgaaggtaaggaatctgattatcctgctctcccctattcggacaaagcttttcccaccagacaacctcataggcccctggccttcccacaccacagctgccctgggttctggtcaggtccyccatgggatgaggaaggccagtagggagtcaatgtcacccagaacaaaacatggctgcccaaggcaggctccctcaggacgggcactggctgaggcaggcatcgtgattgccgcgtctaacaaagatggtcagaaaacccyrgggttaggttctggctagagaagccacaaagcacctggaaagacaggaagatactggagtcartctgaaactccagggtgtggcaaacacrtgyagaccctcagaagcctaagaggaggttttgcagaaccacgaggaaaaaataactcagggacsagaaataagggtcaggactcaaagcagtggacataatcaggacagaacaggccgaagtgcagacacaaaacagatcaataaaacccaacagctcagcaaaggtgaggcagctgtgtctccctctggctgccttttctcccctcctctctcaccagaagccaacgcgtacacrctgagtggagaggccgcgaggacaagacagtgggacatgcgtgtgctggggaagtcgagaagcaggacaggaggcaggtctgagagatctggtttgtgtcttgtgccctggttctctctgcattccttctctgtytctttttcccttcctcatgccttttccttagctgatttccctaggacagaattattttctttttcggactgaatgrtaaagaagtatttgtttcctaagtcttcatttcaaaagcaacaggatagaactctctaagaaaaaaaaaaaacacaaatctctaaatgacattaaattacatttttatttatgtagccttgaatggattgttctactttcagtcagtagatttaaaaggggaaaaaaaacatgttcctcagtccaatgttatagatggcttagatgactgggctgcgttacaccagcaccaggaaatatctagagcagtggttctcaaactttgytccacattagaattttaaccctcaggcggcaccccacgccattaaatcagaacatctagggatgggagccaracagccgtagtttttaaagtttctcagatgattccaatgtgcatcactggrgactcactgtctaggaggtgattttaataaagccctgatccttgcttgctttcttgccactttacttttccwccagtagaatgtaacaaaagacaccttttatttttcagttaattaaattaaatcccagttcattgaggttgtgctctaatttcatgccagaaggcaaccagccgggtagttgcttacttcagtcaaaacaacagaccagcattttggcatcgtgtagtcaagcaatgtttttatccactgatgagtggttgttagtttaatcttcaactttgtaacttggtgtttaaatttatccaaacacaactttggaccctggagatatccggacttatttactgcccaccaaccccctcccccactccccgcccttattcaccagagtgaccagaaagcaatatgatcttcacagcgccagatcttgctgtgataatccraggaaagaggagccatcaagccactcaagcaacatctcagctgctcagtaaatctttcaagagctcacccaagtcccaatctcagcttcctgatttcttttcctctttatatgtgaagggttttgttgtttgttgtttattttttttattttcataggtttttggggaacagatggtgtttgrttacctaagttctttagtggtgatttgtgagattttggtgcacccatcacccgagcagtatacattaaacccaatttgtagtcttttatccctcacccccttcccaacctttccccaagtccccagagtccattgtatcattcttatgcctttgcatcctcatcgtttagctcccacttatgagtgagagcatacaatgtttggttttccatttgttgttcattttttaataaacatggttgaaaagactaggctatagtaggtcagtagggcctgtttctgagtgtggtctgttttgccagcacattctcatgaccacttggcaaaaatgagactgtgacatttttttgctcccaacagatgtatttttggtagcccacaggttcttcatttgtttgtttacagtctttaaggagagaaaacatgctgtgaggaagggatcagattgaaaactgcttaatctgatgggaaaagcctgaaacacaacttattgatggtcttcaaaactatgacaggttagaaggaagaacattcaagctagttggtctctatttccatggaggaagtgagcttaaagtgcagttaattgggagtatagtgagccagagacaataactttggaattaaataacaaatttggctgctaagaaagtctatggcatctccattcctaaagaatcagtttgctgtggaatgggagtcagaaatgggtgggttacaattctgctttggtctctgactcaccaggtgttacatggcttttcagggcctgtgttagtcaacattccccagagaagcagaaccaatgggatatatatrggtatacatgagaggagatttattatggaaattggctcacacgattatggaggcaagaagtcctattatgtgccgtctgcaagctggagccccaggaaagccagtggtgtaattcagtcttattctgaaggcctgagaaccaggagakctgatagtgtagctcccactccacggccaaagcctgagaacaagagagaggcctggtataagtctgagagtctaaagccctaagaaccaggggtctgaagtccaagggcaggaatagagggatgtcccagctcaaggaaggaaaattttcaccccttccatgtttttgttctattcaggcccacagtagattagataaagcccacccacattggtgagggtggacattctttactcagtctatggattcaataccaagtgtactgggtgtttctcccagaagcaccctcagagacacatcagaaataatattttatcagctatctgggcatcccttaacccagtcaagttgacacaaaattagccatcacagggtgtcagcatcctcatctatcaaatgagaagttgagctggataatccccaaagtccctcattgcatacgaatgtcctatgatatttaacaataggacatgtagccttctgccttgagaaatttaggtactaacagaaattgtttccctgaggtcccttcaacttcaacaatttagagtaattcaccaatgtgtttcctattttgaataggactaatgtgtttcctattttgaattgcaaaaaatataaacatatccatatttgataccaagaaattagtaattctgttggatgtgaaamgaacacgggttacataagaatatggtcataattgctagagatatatactgaaataggtaggagtaaaataacatgatgtctgggatttttttaaataaaataatatatatccagatttcacaagatttcctttgggctggaaaggtttctgaatatagtgcctgtgttctagaaagaggggtcaggagcctagagtatgcagatgttgatggtattgagtgttctgtacacagaaccaagagactagagactttagagrccacaaaatgcttttcctaaagacctagaacatgaaggtttaatttatttccctttttctcctccatgtgttttggataggttggtaagtggaaatcaattacccctgaataaaatagaaaccctgagagagataagtgacttttctggggatacatgctaatgacaacatcaaagccagagtgaggattgaagggtgaggtactatgactacctccctctactcctccttcccctcctgctggggaaatgccaaaggtataagtatccttttggcaccatttgtcctccagggtttctgtgtctgtcctgtatctccttattcattcttaaaactctttctagtggtcagagctctcctttaaagaaagaataacaagacatcatagcagtgaactcagagcactatcactggcttttcacaggacatgagcaactttctcactggaggggtcagggatgcttgyatggtaggtgctcctgactgtgataacttcacttgagcctaccctgagaatgaccctgtgtggcagatgcacccaaatrtatgttcagagttccaagctaaggaattggaagtggccatcccagagattcattccttatctatgaggaacatctgaaccccagcccgtcccagggaatgtgggccatacaggggatcagcatcctttgtttggggttaaatgaaggttgccaggctgaggttgctagggggagggtgttaagtgaaaatgttttataaactgcatgccttttgccagcgattgtggttcttcttaccagcccactgccactggaccagcagttctcctgtccagcccgccaccactagaccctctcccctgtatgtaaacccccagtaaaaccccagtgtctcattttctagctctggatctcttcttcagcctcttgaacctagtgccatcccctttggagttgatagggattcagcacatcactgctacactagaataaaacatgtgctgtgtccacattaggccaacaaaatcccataccatccaacttttttcactrattaaaaatactattaaatttyaaattggttcatataagaagttgcagaaaaggtgtttgtaggcaaatccagctgactcacatataaatcatctgtattagtttattagggctgacataacaaagcaccacaactagatggcttacaacaacaaaaatgtattttccgacacttctagaggcaacaagtgtggaatcaaggtttcagcagggccatgctccctctgagatgctgggtggagtcctcccttgcctcaccctagcctcttgtggtggcagcactccttggcattccttggcttgtagctgcatcactccgatctctgccgctgttttccaaggtgtcctccccgtgtgtctcttctctgtcttataaaaacatcmgtcctattggattaagggcccaccccactccattattacttcatcttaaccaattacatttgcaaggaccctatttccaaatgaggtcacattctaaggtactggaggacttcagcgtctctttcgggaggatgcaattcaacccataacaccatccaaacaaatgacattatgagaaggyttccatttttgtcctctgttgtggttagattcctgattttacataatttagagctaaaaatttacttcctgtctgaaaagtgatttttgacaaggattgagatcacaactcgagttctgtggccattgcttgccctttcagaatcacttgtcccatcctgtgtgccatgttccaaagaagccaggtgagcagatgctggcgacacagggatgacagcatagactacagctttaagtgaaagggactcatgactcaaccctgtagcttgcccttgctatggttgccccacccctcccaactccttattcctcctgctttgctgaaaccacagctgccttgaatcgagccattttgattctgccgcaaatgagctgtaaaccaaatcaagccacatcaaacaaatccaaccaccatcaaaagcaagttagtcaatttttgttttctttgcaatggggaggggtcataaaagccttgtatatcccagggcaaatattaatctgtctgaagagtcagcttgccaacgggtaatcagcaaacaggttggtgctcatgagagctgcacagactggtagttgaggatattcggtgccaggagcaaaccccagcaggcacccttggtaaatctggcaggctctgtgacttcaccctctgcattcggaagcaagcattcaaactttgacaggcttgcgacatgcccagggtaagtcacctggcttcttggattctggacagatatccttgtgccacaagctcacttctctttctctgcttcaggactaggtccttcaaggggatagcagagaaagcatgtttgcagaatccatgccttgtgcccactcccaccctactgcttggcacttttagggaaagtgggaaggagtaaagttactctgtcactggcagaggagggacagtaaagggaagaagaaaatgggagaaatgagaaataggtacccaatgagtaaaaaaaaaaaaattgattacagtgcttaaaacctatcactacagtggtgatgtttctgaatgatagagagggtggatttggcaaagcttctggaatcttttcagacttgaggtccacctcctgtcttgagaccagttaagtttcaaccccacatttgctgtggttgatcccttgacctttgtgtaaatcctcccaactttgttaggccagaggaatgtggagtaagggttctgagttgtacagttccacagtgactcatctggccaataccttaaggatgcaggaaatctgagcagagaacaagactccctcaatatttagaaactggattgagatttcaatccaaaggatacaatttgcccatcaccttagttgcttgtacagtaaattgagcacgtcaataacactaagagaactttttctcttgatgcctaaatgccaatcacaatttttcttagttctctcaattggcatcctggttcctgtctcactcctactgtagtgcacacttacagaaatgaaagctgcctacataaccaccaccagcatccagaaaggagagaatttgacaccatctctttttatctccaccagtttctgctttttagtcattaacaaatggctctggttccctttgcagtgaagacccacagaggcagaagtccctgctctgagtcagttcagctctgattttgaacactgactgggtgctcagcagtaagggttgaaaggaaaaagagggaatacggggaaggaggcagagatggagacagatttacaggtcttgcctgagagttgtgcttgataagcagagagccaattatctctgcaactccaccttcccagcagtcaaatacttgatgggcaggttaaaaagtgaggaggtgaggacaagattaattatcaagtctcagaggaggtgaatgaaatgccttcttgttcattgctatttattcaaaaagagctgctgaacatgaaagaatattatcatttttgcaaataattagaggaaataataggcttgtattttttaagcagctttattgtgatatactttatgttccacaaagttcacttgtttaaagtacagccagccctttgtattcgcaagttttacatccatgaattcaaccaatcaaggataaaacatattctgaaaaaaaatgataatacaataaaaataatacaaaatgtaaaacaatatagtgtaacaaatattcacttgctatttacatagtattcgcattgtattcagtattataagtaacctagagatgatttaaagtatatgggaggatgtgaataggtcttatgtaaatactacaacgtcttgtatcaaagacttgcgcatctgtggatctggtattctagtattcattagatccacagatgcgcaagtccttgatagaagatgctatagtatttgcatataaccaatttgtatgtggaaccaatcccccatgaatactgagggacaactgtatacaattcaatggattttagtatacagatgctcctcaacttacagtggggttagatcccaacaaactcattgcaagttgaaagttaaaaatattgtttaagtcaaaaggatgttttcaacttatgatattttcagcgtatagtttatctggacctaacctcatcaagaagcaggttgaatgcctatctcttttgcaccctcataaagtcaaggaatcatggaactatagtaagttggagaccatctgtatttacagttgtgcaaccatcactataatctaattttagaacatttcgtcaccccaagaagtacatgacagcaatcactctccactcctttttcttcctgatccccagcccctggcaaccactcatccaccttctgtttccatagattagctttctagacatttcacgtaaatggaatcatgctatctggggtctttcgtgcctggcttctttcacttacgatattgttttctgaggtttattcgtgttgtagcatgtatcagtgcttcctttttttctatggctgaataaaattccactgtagggttataccacatttgtatatccattcatcagttgatggacaacacactagtattttaactaaagagcaaagtgccatgatctctttaatctgaattgtacacctttttagctgtacatgagttactatgacagtttctgatcttaatatcttagatttaagcgtatttagtattgataataaaaatgacttctgtttaagtttgtggagagttggggtttgcargatgatgtaatggtgatagcacaataatgtcatgatatttacatctgtgtttttcaactatcttaatagagtgggtctgtatttaagactccattcctcccttctaataaaataacatttgaatgactggagttttcttaatggcmtgcacatggaacactgcacctgcagttgtgtgttcagctgacaagttcacagctgagtgtgaagccaagctacagcaggtcttccaggggtctacttgccacgtggtcctgtctgttggcatcagatttgcccttcacagcttctggcttaagtatgaatgagaaggcatgaaaaagaggagggactgggagcaaggagttctgcaggtcttagaatcctccctgggatacatatttaggcagttcttactccaggtggcaaaaccctgcacagccattcttcttacatgaggagtagaggccgactgaaggctctacgatcctggcatggccatctcctatctttgggacattgagccagtatttagcccatctctttctcatcagcaagtgaagataataatggttcttatttcctagagatgttttgaggattcccataattcctggcacgtaccagatgtccaatcaatgttagctgttaataatcattagcatatattaattacttgctatttcctagatactgtgtacattcacaatcatccaaaaaggtagcaaaaggtagcaatagatatttccactttacaggtgaagaaataagactcaaggaacttacatgccttgctcaaggtcacaagactagatagtggcacaagtcgtatttagatcccttttggtccgattcagaatcctatacacatccagtgaaccatgctgcctatatgtaatgaatcgggtgggccaatattcacacacagtaacacaaagaaaaaaaatcctccaattttttaaaattaaaatgaatgattgatgcaattggactactttggaaaataatgtcaccaaaaccgatgagggggaaataaaagtgagaacctgggatgaagcaattgggacaaatttgggccttaaagaatctcaaagcacattatttgctcaatgctataatcttcccagctctggggagccagatcccctggcttatggagaccaaaagaaactayacatggcactctcgggctaaaaaacagtacatggactcatttccatcagctagagatgagtctatttgcccatgctaatatttcagttctcaacttaatagcttaagatgttcccattatcaacatcacttacctacccacagcacttttaaattagccttgggaaaaatgagtaaacagaagcacagtttatcattctgccaagtgcagctacccctgaagaaggcagctttggatagcaaaacagacaactagattgaaaaacagaagtgtcagccttgacacatgctactaatttgctgcttcgtaagggtcatttgctgtgttgcccaagagtgagggagaaaacagttcaaaggtcaaggacaaatggcatttagatgttccccaaccaggctgacataattggaaaactaaaacccatcgcctgctaacattcccctctcaacagtcttcctgattatgcagtgtaaaataggaacaattttggctactgatcttaaataatcctaagccctggatactaagaccaggaaatatgtattctcttatacttttagatgttctcaattgaaattaacatgaacatagcaattttccactttaattaaaagagtgtgttctttttccactcatggtattagtggcttcaaatgcttaaagaacctttacagaaaaccccttatggggattaagagatcaggacaaagataacattttaagaatgttcttaatattgcaatgaattgggaattattttttaaaccatttcctttagaagtctaaacagtgtcttttcatcactcggaggtattttttaatcactagttcccagttcactttaaattattagtgtagccctagcttgtaaatgcccctcaccatcagggaaagatggatttacactcatgacctctgaactaaactaagcagaaagtcatttcgttcaggtccactgctggtggccacctcatccccatgtccaacccatcattgtcccaatcaagatgatcgttggccaatttctacagactcacattcaggccaaagttactcactggactggaacaaccacctgtgtttcagtgatgctgatttggtcctctcatgcttgtaaaatccagctctaaactttactgttgcttgctggtcaatcaaggagacttggactttgcttctttttaaattatcagtagtgttatttatttacctccaaaaggattctaagtaacccactctagatatagatctgctaataaccagtactgtggccttggcaggttataacaataataaaacttctaacttttcagagtgtttcactgttacaaagcacttccatacaccttctcttgttaaagttattaccctcagagaacaccaattgactgatacacttctgataaagatagcagatgaaaaacattttggaaaataagggctctggacaaattcaaaggtaaccctgttaatctattgactggtgggcctagaatttcagggtgttgatccaactctaacttcaattctggctcccagagaagtctgccatcatggttatttgtcaagaacgagaggtcagaaatgccaaaaataggagttagggtgagtattctgtcaaaaattcgtacaaggaacttcttttataaaataaataaattaaggaatttggcctggatgtcagtgcctgcaaaagggacttcaatattccccagtagattactataaggatatctaaactctggactaggggttatagactacagataaaactgtaagcctcctgcctcctacagtcatagcatttcggagttgaaagtcccttttctggtcttgtagccctgatccaagttgctaacccctctaggattttacgttgtctcagcataagcatgcaccatgaggaggagctcacctcctaccagagtggcccatttcatccttggccgtagcaatctattgactggtgggccttaaaattaaaaagctactttgccttgtaatatgacccatttgttttagctctgcccagccatgggcaatcggaatgtccggtaaagaactcctctaccattttactgaacccaaatttgccttaatgtaatttccaccagttggaaggtctctcttcttgtgcctttggatacatttttttgatgactatagcagccctgaatgatttcagagacagagcacaaagctcctgagagctagtacattgtccttcccagtcttaacttctccttgtcttctatatcatctatatctttcccttttcctctgacatcttcccccagctctgttataattctttcagaaattaaacacaaattcctacatggaaggcagaggaattcagtgaaaagagcagaggaacttggtccaatccctgacaagtttccacgtttaaagcctcataaatactatgatttccctgatgggggtgggagggtagaatgacagactataagtgagtatttattataagcgtcaatgtactataaagctactgaatactttaacagtaaattctaaaagacctcaagcagcttagctccttgttttacatcagaacacattaaagagagaagcagcctgacttttccaaggaccacgggaccagttagagttagaaacagaacttagattttctgactcaaaatcccttgctccctccactgtctctctgttaaacaatgaaatcaataacatcatccaggcaaaggccctagaatagcacccaacatgtattaggtgcccaattattataggctgaataaatatgtgagtggacaaatcagtacatgaataactaggactcattttcaatgatgacattatacaagttccctccaaatgtcacttatgtttttagtcattctttaattagctccctattaagaagcttggttctcaaagtgtacttatgaagattaaatgaaataaagcattaaagtgtttagaaacaatgtctggcagccaataaatgttaactaattgctgtctttctgttttttagccatttttaaaagtaagattatgctgatgctgtcaggagtctctactctgaaaatcactttacaatccactaacgaaaggaattctggaattgcaaaaggattactactatttgtcaattcctatccttcacctgtaactaggccacccacacctaccccttgtagttggcacccatcaagacacaaacaaaatattggattctttcgcttcctcatctgggcttgtgtttactccacccctgacctttgggcactgtctcccattcccagtcaacacttgccaattggacctgacagttgacttgactttaccctatttatcttgctccctctgtctccatctcaatctcaatcaagattttgtaattcccctttggttcctccactctcagccaccctggtacctctactcctaaacaaggcccatgcctttgactcaagtggatgtgcttgcttctgctcaagttcagcctgccccaaaagagtgattcccaagtgctttattggataaacttccttttcattcaagagctccacatgcatgtctataaattgccatatgtaatctctatcaattgccagaaatcttgcagatttctttctgaatctgagtttatctgacaatttgtcaggactaaagactaagactaaccttgggctaatgtcagtaaacaagaaagagctcaggaacagaaaaccaaacaccgcatgttctcacttataagtgggagctgaacgatgagaacacatggacacatagggcaggaggttgggggaacaacacatattggggcctatcagggcgtggggagggagagcatcgggaagaatagctaatggatgttgggcttaatacctgggtgatgggttgatctgtgcgcaaaccaccatggcacatgtttacctatgtaacaaacctgcacaccctgagcatgtaccccaggacttaaaagttgaagaaaaaaaaacaagaaagaacttcagtaaattcatcaattaggtttatacctgtggttctggtgtggacaagaagtatttattatctttttaatctccatgtcttgctaaattcatcaattaggatgatatctgtgattctagtgtgacaagaaatatttattgtctttttaatctcctcatgtcttgtgatgaattaccatgtattattttctcatttgttaattgtgtatcaactcccactttattccacccagaatgtaagtttcttcagagcatggacttgacctgtttatatccacagctctatcatcagcacctaaaatactatttggcaaatagtaggcaaccaattgttattggttgaatactgagtgaatgaaagaataaatgaatgacccagaagcagaatggaattgtggttggagcacagcctttggcatcaaagagatctcggttcaagttttggatatgcaacttcttagctatgagtcttctctgaatttcagtttcttcatcaataaagtaggggtaataatagtgcctacctcatagattttggggagcattaaataagataatgcctgtaaggttcttagcatgatagctggcatattttaagaacttagtaaatgttgtstattattttcggtgaaagtcctcaaatgttgaagcttatcagaggtaattgaattatttaatatggctggtagtgatgattgtactaaagacaaattagtacaattagtctgtcagcaagatttgatttaaagagtcaggctgacaaaaaaaatgtattggtcacacccaccatatttaaagcactatactaggctttcaggagggggtgggatgcaaggatggatatgacacagccccttccctctaggaacgtagaactgagaagatttactatgtgtgcactgtaccatgctgaagatacagaaatgtgaggcagtgttacctcccacatcatccaacttactctccatgctctgcagaaaattcttctaaaacactcagcctttgctttgaacccctataatgacaagaaactcactgacttatgaaacagatgattctctttgggaacagtagtcaccactagaatgatcttaaaattagcacaaatctacccccccatggtttttacacattgatcaaacttctgccttctgggcacctctagaataaattcattttgcactcttctatcagaggtcagcaaagtaatgcctgcaggccagatccagcctgtttatttatataaataaagttttattggaacacagccaagcttattcatgtacatgttgtctacggctgcttttgtactacagtaacagagtacttggaacatttcagcctacaaagctgaaaatatttactatttggctcttgaagaaaaactctctcaacttctgctttatgtgacagaatttggagataaacaacatgctttttcctaaagtgaggagcagggaaatgagcacagtactccaagtgggagctaatgtagaattcacagaactaagtagtactatcacctcccctgttctggatgccatacttcaaataatgtgaccagagatcaggttggtctttgactgacacacaatactcaagtatataaaagatgaaatctgtgagttatttcccccaggagcttctattaaattatgtctccccaccccataatggtatatcctcatgttgggaccccaccccataatggtatatcctcatgttaggaagtatatacaaaattttacacctttcttgcttgtccagagcaatcaggcacaatttagcacatattcaagggccatcttagggtcagacagaaaaaggatggcacgcgcagctaggattttgaagagaatgtagagactctttacatgcccaggggtagggttagaagaacaagggaatttgtcacccccctatctgcataaagaagagtggagagggaagaattttgccagggcccagtgatagctggagtcatgactgcttaactagtcttgtggtaaaagatacacaaccacggctagcaccactctctgaggcagtcagggagggagggaaatcgataccctgatatgcccatctccatgctctacccactgtgggtagaaccctacttgaagctggagggcacaggagtcagactcacagggcacagagcaggtaaagaatagacgtgggagccagggcagaggatgacaagggctaagtggtaagccaagcatttcctaaatgctgaatgaatagtagatgaatggaccaagtgggcccagggcctgtcactcaataagtgtttgttgaactgcagaagccatccctttatgcccgcctgccccgaagccctcactgctgctatctgctgttccagatgtcccacccccagcacagcccttgtcctggttctccactccctcgctgacccctcagtgtttctgccaagagtgtaaaaacagtctggatcttattttggagatgacagaacggagcaggatttgctctgaacagaacaggacaactctaatcaaagagagaactttaagttctaaaataattcttagaatctaaaatttttttaaacagaaaatttggtgtcactgcaccctatggagaaaaatgagtggctcctaagaaacgtgccccagacatctgtgtcagaggctctggatccaacagaccccttattatcaaatgccttggggctggctgtcttatgctcagatggcccttgtcacatggtagcctctgattgtaaagacttccaggctcttgattgatcgtgccaacagcagcaatgttgagaaagtggtgtgtgtgtgtgtgtgtgtgtgtgtgtgagagagagagagagaggttgtcaatggcatgagggtgctagtggccaaccacagcttcctgccagtcacctcctcctctgtccattgagtcagcatggaggatattcagcactggcttcctcaaggaataatcctgaagattctggattttgaagacttagaaaaagcattattttgtctgctactctggttagattatttgcctttgcttggaatgggcaagacaaaactggacattaaattatgaattgctgttcatatatatcgaagcccattttaaaaagtagctgtaggttgggcatggtggttcacacctataatcccagcactttgggagtacgaggcaggcagatcattgasgccaggagtttgagaccagcctggccaacatggcaaaaccccatctctactaaaaatacaaaaacttckccargtgtaatgacatgtgcctgtagtcccagctacttggggcagggggcgggtgaaatgggagaatcacctgagcctggggaggttgaagttgcagtgagctgtgattgcgccgttgcactccagcctgggagacacagtaagaccctgtcaaaaaaaaaaaagatccatacctctaacagttgtcccttcatgcctccgagactcaggctagtcagtccccagagtctgaaagttcttatacaaaacccagaattccagttcatctataactatgtcagaatttgttaagaaatttcattaaagtctccaggaccaaattttatgaaatctaatcccaactaggataactggcaaaatttgagtaagctctatagattaggtaataatactgtgtcgatgttaattttcctacgttaattattgtactacatttatgtaggagaattgtccttgttcttaggaaaacacactgaaatatttaggggtaaacatgcatcatgactgtgactagttcacaaataattaggaagtaacttttatatacagagaagaaagattataaatcagatgtggtaaaatagtaacaattgaggtatgtgggtcgagggtatatgagattttttttttttttttactattttataacttttctgtaagattaaaattacttcaaaataaagctgccaaaaaacaaattccagaacactagagctgtctcatgcctatcactgaggggccaatgttcagccatgctacgtactgcagagtgagccagaaatggaatctcccgttttgtcatcttggagctaaaatgaatcatttcctctttcagctaaagaactctcctattcatggaggcgaacactgaggatgctttccacatgaaccctgaaggtaagggggacttgttctcatgcccctcggtcacaccacccatctgccccactgtccgtttcatccagggcaggggctcaactatcttggtttacagaatatcatctcaaaccagtcaatgtctacactggcacattctgctgtcttcaaaggctgtttcagtctccccagcctgtccagctcagaaaaactgatgttcatccttttctgtttttctcaaagaaaataccaaagcttttaatagctgatatctcctagtggtgcaatcatgagagatttttattttctccttgtagttttctgtaattgagagattatcgacaatgactatgttacttctataatcagagagagaaatattgtgcttgcttttattttcttaagcaactctacataaattcttgccacarctttctgggccccgtaatgttactgctgtgtctccttcctcccagccctcatggcaggactcatgtgtgacaggctctgggtcttctctcatctgccagtggcaaggaaaccctaggctgccaggactgcttagcaaatagatcatgaagtattacgactccattttacagatggagaaaccaagccccctgacttccctctgtctacactacaggcaaatgggatctggacccactgagatgagctcgacatgtacgactttgaggctgtactctctcattcagaggaagttaaggagccaggaagataggaaaacaatgaagttattggttgaagaaaatcctagacaaaattttcctgggacttcttggggccatctagggaaacttactagtcttcccacattgaaacatgatagccccttgagagccatcatgccgctttggtgtcaagttctgagcctgaacttgccctctgggccagggtttctcaaacaacagtgtaggcattctgggtcggatcgttttgggtggtggggctcctctgtgcatcatttgatgctcagcagcattcctggtgtctcccactaaataccagaaggacaccaccccaccccagctctaacaaccaatgacatctccagacagttccaaggaggacaaaactccccccaacagaagtaacaataaaataatgtttccaggctttgccaaatgtcttccaggtggggacaaaattatcctaccaaaaaccactgctttaagttgcctcagcccagcagaagcttttgtttttcatggaaatcgactgaaatttatagtgttcacaataacattagcaaatacttgcagaagaagtgtcatcagtcatcaaaacgctctgggtacaagagtgccccacagcataatagccctgcccaggagcatctggtaacattggaagtggtgaatcgacccattcagacttctctgtgctttctcccgtcttggcttctaccccttcatgccaaatgcctcatgctatttactggaaggaaaggcaaatgaaggagaacagggcaatgctgagtactgagtggacctttcctttaagagtttgaagaggtcagaaagcacccagtagtcagagctgtgttgcaaagctcccggaaaatttggcygctactttgtatttgtgtgtgtattcattattcatagacatgtattcatagacaacattattgctcaaaagatttgagacatattctccacttcactttatataattttaactttttacagcaaacaggtcaccaytctaaagagtggcttaaccagaaatccttttttaaaaaaaattaaccaaatagtataaagtagataaggtggcagtagcagatttatctgtggtaccaattggcaaaccaaggccctaaaaggaaattccaaagccctagggtttgtacacacacttcctattcatctttaagtgcacctcatggaccttttattcctctgattgatcttccctgacccctgcacccagcctccatcatcctccaccctttcccaacctggtgtttggattacaaagatacttctgattccagtggctatctgtgaaatcacaggcaggaacttgaaagcagttgcatggtcatccaagagaaacagaaacacagctcagtttcagggtgaaaagaacatccagaaagcaatattcatagaagaattcagagggggggaccctccttaaaagaggggattaaaagttaagagtaaaattgcaattcctgtccaagacttgacccaaagtgccgcagtccattttgcagccttttatatgatgtctggtctctctaacttaattgttaactttccagtcctgtcccagtggtaatcatcactccctaacaatcactccctcgtgccccatacccacccagggtggaacaaactgtctttgcctggcataccagattcttttgcaagagccctggcatccttcaggctctgcccattccaaccctcccacctccagccctttcccaggcccccatccgcacacttctgcccttaactctctccagactgcaagaagccaagaggagattagaagcagcccagggtcctcgggaggatgtgtccacccataggctgtgttttgaagttcatttaaactctatacttataatatttttccccaccacttacctgttagagtttctcaaattcctatcatttgagtttctgctttgactaaattgtggcattactcaaaacctacacatgtacctaagggagaaaggccttaatttatagacagcaatttgtttatgagattgtcttgctggtgcttctctaagaagagagccttgggattgggacacaggacaaattaattttgattgcagtggagagactgaaacgattgggatattgagctctagacctgtactgtctgatacagtagctacttgtagcaatttaaatataaataaattgaaattaaatgatattaaaaatttcatgcctcagtcacattgagtacatttcaaatgtttgccagcctcatgtggcttgtggctaccaccactggacaaaggaaatccattggacatttctatcgtgattgaaagttctactgaataccatgtcttgagactgaggctggtacttccagcagagagttctggaaaagaggtgcagcccaacatcaccagctctgtgggcagggatagagaagagtagaaggaaccgaattccaaaagggaagggagccaaagctcaggcccagccctgagcaaacatgcatctgccgcacccaaactctttatgttaacaaatggaaagagaggagccactggggtcggctttgtagcccatttcctccattggatggcctctgagttctgtgggcttctgatgaagcaaaagaccccatcctgaatcctgaggcaagagggactcagagtttcactcacatacgggagccactgggctcccacacaaagggaaatctccaccctagtgacacaaggagccaggcagtctcccggagcccacttagagcaatgagtttccaagtcaaaagacatttcaaggaagaggagcatcttgtccatctgaaattaggcctccactcagaaaaatctgaggagyctggagggttccaaggagcaattgtaaccccaactgatgatggtggagcatttatcaagccttgccaatgacagtggttcacgcttcaatagcactttgcagccatgtggcatgcttgaacaaaaatatcatttatttcatcctcacaacagttgactgaggaaagcagggcacatgtgaccctctcgacactttacattaaaagatactcatgctcagaaagaggaaaagacatgccaaattcaatgtggctgatgaatgacaggaccagctctagaaaacaaccacctattctgtctctctcaagcgatggggttacttggtacctgtccaagtccctaaatgtgtcagctccaaagtgtgtgcctacccatggatcatgctgcaaagtcagttcacatccaactccaagctgacaaccgagcccttgaagacttctgctaggcctcaatgtcaagaacattcctaaaccaatcacaggcaaaaggcaagtgagatcaccatggttagcttagactgatacctcctcatcccctggggctagatgcctgatacctaacaaaactagatacctaacaaaaatgaaggcagaagtgggtgttggagaagcaaccagcagtgtctgccagacccagctatactcagggctatgataaagaagaggggctttctactcctccttctcccgaagcagcctccccaggcaacccctcctggcctcctaggccaggtcaaatctgcccgctatgggttctcatggtacctgcaggggtcctccttagcacttgcatcatttacattgaactgttttattagctcctctcttcaggagactggaagtactaggaggtttgtttcagcaaaacattgtattcttaggaccctacccctgcatcacagatgctcagttgatatttgttgaaggattaacagatgggtgggtggtagattgatgaatggatggatggatggatggatggatagataaatggatgggtggatagataggtgggtgggtggatggatggatggatggatggatggatggatggatggataggtgggtgggtgggtggatggatgggtggatggatggatggatggatggatggatggatggatggatggataaatgggtgggtaggttgatagatggatggaaaggtgggtgggtgggttaatggatggatggatgcatagatgggtgggtggatggatggatggatggatggataaatgggtgggtggataaatgggtgggtggttgatagatggatggaaagatgggtgggtaggttaatggatggatggatggatagatgggtgggtggatggagggatggatggatagatggatggataaatgggtgggtggataaatgggtgggcgggttgatggattgatggaaagatgggtgggtaggttgatggatggatgggtgggtggatggatgttccagccactacataggtcaactctacattttctcaaaatgcattgtaaagagctggatcgtggtttccctccctcttccccacaagttgctctgggagtatgaattgccccactcccagaccagcctcgctaagggccctgactattaatactctggttggacagatgacttttctgcaaagaaagggctcctgagggaagctgaataaaatggggaaaaaaagaatgaatataagccagtaagagagacaagcaattatcttgctagataaatagcccagatgttttgaatgaagcaagtctgaaagaccatattgttcatgagaggtgactaaatcaggtagacacaggctgtattggtacaagatggaccaaagtcatgagggagagagggactttgggactggtagtaatgtcaggaggtggtagggatgctcaaacccctggcaataggcaaagaagtggagttttcaccttgagcccagtgctttccctcccctagcccacctgcctttgaayttccacatcctcctgctttctcctctttctctaccctctttcccggtttaccactctttcaatttccggttcctcttgctttgcatgacaaggactagcagaagccccggggccagagtaaaacaagcacccagcttctcagagagagccctactgaatttattaaacgcctttttaataagatgacccagcccttctttgaggctctgaaaaatgagtttttcaatgaaattgccttttacccacttatcagaagtttaacaaaaaataatggccagccttaggtatttcaaataaccctaagacagacacagtgatggaattcagagaagtaggggaaaacaagtgggcaagccatgagtatcaaaagcattttaaatcattcaacacaggctaagaagcagggcacaggctcagccattcaccctgattaacacagggaggtcggctgtcagcaactgctgaaaattttgccacaaacatacaagtaatttctatcttctaacctagaggggagcttttccatgtatttgcaccactgaatgccaggttttcatttgggagttgttttgtggtgttaaaattttttgttgggattttcctcctcgattacgatagtaatagctttttattttattacaaaagtaatcacattttattttagaatcatcctcccagaaacaactactcccaatatatatttccagtctttcttctgtgcacatatagagatatgtatattagattgggatcaaaaacatctactttctgtattcaatttcttttttactttttccatgtttctatatcattggtttatcacattactttaaaggttaaataatatttcattatatgactgtaacacgatctaggtaaacaatcccttatggtttgatatttagatctcttccccatgattctgtttttataaataccaaaatgaaagcagaatattggattctagaagtaggagggtagggttctctttgtacagaattgtttttgtttctgttcatttgggataaatttctagaagcctattttgtgattcaaagtgtatctacattcttacggcttttaaaatatattaccctaaaaggatacaccaatttatattcaaaagataaaacatctgtcccacctctaccatctagcagccagaagtgtttacaaactcagtgttaccatccagaaatctcacggggttgggaagagaattaaataaaatattttatatgaaaatactttgaaaactaaaattgtattaaaatatatgttgccattattatcaatttttaaaccatccaagatggaaaaggcattacctccctcaatcacatattccaatgattaacagctctttagagcataaaattcttaccagttgccctctaaatacaactacaccacatatatttcatttattcagaaccatttattgaataccttctatgtttccagttttgcattaagcatgggagatatgaaagaaacacacacacacagcaatgagctactagcctgggatggggtgggggtacagagaaagataggtcaagattcattatcagtgccacggtaaggtcaggttctgggtgttttgtagacagggcatgatccagctttggagaacccagggatgtccatgcctgaaagagggtaatctgaaagttagcatgagaagcagcccagctttctgttgggggacaatgtggcaattcctattgtttctgaaacagtatggagaaatcacattttcctggcagctatattcctgcatagaaagacagcaatttttgtgggaaaaagacattaacaggccacatggtgggaaggctaagattccccatggggttgactttgaggaacactagatggttaccatgtctctagaaatgagcctgcycttggtgagtgagatatgcaagctgatgctgattgcaggattgcttgggactatagagagaattttattttattttagaggggattttagagcggtgtgaggaaagatgaaggggcaagatatgacaactgataggggaggaactttgagggcaaatacaaagatgcttaataaggaattttgccaagtgtctgctatgaaatgttctatagagcccctcactcctgtctactcacaatatccttgctcttatttttttttattatactttaagttttagggtacatgtgcacaacatgcaggtttgttacatatgtatacatgtgccatgttggtgtgctgcacccattaacccatcatttacattaggtatatctcctaatgctatcaccccctccccccatccaatgacaggccctggtgtgtgttgttccccaccctgtgtccaactgttctcattgttcaaatcccatctgtgagtgagaacatgcggtgtttggttttctgtccttgtgatagtttgctcagagtgatggtttccagcttcatccatgtccctacaaaggacatgaactcatccatttttatggctgcatagtattccatggtgtatatgtgccacattttcttaatccagtctatcactgatggacatttgggttggctccaagcctttgctattgtgaatagtgccgcaataaacatatgtgtgcatgtgtctttatagcagcatcatttataatcccttgggtatatatgcagtaatgggatggctgggtcaaacggtatttccagttctagatccttgaggaatcgccacgctgtcttccacaatggttgaactagtttacagtcccaccaatagtgtaaaagtgttcctatttctccacatcctctccagcacctgttgtttcctrgctttttaatgattgccattctaacgggtgtgagatggtatctcattgtggttttgatttgcatttctctgatggccagtgatgatgagcattttttcatgtgtctgttggctgcataaatgtcttcttttgagaagtgtctgttcatatccttcaccaactttttgatggggttgtttgatttttttcttgtaaatttgtaagttctttgtagattctgaatattagccctttgtcagatgggtagattgtaaaaattttctcccattctgtaggttgccagttcgctctgatggtggtttcttttgctgggcagaagttctttagtttaattagatcccatttgtcaattttgtcttttgttgccgttgcttttggtgtgttagtcatgaagtccttgcccatgcctatatcctgaatggtattgcctagattttcttctagggtttttatggttttaggtctaacatttaagtctttaatccatcttgagttaatttttgtgtaaggtgtaaggaagggatccagtttcaactttctacatatggctagccagttttcccagcaccatttattaaatagagaatcctttccccatttcttgtttttgtcaggtttgtcaaagatcagatggttatagatgcgtggtattatttctgagggctctgttctgttccattggtctgtatytctgttttggtactagtaccatgctgttttggttactgtagccttgtagtatagtttgaagtcaggcagcatgatgcctccagctttgttcttttggcttaggattgtcttggcaatgtgggatctttttttggttccttatgaactttaaagtagttttttccaattctgtgaagaaagtcattggtagcttgatggggatggcattgaatctagaaattactttgggcagtatggccatttttatgatgttgattattcctatctatgagcatggcatgttcttccatttgtttatgtcctcttttatttcatkgagcagtggtttgtagttctccttgaagatgtccttcacatcccttgtaagttggattcctagatattttattctctttgaagcaattgtgaatgggagttcactcatgatttggctttctgtttatctcttattggtgtataggaatgcttgtgatttttgcacattgattttgtatcctgagactttgctgaagttgcttatcagcttttgggctgagacgatggggttttctaaaggtgcaatcatgtcatctgcaaagagggacaatttgacttcctcttttcctaattgaataccctttatttctttctcctgcctgattgccctggccagaacttccaatactatgttgaataggagtggtgagagagggcatccctgtcttgtgccagttttcaaagggaatgcttccagtttttgcccattyagtatgatattggctgtgggtttgtcataaatagctcttctttttttgagatatgtttcatcaatacctagtttattgagagtttttagcatgaaggggtgttgaattttgtygamggcttttctgcatctattgagataatcatgtggtttttgttgttggttctgtttatatgctggattacgtttattgatttgtgtatgttggaccagccttgcatcccagggatgaagccaacttgattgtggtggataagctttttgatgtgctgctggattcagtttgccagtgttttattgaagatttttgcatcgatgttcatcaaggatattggtctaaaattctcttttttgtgtgtgtctctgccaggatttggtatcaggatgatgctggcctcatgaaatgagttagggaggattccctctttttctattgattggaatagtttagaaggaatggtatcagctcttctttgcacctctggtagactcggctgtgaatccgtctgctcctggactttttttgcttggtaggctattaattattgcctcgatttcagagcctgttattggtctattcagggattcgacttcttcctggttgagtcttgggagggtgtgtgttwccaggaatttatccatttcttctagattttctagtttatttgcatagaggtttttatagtattttctgatggtagtttgtatttctgtgggattggtggtgatatccctttatcattttttattgcatctatttgatttttccctcttttcttctttattagtcttgctagtggtctatcaattttgttgrtcttttcagaaaaccagctcctagattcactaattttttgaagagctttttgtgtttctatctccttcagttctgctctgatcttagttatttcttgccttctgctagcttttgaatgtgtttgctcttgcttctctagttcttctaattgtgatgttagggtgtcgattttagatctttcctgctttctcttgtgggcatttagtgctataaatttccctctacacactgctttaaatgtgtcccagagattctggtatgtagtgtctttgttctcattggtttcaaagaacatctttctttctgccttcatttacttatttacccagtagtcattcaggagcaggttgttcagtttccatgtagttgtgtggttttgagtgagtttcttaatcctgggttctaatttgattgcactgtggtctgagagacagtttgttataatttctgttcttttacatttgctgaggagagctttacttccaactatgtggtcaattttggaataagtgygatgtggtgctgagaagaatgtatattctgttgatttggggtggagagttctgtaaatgtctattaggtccacttggtgcagagctgagttcaagttctgaatatccttgttaactttctgtgtcatcgatctgtctaatgttgacaatggggtgttaaagtcccccattattattatgtgggagtataagtctccttgcaggtctctaaggacttgctttatgaatctgggtgctcctgtattgggtgcatgtatatttaggatagtagctcttcttgttgaattgatccctttaccattatgtaatggccttctttgtctcttttgatctttgttggtttcaagtctgttttctcagagagtaggattacaactcctgcttttctttgttttccatttgcttggtagatcttcctccatccctttattttgagcctatgtgtgtctctgcatgagaagtgggtctcctgaatacagcacactgatgggtcttgactctttatccaatttgccagcctgtgtcttttaattggagcatttagcccatttacatttaaggttaatattgttatgtgtgaatttggtcctgtcattatgatgctagctggttattttgcttattagttgatgcagtttcttcctagccttgatggtctttacaatttggcatgtttttgcagtggctggtaccagttgttccttcccatgtttagtgcttccttcaggagctcttgtaaggcaggcctggtggtgacaaaatctctcagcacttgcttgtctgtaaaggattttatttctccttcacttatgaagcttagtttggctggatatgaaattctgggttkaaaattcttttctttaagaatgttgaatattggcccccactctcttctggcttgcagagtttctgccaagagatccactgttagtctgatgggcttccctttgtgggtaacccaacctttctctctggctgcccgtaacattttttccttcatttcaactttggtgaatctgacaattatgtgtcttggagttgctcttctcgaggagtatctttgtggcgttctctgtatttcctgaatttgaatgttggcctgccttgctaggttggggaagtactcctggataatatcctgcagagtgttttccaacttggttccattctccttgttactttcaggtacaccaatcagacatagatttggtcttttcacatagtcccgtatttcttggaggctttgtttctttttactctttttttctctaaacttctcttctcacttcatttcattcatttgatcttcagtcactgataccctttcttccacttgatcaaatcagctactgaagcttgtgcatgcgtcatatagttctcgtgccatggttttcagcttcatcaggtcatttaaggtcttctctatacactgtttattctagttagccattcatctaatctttttcaaggtttttagcttctttgcgatgggtttgaacaccctcctttagctcagagaagtttgttattgccaatcatctgaagcctacttctgtcaactcgtcaacatcattctctgtccatctttgttccattgctggcgaggagctgcattcctttggaggagaagaggcactctgatttttagaattttcagcttttctgctctggtttctccccatctttgtggttttatctacctttggtctttgatgatggtgatgtacagatgcggttttggtgtgaatgtctttctgtttgttagtttttccttctaacagtcaggaccctcagctgcaggtctgttggagtttgctggaggtccactccagaacctgtttgcctgagtatcaccagcagaggctgcagaacagcaaatattgcagaacagcaaatgttgctgcctgagccttcctctggaaacttcgtctcagaggggcacctgcgtgtatgaggtgtcagtcggcccctactgggaagtgtctcctagttaggctactcgggggtcagggacccacttgaggaggcagtctgtctgttctccgatctcaaattccgcggtgggagaaccactactttcttcaaagctgtcagacaggtacatttaagtctgcagaagtttctgctgcctttttttccactatgccctgcccccagtggtggagtatccagagacaggcaggcgtccttgagctcagtgggctccacccagttcgagcttcctggcctctttgtttacctagtcaagcctcagcaatggtggacgccccttccccacccttgctgccaccttgcagttcgatctcagactgctgtgctagcagtgagcgaggctccgtgggcataggaccctccgagtcaggggcaggatataatctcctagtgtgccatttgctaagaccattggaaaagtgcagtattagagttggagtgtcccgattttccaggtactgtctgtcacggcttcccttggctagtaaagggaatttcccgaccccttacacttcccgggtgaggcgatgcacccccctacttccactgacactccgtgggctgcacccactgtccaacaagccccagtgagatgaaccyggtacctcagttggaaatgcagaaatcacccgtcttctgcattgctcacgctgggagctgtggactggagctgttcctatttggccrtcttggaacccctatccttgctcttattaatacctcaagtgacatacagttcagtgtgccctacatgtggacggagggtgagagtgaaggctgccatttagaggcagccctgcctggttactcatccttcattctgtaaggagctaagtgctactgtgttctcagaacgtttgtgctaagcagggaacccctcttttgaactgtacgggatataaaagtgaacacaatctactgctctccccatactgacccactagccttacttgggctctgttcgcctgggcacatgcacttacacagctttaaaaaaaaaaggaaaatattataataggatcttttaggcaatcaaagacattcaaaaacacattcagatgtttgtcaggccttctgcttaggcacacccatgaaagcatcccaagccatttatattttgacttgcaaataaactggcaattgctataattgagagcattggcaaagcatcaaacttcccttccaaattctattgttcttatggtaatattaatttctgtctcccaaactgagtgtagaggcatggatatgtgacaataggatgttttctaggccaaggatgaaaaaccatcatgggtaaactactaagaagagtgtttacacagataaaaagaaattgactaacattttgwgttttgacttcccaatctctttttttaaacattaatgatttcagagaggaatgtttggaagacacatcattgattatatgctgtacaaagtgatgctctttttattgtaaagcagtgagtcaatgaagatttactgggatctgccaagccaatattctagtggccaaatgtgcagacatttgcagaagcccactctacttccattggcccaggaagcctagcaaccaacggggagttagctgtaccctttgctgatatgcactagtggtatggaggacttattaagaaaaagagagagccttttataattgacaatagcgcttaccttttaaaatgttaaacatactataccatatttttctaagttcagtagtcttactttgggacacagaaatgcatcactatttaaaactcacctatccagcaaccttaactatctggaacatatatgagatccaggaagcaaggtaaataggtttttgagcaaaatagatataacaaaatctatttacctacaggtttggtaggaaattccttcagtcatcactcagaacctagttattcttatttgaaaccaccttaattttctaaaatttagttattgggttttttaattcacatcagatcagaagcaacaatagagtggaaggggctagaagaaactatcttgagtgatctagaagggagtcagctaacaaaagtgagaactattagctgttaaattgaatgtaaagaaaaagacattaaaaaagaaaaaagccgggcgtggcagctcacgcctgtaatcccagcactttgggaggccgaggcaggtggatcacctgaggtcaggagttcgagaccagcctraccaatatggtgaaaccccatctctactaaaaacacaaaaattagctgagcatggtagtgtgtgcctgtagtcccagctactcgggaggctaagacaggagaatttcttgaacccgggcattggaggttgcagtgagccaagawtgggccactgcactccagcctgggcaacagagcaagactccgtcaaagaaagaaaagaaaagagaggagaggagaggagaggagaggagaggagaggaggggagaggagtggagaggagtggagaggagacgggacgggacgggacgggatgggacaggaaaggaaagaaaagcaaagaaaagaaaaggaaaaagaaagagaaaaagacactaaaaaggaaaggagagaggagagatgggcaaaaggatggagcgagggaaggaggctataaaaagaagactcagaatcttaaaatgctcaagtcctaggcatttgattttggcaacaagccttgatctctaggagcagctgagcacatcctatatccaccatatcacaccataatttttatgttcataaatgaccccagtactccataaaaagtttcaattaggaaatcagagaagcgcctcatttttagaagtgtgcacccaatagattaaaagtttggccgggcgtggtggctcacgtctgtaatcacggcactttgggaggccgaggcgggtagatcacgaggtcaagagatggagaccaccccggccaacagggtgaaaccctgtctctactaaaaaaacaaaaaaattagctrggcatggtggcacgcacctgtaatcccagctactccagagattgaggcaggagaatcatttgaacctgggaggcaaaggttacagaaagccgagattgcgccactgtactccagcctgggtgacagagcaagagtccatctcaaaaatatatatatatataatatataaaacatatatatgttatttataagttatatatatgttttataaggtatatttatgttttatatgtatatatgttatatatatgttttatatatgttttatatttatatatgtatgtttttatatatatatrtgttttcattcctgaaagggtgtgctttagatatttagacatgatgatgccagaaaaatatgttttaattgtgtgcatttatgaaggaaaaggaagaatgggctgagaattattattgccttgctagttgaagatttcacaatggaggttgtcccagttcttgaagtctccacatttccttgatttctgatattgcgatttttattcacttcagctactaacccaaccaccttgcagccacatctcagtgggcttcatcatccatctgcccttgagttcaaattaatgcacacaaagaggttactggaggaatcaagaaggtctcagaacctatcccttaggaatatggagagcctgttgattaatggaaaagagttgcacaactcaaggccaagtgctgtttccgtggatctgtacatgagaatactgcattctatatgactttataaaaatagtcacccaacaggtgttgttgaacacctgtagacatgtttacaggtgacagtgtagggggctgaatatgtagatgaagccaaactgagattgttctggaactttgatgatggyattccagacgggacaatggcagtgggtcaggcgttggaggcttccrtcttaatcactgctcttctacttggttaaatgtagtagttaccatctgcagtaggctgtactggttgtctctggattgtccctagatttgcccaactaaataaagctagccattataacacccagcctcttagctcagagcacaacagccaaaggtttatttctcacccatgtgacagtttgctggtggtcagcatgaactcaagagcctttcatctgttggctgtactgagcttttaggacctcacagtcctcaatttcatcttcttcaggccagtaatggaggagagagaaatagaggggggaatatgtaaaaagctttaaagaccaggactaggctagaagtacagtcatgcatcgcttgacaatggggatactttttgagaaatgcatccttaggttatcttgttgttgcttgaacatcataaagtgtacttacacaaacctagatgggataatctgctgcacacctaggctatatgggatagcctattgctcctaggttacaatcgtatacaacattttactttaccgaatactacatgcaattgtaacacaatggtaagtatttgtgtatctaaacataggaaaggtatagtaaaaacacagyataaaagatttttwaaaatggtacacctgtaaagggtacttaccatgaataaagcttgcaggactgggagttgctttgggtgagtcagtgaatgagtggcgactgaatgtgaagccctgggtcattactgtacactactgtggactttatatacactgtacacttaagctacaccaaattttttttaaatttttttcttcagtaataaattaaccttagcttgctgtaacttaactttataaactttcttaaactcattttgactttttttttttttttttttgagacagagtctcgccctgtcgcccaggctgcagtgcaatggctcgctgcaaatctcrgctcactgcaaactccgcctcccaggttcaaatgattctcctgscccagcctcccaagtagctgggattacagatgccagccaccaggcccagctaattttttttgtagttttagtagagacggggtttcaccatgttggccaggctagtctcaaactcctgacctcatgatctgcccgcttcagcctcccaaagtgccgggattacaggcgtgaaccaccgtgcctggccttgamtattttgtaataatacttgscttaaaacacaaacacattgttcagctgtacagaaacattttccttctttatatgcttatactataaacttttttctatttttaaaagtttttttgttttactttttaaactttttcattaaaaactaagacacaaacaytcacattagcctagaactacatagtgtctggatcgtccctattgctgtctttcacctccacatcttgtcccacttgaagttcctcaaggatgatagcatgcacggagctgtcakctcatgacaacaatgccttctggaatacctcctgaaggayctgcctgaggctattttacagttaactttttttaataagtagaaggagtacactgtaaaataacaataaaaagtatagtatagtaaatacacaaaccagtaacatagttattatcaagtatatatactgcacataattgtatgcgctctacttttatacgactagcagtgcagtagatttgtttacaccagtgtcaccacaaacacggcgtaaagcattacgttacgatgttagaatggccctgacatcactaggcaataggaacttttcagccccattgtcatcttataggaccaccaccatatatgcagtctacagtgggcaaagtttgtcattcagtgcgttactgtgtgttatttctacccactttcagaggccaccacttcatcacctgacctcatctaacgacaggggaagcaatgaagtaactttaactgtgtggccagaaaggaaaagaaaaccaaattctgatggacatctgatgtttttactattcctatgaatgtattccaaggttctgagagggtagggaaagcaggaataagagtgggaaaatayatttagcaacattcttgagagttttttcttagacttgtcagtgttctcagttgtgcccatcctcaagctccaaagattctcccacaaggcatttggccaaggcacttcatttttccaggcctcagtttccccatgtgttaaagtgaggggttgaattagaatacctttcaagtctttgggccccttaaagatccaaaatcccatgattctgtaatgattctgtatgattcccctgatgttcccttccccctgagacaaataagcagtgccagtatgccaataatttatgttttattttaattttccttctcaccttcaaagcttgagtttctagatattaatatataacaatagacaaagttgttatgaatacagtagtgacttttatggcaaagtaaagttattttgtgtttggatgaacagcacattcacacacrtatataatatayacagagctccatctgtgaaaaaataatcttgtttgaagtcttgcaaaacttatgtcctcctcctactcttgccctgtattagttttgcaattagtaacaaacaaacaaccgtgacatctctgtggcttagaacaacatttactctccgctcactttacatggggactgtgagtcagcagcagattggctgtggctctgctagaattggctgggttcagctgggctctcagtggggctccacctgtcttctcattttaaaacccaaacgaagggtatagacactatctgtgacatcctaagggcagtggagaacaaaagcaaggagacctaagacaaaccatccagttgcatttaagcttcaggttaaacacggcaaaaaacatcacgaccattcacatcccatgggccatagcttttcacatggccaagtccaaagtgattgaggtgggatatgtactcctctcacagaatgcacgagtacctcccatgacagtgggtaggaatatgcaatcctatggctgggaggaagcaaatagttggggacaataacccaacagatcacacccccaatgcctctatctaagttctaaatacaacatttcccgtagagaggaagccactctgcctcctccactgcatcttcctttcctgcccctctcagcttgagctcaggctccaaaacttgagcgtgataagaatcatctaagtgcttgttaaaaatccccttcctagggcccccctttccaaagatcttgacacatatgatctgaagtaggcagtggtgcccaggcatgatgccccaggaatacctactgctattgaagagctcyccccggttcccacagccttcagcatcagacctgcctttggattgggggagcatgctgagtgagccattattaggaagagggctgccttagaggactcagaatctacgaccccaaggtcctctgacctgtccccactcctcacagccagcatggattttrtacttctggagctccttgaaggagggtcattgcacgtttgaaagtgtgatagttagcacagaccccagagatcaaatcctgagttcctcttcctccatatccaactcactagctgtgtgaccttggacaactcactagctgtgtgaccttggacaactcgcagaccgtctctgggcctcagtgtcctcatctgttagaaaggaataataataatacctacacctcaggcttcttgtgagggtgaagcgagttaacaaaacagtgcctggcatgcagtggatcacatataaacatttcatgtgtgatattatacatgtttttatgtatttataagtgtattctatacaagggtttgctgattttattggcacacaggtctgagaacatgggaggcttgtgagataaagttgcctcctattggaggtgttatatggggagcatgctgagtcagctgttatcaggaggaaggctgccttagaggactcagagaatttacrtgtcaggtgatagcatgtaagtcagtggttttcaaccccagctttaatttagaatcatctagaaaggttttttttaaaatgcccatgtccttccaagtgggctcaattctgagccaattagtgagaatgtccagggacaaaacaaagaaatgaaaaattttaaggccgggcacagtggctcacgcctgtaatcccagcactttgggaggttgaggtgggcagatcacttgagaccaggagttcaagaccagcctggccaacatggtaaagcccgtctctactgaaaatacaaaaattagccaggcgtgatggtgcagatctgtaatctcagctactctggtgactaaggcaggggaatcacttgaacctgggaggcagaggctgcagtgagctgaaatcgtgtcactgcactcctgcctgggtgtcagaacaagattctgtctcaaaaaaaaaaaaagaaagtaaagaaaagaaattttaagacactccttggactgtaatgggaatcctggattagaaaccactgatgtctatagaacagctctgtaaactgcaaaacataatgtatgatttatgggtgttttttgattgttagtaactgattgatgatctcatgagggactagttcctctgaaaatcaggccaacgtgggttttccaccatctgtcctacatgtgcactggctgggggaaattgaaactcatccaattcctattcttgcctttaagccaaaaagactgctcgaaaacaagcctccttgggataaaagatgttgctaggatgaggaagctgtagtgagtgagtggagttaatgtgattagatttggaagcaatacttccagccatggggaagcatcggtgttctgtgttattaaagtgactccagtgcaaaggcacatatatcgtattggagtaatttgccctgactaggttagaagccaggagatggttcttcacaggtattcctgagtggcccaaggtctaagtcagctctcgtttagacaaatcctatctctgctgatcatctacctctcaccaaatgcagccatcaccatgcacagcacatgcgctcctcttgatgatcttcacagagtgcagagtcttcaggaagttctttcctcagtggaacctttgggatttctaggagaggggcaggggaatatctggaatcagaggtgaacactttacagcagcctctaaactacttctaattacgttcacctgactaaactgccaggtgataaacgttttatataaaagtaattcactatggaaagttctggatgttttccccaatgggtacctcaaaacagggtacaagatggaaacctgctcaagaaacagcaaaatgtaaactggataatggtgatgataaaaaaataataatgaatgaccacacgagcaagtgtcctcttgtgaactttcacagacaaatgcatagatatgctgcctggactatgggcagataaacattcattgtgggcacatgtttgtgtgaagctaattattggcagagcaagaacagctggaactttcatctccccacctgcaggccagggttctcttggcactatatcctcagttttcaatgtcttcctgaaagagcggctgccatgttctccttaaaacttctttagattcccctgtcaaatactgaaaactatgctggctgtaagtctagtgtttgaaataccagcgtgggaccagtcttcctatatgcagagttttgtcccatgtcttagaatctttttctgttttcttcaccttttgggcttcatttattcacaatcattgactgttgacattgggcagagcttgtataacagtcttaatctttagcctggtatgtaatatctaatccctgctgttcctcttcccgccctgagcacattatgtcctttactttccagattaagtgttggcattctgtactggaaagaaaactccaacttcttgccatgtgcagtggctcatgcctgtaatcacagacctttgggaggccaaggcgggtaaatttcctgagctcaggagtttgagaccagcctgggcaacatggcaaaaccccatcactgcagaatatacaaaaattagctgggtgttggtggctcgtgcctctagtccccactactcaggaggctgaggtgggagaatcacctgacccagggaggtccaggctgcagtgagcggtgatcatgccactgcactccagcctgggcaacagaacaagaycccgtctcaaaaaaaaaaaaaaaaaaaaagcccaactcctggaaatcaaatggtacctgatgtgaggttttctccctgttatgttagcctcaggccatctaacccaggtagaacaaggcaggtaaggaaacycagtgggccaaggaccccgaaggaagcccttaacacaatgcctaatactgaaaacaacggatgaatgtattcaaaatttgtttgcaagaaatgagactttttgcctttttaggacaaaaaaagcacttgaaatttaatttaggttaacaggagatatggcgggtagcacagagtgattatgaaatgcacagggcttccctgccattcgagttttgatcaatctcagcaaaacccaaagtttgccaaaacctggaaacaactcaaatgtccatcaacacagtagaatgaataaatgagttatggtatttcattcaatataacatgaatgaaaatgaatgagatgaaatgaaaatgaattatgtaaaactacatgtaacaacaaggatgaatcctacacccatgtgaaatgaaagaagccacacacacacacactcaagaaatgcatgttgtatgatcctatttatataaagttcaaaggtaggtaaaattaatctgtactgttagaagtgggaagaatggtttctatcaggaaggagtaggtagagattgggaggagttgcaagttggatttctggggtgctactggtggttaatctcttgacctgagtggtaacatagatatattctttttgtgatacttcattgagcagaatacagtcataagtgtcgcttcatgatagggctaagttctgagaaatgtgtcaagagatttcattgttgtaccaacatcatagagtatacttatacaaacctagattgtatagcctactacacacctaggctagatgacatagcctattgctcccaggctacaaacctatacagctgtcacagaactgaatactgtaggcaattgttacagaatggtaagtgtttgtgtatctaaatatatctaaacatagaaaaagaacagtaaacatacagcattataatcttatgggaccaccatcatatatatggtccatcattaactgaaatgtcattatgtggcacatgactgtacttacaatttgtgcatgtcatatgtatgatagtctaaagttcaaatgttggattgggccttgcttgattatccaggaactgagtttgcaagagctaaaaagaacctcagaatccctgcctaacagggatggcagggtccatttctggaccctaatggtaggtccatttctggagttaggaaaactgagtcaaaaacctgagtagaaggttgcagcaacagatacagcaggacaggttggggactgtactcagggggatcaccagataccagtcttgggagcaagttccacagaatggtagggctgagattgctggcaggcaggattggcttggggactgcataggccagaacataaaggtgaagtctaagagagggtattgcagaggatgaggggttgacagtggggagtggtatgttgggagctcagatctggtttatttttaactctcatgaggccacactgcctcctctcctatgttattcccttcctaatgtggatagtatggtcagcccaggccatgggagtgtggccccgattttccatgtagggagactggctctagtttctcaaaagcacaagctgctggacctttttctcaactgttggcctacgtggaagagacttggcttaatggaagggagaatgaagagaggcttttggaaagagagggcctaaacaggatcagcattgatgccaagcaacacaagggagaagggacttttcttggcgttcataccacggtgggccacagygtggtgggaaggcatatttgcatatggtaaggggaggagcttaagggtaagagagtctttgaagattgggaagcaaggaaaccaaggcagctagccacrggcaaggtgtgggggctgcaaacttgctataaacctgctcttcagatccaccacttgcatttttaaccctcagtcaaaaccaaggagctgctgaggagtgatgcctaagatgatagtccccaggatgtgtggggctgactttttgctaactgaactgcaaatatttggagccatttgctgctataacatcttaaaaagatgaggcccctcattggatattccagtcccaattgggagagaataagaagggccacgcctgccctcgatcaagatcttgagtgcaatgcagggtggactcagagagacaaaaacctaatttatccccagcttagtgtctgccagccataaaaagaaaaaaaaaggtcggtggataaacaagagatgtgcctagtgctgagaagcatctccttgtgtgttcagagttaattaacatttagcatagcccctttaggggtgagaagttgtgattgtctttctctaaaggttaaattacctccattatgtttgccttcctgggaagaaaatgcaggatgagttggaaaatcactgttgaaacacaaccgtgacaccactgtgagtatgtctaattccctggcatgggggttttaggcattagaaagtgcataatagtaactagattccaggatgtgtctcaggaaatcccaaagggaagctttttttcattcatagaatacttcctgaagacattattataggaaaactttatttaggagagtttctttgatcctgtactagcacatgagaacatgtaagcagatgacaatatctaatatctactgctgcctgacccactctgcttcccatcccagagtttcttttgcaaaacgcatggagccctgcttcgacaaagctctctagatagcacccaacctcaccaggaaggtctgatttatagcatgttgatcttaagcatgttagtgcaacgcccaaaagagaaaggaagtctcaataaagggatattatagaaagtcttcagccagtggatagactctcatctctaagccaggctgagatcaccagatcagcaggataaagaactatttggggctatatgtacctaatgaggctggattcatgagatcaacagtatttaaggtccttgggcgtaagtagggcagtagctgagaaggcctctctcggctctggctctcctgcccctactcagaatgccacactcacccaaggcttgatgttgctcactgtgggtcagtggctgttgtctccaccgtctctcccacagagggggaataattgcacccccatcacagactttccacaagtcaggatgatctctcagtggctctcaggtttcccaagtatctttcccccatgggcatttgactgacaatctactaaatctctgtacttccatttgctcatctgttaaaacctgtagctgctcacggggctgttgtgatgacaaaatgaaatttacatgattaaggtacttaactttccccagtgcctgcccataatagatgctccagaagtgttaggcattattttaaacccagtaggagtctttaaccacttgattttaattagatgaccctcaggggtgagatgcagtgggtgatttagaaagtgcaccctgggagggcatttgcttggaaggaatcttgtaggagcaggtagaaggtccccaaaagaacaaaatacgggtcacctcacaggatccaccactggaccgggatcctttactgaagctggagcctcattatgaaagagctacttggccgggcacggtggctcacgcctgtaatcccaacactttgggaggccgaggcaggtggatcacgagttcaggagagcgagaccatcctggctaacacggtgaaaccccgtctctactaaaaatacaaaaaaaattagccgggcatcgtggggggctcctgtagtcccagctactcgggaggccgaggcaggagaatggcgtgaatccagtaagcggagcttgcagtgagcccagatcgcgccactgcactccagcctgggcgaaagagcragactctgtctcaaaaaaaaaaaaaaaagagctaattgatggtacctgggtgcccaaacctctactgttgctatcgtttctccatgtctgagtacgtcccacaaggagcagtagcaaaagctggtctttcaggggctcatcaaacacactcagacgtttcaaatgtcccaagatcggcagctttgatcctgaatgttcttcccttgattaaaacaacaacaacaacaacaacaaaaaatgaaacaataaaaatttaaagagaaatttaggccgtgcatttctaagaatttacacttagttcattaaatctattgttttctcagttgtttgaagtccaacaagactaatgagcctttttttccaaatgtctttaaaaatccttttttcttacaaggccatttagaggctttgaacgttgttccaagggtaataatattagtattaataataaattattccaaactcccaacccctgcaggttcagaatttacttaatactctgaacccaaggaatttaaattattaccagaatttattaccttttgtttatggggctttccaaacaggagaaagaaaccacgtggaggttcactagagtgcattgtgtggttcgctttgyggtaatgcatataacccagaagacttccagaaccttctcagcttgaaccttcaaagcctccctaatttggtggaatcagcatggttatgttgagattgtactgagggtactgacttttcagcctggacaatttttggctgatggaccagagcaagagccctcgtaggattctcccataggacatacaatctatgttacataagatggatgatatattgttaggtggctatggggtggaaagagaacaatttttctctggggtgtgtgcaaaggaactgactgccttgctgccccttgaactctctaccttgtcatctgaggacctctggtggtggaaattttcccagcgtgtgtgaattgatgtttctgtgccaagccatccaaccctgttacattttcctacattcctttcctcctattttgtcattcacattaagcaaggagcaacaatcagttgcaaatacccagaataaagtggtggatgtgcctgaccagactgccatttcacaaaagttacctgctaccttctcttccagkgaacttctgatacatttcctgcagcaagagaaggcagccaacatgaaggaaaatgtggcatctgcaaccgttttcactctgctactttttctcaacacctgccttctgaatggtaagtaagaggctatcacgctctctttcattgcctggggtgtttgtcaacagggtggagagtccatgcagtcttcttgcaatgccattatgaaaaatgaaaatgctgtgttatgtgctgctgttaaattatttgcaatattttgcattaaagttaatgcagaaaaattaatgcaattaatgcaaaatcttgtcactgtgctctctgccttttgtcctcatttcaggagtgtaatgaaacagctctgaagaasacaggacctgagttctaatccaggtcctgccagtttctagctgtgtgacctagagccaattacctaactctctgggtttccaaattctcaaagtgaggayagtgatgtttcctctactgcagatgaaataatgtatatgaaaactctttaaaaaaccataatgggatataagaggttgctgttacatggcgggaagcaggtacagccgactctattatctgtgctaacaggagaaatgaagtccacagctaaatgagagggtgggtgcctgtgactatacacttctgtatgtcaacccatgtgcatttctgggtgtgcagacttctatatgtacctgtgtatatattaacttttctatatggacctgatttcaaatgyctctctgtctgaacctgtatgtatatacttttatgtatgtctgtgtgtgttctgtgtatatccgtatgtgcacacttctctgcaggtacctgtgtgcatacaagtatgtacttccatgagtatgcacctgtgtatatttttgtgtgtgtgtgtggtgtgtgtacttttgatgcgggctctgtgtgggcrtctacatacctgtatatgtggttcctgtgtggttttctccgtgtttctgtgcattgagaaagtccattaatgttaacttgttcctctaatgcagatgaaggaaacatttgtctaattgtaattttacaaatctaccctcctctcttgagcttcctgaaggtactattaataaacagtaaaataagaaagagaagctktcagagagagaaaaaggggaaagcagaggtcagaatgacccacaagagaaactaaatactcaagaaatcaatgatcaccctaattggcttccgagtgtgctcattatggaaccataggctttraactttttaaataaacttttctttctacttcacacacttctccccactcatgacaaaagcaaagcaaaacaaaaacttgcattcttgctgtaactcccagcaacacattatcctgaataaattgttcctagaggatgagcaatgttacaaatattggcagagctgacccgggctggcaaggacgggttttagcagggcctgtgagcaggagggtaggtgagtttcagctgacactactagcctggtgtcctgggctccagcctgtgtcccacagcatgccattccactaaattcctctttctggccagctctgcctagagaatcctcttcccacgcatttctcctcactgaggtctcctcctaacctgctgtttctgctctggtgctcagctagaaactctggccttggagcctgcatgaggggtagaggagaaaacagagagaacccccggaggtgctgacccatatctgaaagcgctcctctctgctcctgatatcctaaactcaatgctagggcatccagctagacaaaaaagaggatcagctgaagtcatgtaggcgagcatggtggcttcccagccccacagtatcagggcaaattcccagggctctgctgtccctctttgaacctgacatccaagcaagagaaatgggagcccgcttgccaagagctttggggatttggcaactaaaaaattttacactcttggtrttatattttcacaccacctcactgagaccttctagcatccagtctggaactgggtacagctcttagataacagtggytgctcagaaccaggagaggagctggctactctcctacctcttaccacacctcctaccccaaaaagatccatcaaattatagttttatagaccctatgggattacaaaagggccacacactcttgaagccctacgtatccaaaggaagccctttgcaacctcaccacacacacacacacacacacacacacacacacacaaaggaaagagaggaaaatctaagagaaaaaaaaggactaaaaaccaagattcagaaatggggatggggtggatgaggagacagactgtgagtctgggtcacaagatcaaagctgaataaaatcaaggaaaagtggccaggtgcagtagctcatgcctttaatcccagcagtttgggaggccaaggtgggcagagcacgaggtcaggagttcaagaccagcctgaccaacatggtgaaaccccatttctactaaaaatacaaaaacttagccgggtgtggtggtgtgcacctgtaatcccagctgctcaggaggctgaggcagaattgcttgaacccaggaggtggaggttgcagtgagccaagatcgcaccactgcactccagcctgggcgatagagtgagactccatcccaaaaaaaatcaagaaaaagtgaagggaaaggggaaggaaaggagaagatggggaaagaggaaggaaaggatgcccagatacagggagctttagcgatgtagtgaacggacagaagatcaggaacaagttgagttcattgtgtggrgatggcagaaagatggagattggtgagctgagtggagaagtgccatagagcggtgttttgccagagtgtctgcggattgctcatacctgggaaggattctttgtatggttyccttaggctgagggagggtatcagctttacagaccttgtgggattacaaaagggccaccacacactcttcaaccaatatgtgtctatcttgcattcaaggctcattctttgttgaaattttgcagttggtcactaggctattgttatctccatctcaaagtacacagacacacacacacacacacacacacacaccagcaaaatgctctctaagagcaatgccaacatcagggcagcccacagaggagtgttgctggatgctgatgcttggcattcctgagcatccaccctaggtctcctcagcctgagacttcatcgctggctttggtccatcaatctgtttctgtcaccagcagaagggtcaaatggttaaatggacctcaatattgatgcagtggcttctggctttttctaggacagttacctcctggaaaacctgagatctttaaatgtcgttctcccaataaggaaacattcacctgctggtggaggcctgggacagatggaggacttcctaccaattattcactgacttaccacagggaagggtaagaagttcccttctctcctatgaaaccccacatgagtactcccattctccaggccaaagaaacactggttctgagtgacagcacatccctgaatttacaccagtaaggttcataccaccggggaaaggggagtctaaggtccatgcccacattctcctgttaatgtctgttaagagctgtgtcaatatacataaggttaccagccatagcagtacaatatcagtgttactggatgctgatgcttggcatttctgagcatccaccctaggtctcctcaccctgagacttcatcacttgcttgggtcccatcaatctgtttctgtcaccagcagaagggtcaaatggttaaatggacccaatattgatgtaatgtttcaaatcccctctcacagcttaggttgcagcctgaggccccatagaagtgtttcttaattgctagttaatcttaaatgctcatctataattcttatgccatttgtattttttttaactaaacatgtcacttttgcaaaataagtaggatcgtgtgaagtggtaccatacaatccttgacaaatgtggtatattaggttttcaaacttgtttcatgttcaagaaaataaagaaccttgtagggaaaagaaggtgaggttttttccttagcacattgctcatccaagagccaccatctcctagaagacatattgggacctaaggttgaaatgagrgctaaaccagatcatctctgtgcaagcattttgttacrctgacagtgagaccctcctgaaaatcatgggagagctgcattcttcttcagaaaggaaaatatttagttgctggtagagacagctggcccactttccaatgactgcactttgttgtacacaaaactgtcatcccggctgaaatccaaagggacatcatgtaaacagatttcaggaactcagatgcaaccagaattgaacaagcctccacccctgtgcagtgtatcttgagctgaggttcctgagtctaaatgtgagcagcctactgagccacgtgggcttgaaatacctcctctcaacgtcacttcactttattgctgacttggtgcagtctgaaatggaccaacatcagtttttgtcctcttgaacccttttttaaaaaaygaaaagtaattcaacacgtatgtgaaatagctgctgcattgtgcatgacccctctgtgtgtggacaggtgaaagttccaatttcctgaggcaacccaatgggcatgacctgggtatggtggtgcctgggccattgaaagctcgagtgtttatcagcagggaatataggtccccgagcccacaagaacacttatagaaaggaagggttgatggaagaagaatacttgaggccctaaaataacctttccaacatgctcttccctctctcactcccagctgaaatgggcagaacatggaagcctaaggaaccatttgtcagctctgggttttgcgcttggaatttctgatacccaaaggccagtggtattgatctatgaagaaaaaaactagactctctttattactttcttattcattcctaatacattacttattgcagagagacactcatgcatgaatgtccagactacataaccggtggccccaactcctgccactttggcaagcagtacacctccatgtggaggacatacatcatgatggtcaatgccactaaccagatgggaagcagtttctcggatgaactttatgtggacgtgacttacataggtaaggggaaggaaagtgggtgaggaatttcttactccactatgtattagccaatagtcacactcagtttgagtcttcttgggttttggatggatccccaaaaagaaagatgagaaaactcacgatatgcttgtcaacagaacagttcaaatcattttttatcaagtcattcatgacactaaggctggcacttgggatccttgtgttcctgtgctttcccttgaccctcatcctcttgcactcagcacaaatgttctatgtatgtttcccttgccaactcttctttcttgccctgcccttgcaattgatgtccgcttcttccttggcaagctgggatttcttttatttctcctcatggaagacagagctgctccatgaagaagaagttcttagaagggttcatctgattctgcacccacagcaattgctcccattgctttgccccaaactcatatatgtgtgtgtgtacatatatatgttgcatatatgcgatatatatattagtgtgtgtgtatatatatatatacatcattggtaattttttttactaaacatttacaaagtaatcatgttacttttataacataagataatatgaggtggtgccatgtaattcttgacaaacatggtgttcaagaaaataaagaatgtaggctgggcgcggtgcctcacgcctgtaatgccagtactttgggaggctaagacaggcagatcataagatcaagagttcaagaccagcctgaccaacatggtgaaaccccatctctactaaaaatacaaaaattagccggctgtggtggtgcgtgcctgtaatcccagctactcaggaggctgaggcaagagaattgcttgaacccaggaggtggaggttgcagtgagccaagatcatgccactgcactccagcctgggccacagagcgagactccacatcaaaaaaaaaaaaagaaaagaaaagaaagaatttaaatgttaaaaactaccaatggtctgtgcacacacacacacacacacacacagagagagaggaagagagagagagagagatttatcacctctgcatctactggtgctgccaaggttgcaggaaggtcatctccaagctgaacgggaagctctctggcatggccttccatgtccccaccacagatgtgtcggtcatggacctgacctgctttttagaaaaacttgccaaatatgatgacatcaagagggtggtgaagcagggacaatgttctggagagccccatggttgttgtacctcagttgcgctgaggggccattcacagtcttctttatggagtgctggcatggactgtggacatgagtccttccatgatgaatgacaaattttatataagtgtggtgtgtgtgtgtgtgtgtgtgtgtgtgtgtgtattgccttaccctcaagcattataatatttgaaggcaaaacaatgaaagcaagaaatgttctgaaattagcaactgttttaataaatgcgacccacaaaaaaagggactcactaaagaaaagtaatatgtttaaaaagagaaatcaacaagtgtatatgaaattctcattgatcctggaaaacaaattctctggtgaaagaatatgttggaccatatttttcaaaataataaaagaagtgtccacagaactctcctataaccctgcagcctacagtgttgggacaggccacggaagttcattttaaaatgcacggtacattttctgacacttcgactctcatccagcaataacctgcagtacagaatgacaacattgaaagataattgctcaggagtagagttctttgttgttgagtaatatttagttacattgaaaacacttaaaagcagtggttctcaactgggagctgttttttcttcccacaggatatttggcaatgactggagacatttttgattgtcacaagctaggaaagtggggagatgggggtattacttgtatgtggtgcataaagcccagagatcctgctaagcattctacaaagcataggacatccccctccaacaaagaaatatccagtccaaaatgcaagtagtgctgaggttgggaaagtatgctctaaaagatacatcctcaacattttatttgcgtttttgtataattttttatcagaagcattgtttagtatgtatttaacttaaaacatatattaattagctgctgtttgtttaggaaatgtgctcaaaataatctttcttaggtatttactcagtaacatattagcttagacttgatggcaattttctttttttagtacaggggactttattgatggcacatggcaaagtgggtctccctaagcacctgctcttcagggagtctgcataaaaattgtgaggggagattctcactgaggtggagcactgagtgccacagggactcgccagcagctgagggtctcactcttgctcttgtgtgctcactgggggtggtggtccaggggtcttactacatggaggccatgtggaccatgagtccaccaccctgttgctgcagcctaattcactgtcataccaggaaatgggcttgacaaagtggttgttgagggcgatgccagccccaaaagtagaagagggggtgtcactgttaaagtcagaggagacagcctggtgcttagtgtagcccaggaggggtgtgtgtgtgtgtgtgtgtgtgtgtgtgtgtgtgtttgtgtattgccttaccctcaagcattataatatttgaaggtaaaacaatgaaagcaagaaatgttctgaaattagtaactgttttaataaatgtgatccacaaaaaaggggatcactatagaaaagtagtatgtttaaaaagagaaatcaagtgtatatgagattctcattgattctggaaaacaaattctctggtgaaagactatgttggaccatatttttcaaaatcataaaagaagtgcccacggaactctcgtataaccctgcagcctatgaaggggccctccgatgcctgcttcaccacctttttgatgtcatatttggcaggtttatccagatggcaggtcaggtcaccactgacacgatggtggggacatggaaggccatgccattgagcttcccattcagctcagagatgaccttgccctcagccttggcagcaccaacagatgcacagatcatgttctggaaagccccacggctgttgcaccacagtttcccagaggggccattaacagtcttggtggagtgatggcatagactgtgaacatgagtccttttgcaattgatggcaaattttttttattattatactttaagttytagggtacatgtgcacaaygtgcaggtttgttacatatgtatacatgtgccatgytggtgygctgcaaccattaactcatcatttacattaggtatatctcctaatgctatccctcccccctccccccaccccatgacaggcccctgtgtgtgatgttacccaccctgtgttcaagtgttctcattgttcaattcccacctgtgagtgagaacatgcggtgtttggttttctgtctttgcgatagttttgctgagaatgatggattccagcttcatccatgtccctacgaagacatgaactcatccatttttatggctgcatagtattccatggtgtataagtgccacattttcttaatccagtccatcattgatggacatttgggttggttccaagtcttgctattgtgaatagtgccgcaataaacatatgtgtgcatgtgtctttatggcagcattatttataatcccttgggyatatacgcagtaatgggatggctgggtcaaacggtatttctagttctagatccttgaggaatcgccacactgacttccacaatggttgaactagtttacagtcccaccaacagtgtaaaagtgttcctatttctccacatcctctccggcacctgttgtttcctgactttttaatgatcaccattctaactggtgtgagatgatatctcattgtggttttgattttgcatttctctgatggccagtgacgatgagcattttttcacgtgtctgttggctgcataaatgtcttcttttgagaagtgtctgttcatatccttcaccaactttttgatggggttgtttgatttttttcttgtaaacgtgtttaagttctttgtagattctgaatattagccctttgtcagatgggtagattgtaaaaattttctcccattctgtaggttgcctgttcactctgatggtagtttattttactgtgcagaagctctttagtttaattagatcccatttgtcaattttggcttttgttgccattgcttttggtgttttagtcatgaagtccttgcccatgcctatgtcctgaatggtattgcctaggttttcttctagatttttttatggttttaggtctaacatttaagtcttaaatccatcttgaattaatttttgtataaggtgtaaggaaggtatccagtttcagctttctacatatggctagccagttttcccagcaccatttattaaatagggaatcctttccccatttcttgtttttgtcaggtttgtcaaagatcagatggttatagatgtgtggtattatttctgagggctctgttctgttccattggtctgtatctctgttttggtaccagtaccatgctgttttggttactgtagccttgtagtatagtttgaagtcaggtagtgtgacgcctccagctttgttcttttggcttaagattgttttggcaatacgggctcttttttggtcccacatgaactttagttttttccaattctgtgaagaaagtcattggtagcttgaatctgtaaattaccttgggcagtatggccattttcatgatactgattcttcctatccatgagcatggaatgttcttccatttctgtgtatcctcttttatttcattgagcaatggtttgtagttctccttgaagaggtccttcacatcccttgtaagttgggttcctaggtattttattctctttgaagcaattgtgaatgggagttcactcatgatttggctctctgtttgtctgttattggtgtataggaatgcttgtgacttttgcacattgattttgtatccagagacttgctgaagttgcttatcagcttaaggagattttgggctgagatgatggggttttctaaacgtacaatcatgtcatctgcaaacagggacaatttgacttcctcttttcctaattgaataccctttatttctttctcctgcctgattgccctggccagaacttccaacactatgttgaataggagcggtgagagatggcatccctgtcttgtgacagttttcaaagggaatgcttcctgtttttgcccattcagtatgatattggctgtgggtttgtcataaatagctcttattattttgagatacatcccatcaatacctagtttattgagagtttttagcatgaaggctgttgaattttgtcaaaggccttttctgcatctattgagataatcatgtggtttttgtctttggttctgtttctatgatggattacatttattgatttgcatatgttgaaccagccttgcatcccagggatgaagcctacttgatcatggtggataagctttttgatttgctgctggattcggtttgccagtattttactgaggattcttgcatcaatgttcatcagggatattggtctaaagttctcttttttggttgtgtctctgccaggctttggtatcaggatgatgctggcctcacgaaatgagttagggaggattccctctttttctattgattggaatagtttcagaaggaatggtaccagctcctctttgtacgtctggtagaattcggctgtgaatccgtctggtcctggactttttttttttggttggtaggctattaattattgcctcaatttcagagcctgttattggtctattcagagattcaacttcttcctggtttagtcttgggagggtgtacgygtccaggaatttatccatttcttctagattttctagtttatttgcatagaggtgtttatagtattctctgatggtagtttctatttctgtgggattggtggtgatatcccctttatcattttttattgcatgtatttcatttttctttcttttcttctttattagtcttgctagtggtctattaattttgttgatcttttcaaaaaaccgctcctggattcactgatttttttgaaggttttttgtgtctctatcaccttcagttcttctctgatcttagttatttcttgccttctgctagcttttgaatgtgtttgctcttgcttctctagttcttctaattgtgatgttagggtgtcgattttagatcttccctgctttctcttgtgggcatttagtgctataaatttccctctacacactgctttaaatgtgtcccagagattctggtatgttgtgtctttgttctcattggtttcaaagaacatctttctttctgccttcatttcattatgtacccagtagtgattcaggagcaggttgttcagtttccatgtagttgagcagttttgagtgagtttcttaatcctgagttgtagtttgattgcactgtggtctgagagatagtttgttataatttctgtccttttacatttgctgaggagtgctttccttccaactatgtggtctgctttggaatacatgtgatgtggtgctgggaagaatgtatattctgttgatttagggtggagagttctgtagatgtctattaggtccgcttggtgcagagctgagttcaagtcctggatatccttgttaactttctgtgtcgtcgatctgtctaatgttgacagtggggtgttaaagtctcccattattattgtgtgggagtctaagtctctttgtaggtctctaaggacttgctttatgaatctggtgctcctgtattgggtgcaaacatatttaggatagttagcacttcctgttgaattgatccctttaccattatgtaatggccttctttgtctcttttgatctttgttggtttcaagtctgtttcctcagagagtaggattgcaacccctgcttttttgttttgttttgttttccatttgcttggtagatcttcctccattcctttattttgagcctatgtgtgtctctgcatgggaaatgggtctcctgaatacagcacactgatgggtcttaactctttatccaatttgccagtctgtgtcttttaattggagcatttagcccatttacatttaagattaatgttgttttgtgtgaatttgatcctgtcattatgatattagctggttattttgctcattagttgatgcagtttcttcctagcattgatggtctttgcaatttggcatgtttttgcagtggctggtaccggttgttcctttccatgtttagtgcttccttcaggagctcttgtaaggcaggcctggtagtgacaaaatctctcagcatttgcttgtctgtaaagtattttatttctccttcacttatgaagcttagtttggctggatatgaaattctgggttgaaaattcttttctttgagaatgtkgaatattggcccccactctcttctgggttttagagtttctgccaagagatccactgttagtctgatgggcttccctttgtgggtagcctgacctttctctctggctgcccttaatgttttttcctttattttaactttggtgaatctgacaattacgtgtcttggagttgctcttctcgaggagtacctttgtggcattctctgtatttcctgaatttgaatgttggcttgcctttctaggttggagaagtactcctggataatatcctgcagagtgttttccaacttggttccattctccctgtcactttcaggtacaccaatcagatgtcgatttggtcttttcacatagtcccgtatatcttggaggccttgttcatttctttttactcttttttctctaaacttctcttctcacttcatttcattcattttatcttcaatcactgataccctttcttccacttgaacaaatcggctactgatgcttgtgcatgcatcacatagttctcgtgccatggttttcagctttatcaggtcatttaaggtcttctctatgctgtttattctagttagccatttgtctaatcttttttgaggtttttagcttctttgtgatgggttcaaacatcctcctttagctcagagaagtttgttattaccaatcgtctgaagccttcttctctcagctcgtcaaagtcattctccgtccagctttgtttcgttgctggcgaggaactgcattcctttggaggagaagaggtgctctgatttttaaaatgttcagcttttctgctctggtttctccccatctttgtggttttatctacctttggtctttgatgatggtgacgtacagatggggttttagtgtggatgtcctttctgttagttagttttccttctaacagtcaggaccctcagctgcaggtctgttggagtttgttggaggtccactccagaccctgtttgcctgggtatcaccagcagaggctgcagaacagcaaatattgcagaacagcaaatgttgctgcctgatccttcctctggaagcttcatctcagaggggcacctgggtgtatgaggtgtcagtcggcccctactgggaagtgtctcctagttaggctactcgggggtcagggacccacttgaggaggcagtctgtccgttctcagatctcaaactctgtgctgggagaaccactactctcttcagagctatcagacagggacgtttaagtctgcagaagtttctgctaccttttgttcagctattctctggccccagaggtggagtccacagaggcaggccggcctccttgagctggggtgggctccacccagttccagcttcctggccactttgtttacaatctcaagcctcaggaatggcagacacccctcccccagcctcactgccaccttgcagtttgatctcagactgctgtgctagcagtgagcaaggctccatgggcttgggaccctctgagccaggaatgggatataatctcctggtatgccatttgctaagactgttggaaaagcgcagtattacagtggtagtgtcccaattttccaggtaccatctgtcatggcttcccttggctagtaaagggaattccctgaccccttgcacttcccgggtgagacaatgacctgccctgcttcgcctcacgctccatggactgcacccactgtccaacaagccccagtgagatgaacctggtacctcagttggaaatgcagaaatcacccgtcttctgtgttgctcacgctgggagctgtagactggagctgttcctattcagccatcttggaaccagaccacggatggcaaatttttaaaagttggtttttaggcaaatgtaactcataatgccaagtacactatagttacagtcactctttccccatctggtacagagattgatttaaggaggtgataaatgaatggagaaaatgtcactgaacagcagaactgagactgggatgaggcaagccagcaccccagcacctaagtcttaggaaggtactcacaaggcctgtacctacaggagcctacagaagtaaatgcctccttcattttttttttaattcttgccagcaggaagccacttcatttgtttttattgtggcaaaaacacaaaacacatatccaccatttcaactattttatagtatgcaattgaatgcattagtttattacaattttatgcaaccatcaccactatctagttctgtaacacgtttacctccctcaatgaaaacttcacatccactactaagcagttacttctcatttctcccttcctcaagccctggcaatgactgtctgtttctgggagtttgcctcgtctggatatttcatatatatatatatatatatatatggaatcataaaaaatatgwagctgttccacatttttttttttgaaatggagtttcgctcttgtcacccaggctggagtgcaatggtgcgatctcagctcactgcaacctctgcctcccagattccagtgattctcctgcctcagcctcccaagtagctggaactacaggtgcacaccaccacgcctggcaaattttttgtatttttagtagcgatggggttttaccacattggccaggctggtctcaaactcctgacctcaggtgatccacctgcctcagcctcccaaaatggtaggattacaggcataagccactgtgcctggcctctaccacattttttatccattcatcaactgatggacatttggatttcttcacttttggctattataaatagtgctgccatgaaaattcacatacaagattttcttaaacatctgttttcaattcttttgaatctatatctaggagtggaattgatgggcaatatggcaactctaagtttgactttttgaggaacttccagactgttttccacagtggttgcaccagtttacattcctaccagcagtattgagggttccaatctctccacatcctcaccaacacttgttatgtttcattttttaattcttgccatgctagtacatgtgaaatggtatctcactgtggttttgatttgcattccccagaaggctaatgaccttgagcatcttttcatgtgcttcttggccatttgtccctccttgaattttgtatcctatgcacttcactcacgtcagcctaatcccaggcctgctctccagcacctgacatcaaacgcaatgtcttacaaccatggtagagtgaaatagtagagaccacttcctctaagtcacatagttatgggttcaaataacacttttaccaaatatgtgaccttaggcgagtaatttccctcttctaagcctgtttcctcctctgtaaaatgaatgggtacaataatagtacttcatggagttgctggaggattataagaaacgatgcagagatagtattttatacagtccctggcatgtagtaaatactcgagaaacattagctgtcattttgctaatgggaattcgctaagcatttgttgaatgagtgactgggccaacaggctgttatgaaatcaccaaaaggatcattgccaaaaagctcaacctccatttagcttatgggagagtggatctcatttaccacagggtgtaatatgtatgttgaatataagatgtaattgctgaaacgaagatggaatctgtaaacctgttatctgcagagttatgattatgaatagttcatttacaaaaaactgtgtgtaactaaggagaatctcatgcccagctgagggaaataagctgtttgaaatctctttccctatagtcttccatgccaactcccacttgcaaatcccagcccagtttttatcacctggtctctgtcatcatgaaaattatggggatagctatgagattctaactgatgaaaagcgagaacatgcggagaatgaaataccagctgcttattattcttaccatgtaaacctcatctgtatgcacaaatatgattggtcacatactaagaggtagaagacaaaaggcccgggtatttggggggcttatagtacagtgggaagagtgagatgataaacagaaaaaggaattcstaatagaaaatggtaaagccaaagaaaaggtgcaagcaatgagtgctactggcatttgctgtatttctgcagttcagccagaccctcctttggagctggctgtggaagtaaaacagccagaagacagaaaaccctacctgtggattaaatggtctccacctaccctgattgacttaaaaactggttggttcacgctcctgtatgaaattcgattaaaacccgagaaagcagctgagtgggaggtgagtgatccatatgctttttgaaggaactatggcctttggcaaggataaagcccycacaactgaaaacaggtcattcctcctaattactgggtcactgtgttggcctccaatgcagttgtgacccacccagatgtgaaaagcccttttcccctctattgggattgatgggggctcatcttcacagctctcctcgggctagtttcttgtactgctcagacacttgaccaggtttccaacctgcctcccttagtacattttagatctagacccttgtaagagtacttaaatggcacmaggtgggagggggcagtctcagtatatcccgtccatagtcaatggctgtgtttttatttactttaaaatacctcaaccaggctgggtgcagtggatcacacctgttaatcccagcactttgggaggccgagacaggtggatcacctgaggtcaggagttcaagacawgcctggccaacaggaagaaaccccatctctactaaaagtacaaaaaaattagccaggtgtggtggcgggcacctgtaatcccagctcctcgggaggctgaagcaggagaatctcttgaacccaggaggcggaggtttcagtgagctgaaatcgcgccattgcactccagcctgggcaacaagaatgaaactccatttggaaaaaaaaaaaaggctgggctcaggggctcacacttgtaatcccagcactttgggaggcagaagcaggtggatcacttgaggtcaggagtttgagaccagcctgaccaacatggcaaaacccagtctctactgaagatacaaaaaacttagccagscatggtggtgagtgcctgtgatcccagctactctgaaggctgaggcaggagaattgcttaaacctgggaggcagagatttcagtgggctgaggtcatgccattgtgctccagcctaggtgacaagagcgactccgtctcaaaaaataaataaataaaaataaaaataaaataaaatactttgacctaaagaaataatattaaattgcaggtggtacaatattccatctttacatactttagtatatgcctcttttaaaaaggcacatttccaaacatagccaaaataataggatcacacataggaaaattaaaattccttaatatcgtttaatacccagtccctagtttaattcctcccaatgtttccgaatatctttaacagctactttgtccaaaccagaatctgctcgtagaccacacattgtaactggtcgttatatccttcagtttcagtgtaatgaggagactgggccacttgtcccatagagtatcccaccttgtacctttctctgatcagttctttgtggggttatttagctaatttctctacgcctccatttcctgtaaccagacttgattagatgtaggttgaacaatttttaccaagaattggtaaattcagaggtgatattatgtactctatattgtatttaatcagatgtcaaaaactatctggttgacccaccataagtgatgctaaaactggcccctgaattgaggagatgacaaactgatcccttgattgtaaggtcatgtttaatttgtatactactactttaccatacatgaatgcccaattctctttcacctcatgtttttaacaccaatttattattgaatcagttatttcattagggtttaaaggctaacaattctttaattttgttattcttttttttttttttttttttttgagacggagtttcgctttgtcactcagctggagtgcaatggcacgatctcggctcactgaaacatccgcctcccaggttcaagcgattctccttcctcaccttcccaagtagctgggattacaggcatgtgccaccatgcctggctaattttgtatttttagtagagacagggtttctccatgttggtcaggctgatctcgaactcccaacctcaggtgatacgcctgcttcggcctcccaaagtgctgggattacaggcatgaggcaccatgcctggccaattttgttattctttctacatttattaagtagttgtttttcataaagtgggaaggaggcagaatatttgacttttctgaagtagagtcccaaatggagagatagaaaacctgctaaatttttgtgtgagcaattttaagagaaggaaaagatagggctaagacagtggagtagtgacagcagggaattctctgtatatgattgttcagcctaacttagtttattttttaggggaaaactctctttcttcacaacaaatgttagaattgacttctgttttccttattctaccttagatccattttgctgggcagcaaacagagtttaagattctcagcctacatccaggacagaaataccttgtccaggttcgctgcaaaccagaccatggatactggagtgcatggagtccagcgaccttcattcagatacctagtggtgagcgtcttggctcttttttgcttatgtccctaaatatgttttaaatggtatatttgcatataataactactaatagagaaaccattttgagccttagccagaacaatagaggtgggtttataatctttctgcccaatacgaagacattttgaaaagcagcattgcaccctggattactgtcaatggagaacaattttaggataaggctacagacatgggtctgatgccccaaggggcttgatgagcagttattatgctcccaccatcttccctattcccatcatttagaggatttggtcaaggtcatcctctagttcttccagaatttataaggcagtaccrtgtctcaaaggctcagtctctgccatggattacacttggcaccttgtctcttagtgaagacacaggatataagatagacagctccagcaaagcaccttaattcagtagcttgtgttctataagggaacaatccatcttgcatttttaaaatgctttacagcttacaaagcctgtaccttatttggtcctcccaaccctcccaggtattcagagaatatgattatcattaaaaattaaaagtgaagaaaccaaacctcagcaaagttaggagtcttttccaaaaccacacaggaaagtctagcttttctaacaacttgcctgaccaaagtatcgggctttcattggcttggcatgctggaaagggcactgaactgcaaatcaggcaggcatctagtccactcctgactcttgcttaacaaaagcacagggtctagaggcagaaagcctgagttcaaatcccagcctgcaacactatagttatgtggccattggtaaatctttctttgattcccagttttcttatctkttataacaaagcaatgtaggcaaagagtttaacaccattgatggcttttagtaagaacttaatgttagcttttattattattactgcaaacgaccatgtgaccttsgatttcctctttaaggatcaattaaaaagaataatgaaaggatttttaaatttttagagtactataaaatatacgcaacatattaacatattaataatatttaaaagagaatagccctgtcattgatgatactttggattgctgttcaaatcaaaaaaatatatgaatggaggaaaacactcttgggtttaagagtttcattcattaggttggtttgtttttaatgatgctgtacgtgatcaaagctttctggctgtttgttttttagacttcaccatgaatgatacaaccgtgtggatctctgtggctgtcctttctgctgtcatctgtttgattattgtctgggcagtggctttgaagggctataggtacttcactgtctctcaacttttcctcccaatcatgatagtcaaggataatgacaaaaaaaaaaatacaaagatgatggaaacctgtagataatcctcattttagccattagatgtagtgtgtttgcccataaaaaaaatcttttatcagtgctataaaaagtagaaaaattgactcgtttcaggctgatgttctttctatgaaacagagattcctagttgtgaaacagtaaaaatctggcaagagtagctaaaatcaagagaagcmaatagtccagataatccactaacttcaaaatcagcctccttaattagctaaagttaattttaatataggcctctgtaattttattttcatcattgattgtttcatggagctgccaaaccaagtcctatctctatcacagtccctatagtggctattatactaacctttcaaaaattacaaagtcagaaatgagtcatttagccaatctcatgaattattttatagcatggtgacctgcatctttccgccagttcctgggccaaaaataaaaggatttgatgctcatctgttggaggtaagtacaggaggcaaaaaaatggagtgtgactcactgctctgtagtaattaactctacacaytcacasacagtccccrtcagttcagcctggtagtttcagccagcctttttggactgtctctcctggtcagcatgtgtgttaacagaaagttgtgtgaaggatgagggtacttactttcacacactaaatgtcagagggcaaggagagaaagccaagaaaacatggaaacacatttattgatttatcagatctactcataagcatagagataaacattttatacaaataatcaatttagaaagagagtgaatattttgattaatgcaaaacagggacccaccaccaccccctcaatcatacattggtaaaagcttctacttgaatgttctttacataaagccatagtaacagaatatcccattgccattatctctcactttgggcactcagctgagaccagatcagtactgtggggccatctgtttgccaggacccatttgggctgattcaagagggaattaaataatgagtgttttgaatgaaaagagaggttagaacagttttaaatttttctccaaattgaaataaatagtttcagtttggcttttaagcttaacactgacatatataaaagcaactagctgtacattaaggcaaatacttgacccagctgctctgggtctgacagtgtaagaatagaagaattgagtcctggataatctggcttgtctgtgttcactttggttgcaaatatcgaagcagggactagagcccaggagtcccagctcctgacccagtgctcttcctccactatccagtgtagcattggcctgatagaaccagcatgaatgtctcagcaaactaaactagttactgtccagctcacaatttaacctgctagccacagagacttaacgataaaatagctacttttgtctcaaaaatatgtgttagtattcttaatgatattacctctaatcctcaaaagaaccctcccagatgggtagtattaatattattttctaccttttaaaaatggagaagctgaagttcagagagcagcttgtccaaagtcacataccctataataagtgataaagccaagacctaggtcagtacctgacccaagtcagaggataagaaaaaagaggccrggcgcggtggctcacgcctgtaatcccagcactttggaaggcagaggcgggcagatcacgaggtcaggagatcaagaccatcctggctaacatggtgaaaccctgtctctactaaaaatgtaaaaaattagccaggcgtggtggtgggcgcctgttgtcccagctactcgggaggctgaggcaggagaatggcgtgaacccgggaggcggagcttgcagtgatccgagatcatgccactgcactccagcctgggcaacagagcgagactccgtctcaaaaaaaaaaaaaaaaaaaaagaggcaagagtgagaggaggaggcaggaggaaataggagggggaaaggaaggatagaagcagggagaataataggaagggcggaaatatggaatagggtgatgaagggggagaagagaaggagggagaggaagtagagtagaagaaaacagtagattaggaagagggaggagaagggaaggggaaataagaagaggaaggagagaaggaagatgaaccacagaaggaaaagacaagaatccacttactattgccagactctagaaagtgatagaggaagttagcaggccagcaaccacacctctgccagtgggccgcagtgtcagatgcatgcataagcactgtgggtttagaagtttcacaaaccttcattttatagttatctgtttattattgtatgtgtatatactacttgcccattaaactcatgattattattgcttggagagagactacgttaaatatcctgagttgactttaaaaaaaaaaatctgctgaatagtatccagaaggtgattctagatggcctggcacacaaatgtctgaagtttgagatcttcccacctgcttgtggcaatgaacagcaccacttagcagggatgctgatttggaatgttatgaagctaacagccatctcttcttgtgtctgtgttttaatagaagggcaagtctgaagaactactgagtgccttgggatgccaagactttcctcccacttctgactatgaggacttgctggtggagtatttagaagtagatgatagtgaggaccagcatctaatgtcagtccattcaaaagaacacccaagtcaaggtatgaaacccacatacctggatcctgacactgactcaggccgggggagctgtgacagcccttcccttttgtctgaaaagtgtgaggaaccccaggccaatccctccacattctatgatcctgaggtcattgagaagccagagaatcctgaaacaacccacacctgggacccccagtgcataagcatggaaggcaaaatcccctattttcatgctggtggatccaaatgttcaacatggcccttaccacagcccagccagcacaaccccagatcctcttaccacaatattactgatgtgtgtgagctggctgtgggccctgcaggtgcaccggccactctgttgaatgaagcaggtaaagatgctttaaaatcctctcaaaccattaagtctagagaagagggaaaggcaacccagcagagggaggtagaaagcttccattctgagactgaccaggatacgccctggctgctgccccaggagaaaaccccctttggctccgctaaacccttggattatgtggagattcacaaggtcaacaaagatggtgcattatcattgctaccaaaacagagagagaacagcggcaagcccaagaagcccgggactcctgagaacaataaggagtatgccaaggtgtccggggtcatggataacaacatcctggtgttggtgccagatccacatgctaaaaaygtggcttgctttgaagaatcagccaaagaggccccaccatcacttgaacagaatcaagctgagaaagccctggccaacttcactgcaacatcaagcaagtgcaggctccagctgggtggtttggattacctggatcccgcatgttttacacactcctttcactgatagcttgactaatggaatgattggttaaaatgtgatttttcttcaggtaacactacagagtacgtgaaatgctcaagaatgtagtcagactgacactactaaagctcccagctcctttcatgctccatttttaaccacttgcctctttctccagcagctgattccagaacaaatcattatgtttcctaactgtgatttgtagatttactttttgctgttagttataaaactatgtgttcaatgaaataaaagcacactgcttagtattcttgagggacaatgccaataggtatatcctctggaaaaggctttcatgatttggcatgggacagacggaaatgaaattgtcaaaattgtttaccatagaaagatgacaaaagaaaattttccacataggaaaatgccatgaaaattgcttttgaaaaacaactgcataacctttacactcctcgtccattttattaggattacccaaatataaccatttaaagaaagaatgcattccagaacaaattgtttacataagttcctataccttactgacacattgctgatatgcaagtaagaaataatgcctccaattttttcttaaaatagtttagatatgttaagcatggattttccccctaaattctactctaaagcttctataaaatatagtttggaaataaaaatkttcttacacaaggggcaaatgaatttcatgtgaatccctttaggatgttttcctscttcatttcagcatgatagataatttattatacaccttagtctttccttagttaaaaaaaaattccctaaagactaacttgaaaagaaaaccacagcaggatgctaatggaattactgccttactgtacatacaaattctactttaatataaacccataagtttaactgtatttttgaagactatttttctatgacttaggtaaaataaaagactattttctattttcccagtacagctgtttatgtattcagtgggtacagtattttctgctgcaaggttataatgtgtatttacagtacatagtagtatataaagttcccgtttgtggagtaaaatgccataccaacccaaagcccactgtgaaatatgaagtgaatgacaaaattcagttttcaacgcaatatagtatagtttatctgattcttttgatctccaggacactttaaacaactgctaccaccaccaccaacctagggatttaggattctccacagaccagaaattatttctcctttgagtttcaggctcctctgggactcctgttcatcaatgggtgaatcttcctaaagctaccataaaaagggagggcgacgatttctaacagctgtttaaaagagagaggttttgcttttgtgagaaatcttgggccacaaaaaaattttaagcaaagccaggagttagtgtctctctgaagtaaattcaattgcaaaatcttggcagaggcagaaatggctcatatcagaagtgtccaaataaaagttctgggaaactaggtatttgcttcccagagcaatgggaatagctccaaaggtcagagtaaggtaatgagaatctcccggtcaattccagtgccaggcttcctgaaagaagtcaaagcttggatcctcattttaaagggcgcatccatgactcatctagcagcccctctctatttttcccttcacttgatggtaaatccattctatatgtccatttactagctggacatagagaacttgagctcacctctgggagttaaatattccaccccaactatcccatattgatagcaactggactcagaggtccccctcctgtttgaaagtgaacacattgccaatgttttgagaatggcaaaagcaatagatacgaagctccatttttctaatatataaacaatatcatgwgagtaagggaagcgtgtgggaaagttgtccaagctcattcagtcccctaaatcctcgatactttaactgtctgagaaccaactgcataggcatcacctgggcagtgtttgaaaattccatttgcagaatcttaagcatcagaatctgcattttactaagatccccaaatgattcrattgcacactgaagtttgagaagcattgttctagacaaccatttccactaaaggttattttagttcatagtaacaatcctcttttggaaaggacagatcaagtctgtttgacttgcaatgaacaacactgcatgtaagcaggcaaaaaaagaaacatatcagtagtttaagattcacattatgctgaatcttatatgaattcacataaaagaatgacctgcaaaactacgcacaacttctgaaaggccaaggaatataatctaccttgagagacattaaccaaagacagtcaccctcaaagccaatgcagactaaatctttcctaacatagtctattctctaagaatagagaagatatgtatcagtcactcttatagtctgaaaacctaaacataaaagtaatctgcttttgacatataattttgtataatacgtatgaaaaaatgtgacagctaaggacttgaattaaatccctaaaaaacaccaattagccactcattargccaagactttaattctatgatcaattagcactgtttatctgaattaagcttttttgtggtctaacaaaaagtttttttgtggtctatcaaggagacagctgttcaaatggaaggatacatgtggggcaggggggcggtgaagagacctagattctggtcctaactgctttgccttggagagattaattcccccctctaagcctcagtttcctctgaagatgttggaccagataacctctaaggtcctttgaaactgactccttgattccatgactcactgaatatttttctgcaaagataatcccaaccaatgccttctatcctaatctaacaaaaaattgctcttcatcatagaaatacaaagtaatcttcagtgatgtgctctttatactttgctttttaaaccgtccattccagttggtcttaatatattgcacaagtattttataagtgaaatgtgtacagaatcatattctaagattatgtgcaaatatatgtgtagaaagaggcatttaaaaaaagaggcaggagattgagaagagacatattgaatgaggcactaatctttagaaaaatgatcttttactgaatcaagccatgctcattccttgctgaatccaacagccccaaatctcttttcttatatttggctgttaatttttttccttgcaccatcctagattgttaacaaccattgcacagttggctcatgtatccttacactctgagttataataagttgtatttttataaacaaatacctaaatattcaagttttaaggcgcatggaaactgaatctaggcaacgggtgatttgtgtagcttacaacctgaacagcaagatgttccaattcattctaacagatgtgtataagcacaagttatrtcagctgtgtcagatatttaacagatcctacatttattagctatataacagactctacattttcctaagtgcctaagaccaatcctggtagtcacttaagtacaaaagactcactttaactggcttggtctgaaggggtcaatcctttactgcctgtacaagatctgggcagttttgctctgtgtcttgtgatgacccagctgaatgtgaaaagcctatgagttattgagcaaccagaggtccctgcattccaagttgcagtttagctctggggaaactctggctttctctttcctcaagtgtccaccactgcccatcatttgcagaaagacttggccctgcctttagcaacttccctatctccttagagtagacaagaaagaaacagatttgtgcacattttacaaagtgccttcctctatttttttttaaagttttcattttgcaaggaaaaatgtattgattagaaagtaacatttgccttatagggattatatatatatatagatatagatatagatatgtatgaatggagagatgagaagaagccagaaagggcacaacaaaatggtctaagggccaaccagcaatgttcagtgaatgtttacgtattgtttaattgaatcaacacagagctgttgtgaatagtgtgacttactttgcctgataagaaattgaggctggctgtgatttggggataaacctgccaccctgtgatttgagactctccataccaaaacttattgatacatttttgaatgtcattggcttacatgcctaaacctgaagagaacaatgcatgcacattggaactttgtacacaaacagaaaaatataaatgactttgaattaccatcccaagcattgctaacgtagatgtgccattgaygaaagtctcatgtgttcttgagtgaacaaatttccttttcttcctttttggctcaagcacaataatgctgtcactgagacagtgactgagcactcaatgtccaagactaartcacatcaccacgactaagtaggcactatgtcctgggatgagtcttttaaactctggccatcaggttccttacttgttaaataagtaggttggcctaaaaggtttctaagacctctcatgatctaggtaaaatccagggtttcaggtcagtgtccctggtgcagtgcaagaaagccttgctgacacacccttggcctgaagcagtgagcacatgagaytgtgtgacaacrcttcagagaaaaacagagatctgttcctccaactcagattgatttaacatccttgcttctccttttccttcctggctttacatatttgtagggtttttactccttctccagagcctactattttcctaagagttagtagcaaccataggatccacaagaaatgaaattattcatcaacaatractttggcactgcaaaagactgagtcaaaggttaaatcagtcacacagatatccaaggccaagttgaagatcacaagtatatcccatttagagatttgcatacttagagattaagcccatgttcattaattatttagttaattcaaaagccattaataaatccaygcccagcctaygcaacatagtaagacccagtctctacaaaaattttaaaaattagccagccatggtgacacgtacctgtagtcctasacacttgggaagstgaagccagaggattgcttgagcccaggaggtcgaggctgcagtgaaccgtgattgtgtcactgcactccagcctgggtgagagagcaagaccttgtctcaataaataaacccaagttacttcgatgactagatactggaggtctgaaggagaagctttaaaaatacagattgattgcttcagagaaatcctatttataattatgatctgaacttattctatgattagcaaatatatcatctgaaaataaaacaggagttctctccccagacttttgtttttcaggatggtgagttttggtctgggaccctcatggcacccattttgataaaaggaaaaagatagtaaaacaggaaataggaagtttccagagatttgggcatctcaggattccatgaaatgctgagactaacccactaaatccaaattttattggctatggtaaatctaaatctgttcagtgttctgaacagattttatgagtttatgtctaagagtttatgtctaagagaggtacataattcacaaacactatcatgctggcagctgttttgtccacatcaattcccttgatttaatgctctgatttcaatttagaaagtactgagacatgtaaagtctcaaaataggaaaaacctatcctgtttataaggtgtggtcaataaatagaccacagataatcttagtctattaattaactctcagatcatcttagactattaattaacattctgcttgctgctgattaaaaagaaaaaaaccctaaaaccttcagcaactgaagtagtaatataaaaaataacctttaatagttatggtcaaattacgcttcacttggataaacctcaaaatgtagtctgagtttttttgtgcacasttyacaaatcctgggggaaaaatcttttttccacgttatctgaaaaactatatggcgaagataccgctgaaaaataatttgttttatgaaattcctgaaaagctaattttgaattttttaaagtaactacctcccttttgtgtcctaatgtccttccttcaaagctgcttatagtttagaaatgaaagatgtcatgtctcatgctttgactggttttcggtggcatatttgatgtatttgccaagtggcattactgactttacagtaactgttacattattttgtactatattgctttatgtggttcaaaaatagtatatgccatattgaaatatgtaatcctcatgttgtgaaactcatcatgtaatacaaatgaaaatcattacttaataacttacaatttatccatatgtagtttcaatatgattgtgtctatgactgtaaaacaaaactgaaaaaatatgtaatgtatttctgttgaaagcgtgaatgtactaattttttcctaatctttgtctagaagaaagattctatgtcattcattgtacagctgctctggggtgttacacatttaaagtacaatccaacagttgtttgaaagtcagcctctcggctttgtttcatgtgactgctgacacttctcaagtgttctttgcataatgaggctggattttgtgcttcatcgttcattttaaacaattgaaaagtctcatgtggaaaccaaagcaatctagaaccagcctgttgggtgactgtgtcttctgtaaagccatattgaagtgaagttatacataatagcataaggttccacattttcaaagctaccactacctctgcttttcctctttccctagaaaatgccaagcaaaattccccaacactaagtgagaaattagaagtaattgttttataattaagttgctgggttttttttttaacaccttctaattcatcactttgtagggttatrcaagagtttctgaataaccattcttacatgtttatattttataaaaaccggctgcaagaaagattcagaaagaatacttagtaagtcatcatatgaaaaaccaacaaaaccatagagtgcagattttttcctaactataagtcacctcatagttgtccaaagccatgataatgatatctcttacaaattgacttctgtaacccccctagaaataacccttttccttatttgattttagtcatcaaacatagtatgatatgggaaaagtcagccatttaccagaaattatcttattttgattttaaaaactcatttctatatgtagttattgtaatgtctatttttttagacttaaagatttatagaagactatagttatctgatttgttattttgcatttttcattctgtaaatctttgcttatggcacattgtgctctctgttttccatggttttattcatttatctcctcctattttgaggggacaacatgggtagttaaatctttgtcaatagtattggagataacactaactgctattatcataacatcttcatttttactgcatgccaaaaccaatgcctgccaaacaaaatcttagacatcccaatataatatgttagttatatttctattcacatcattattgaaaatacccagctcagtgcctggcttaataaatgtttaattcccttacctactcttgctctatttttttatttgaaatggagatgagcaaaataacacattcatggctgaagcaattttttggacatttcttgttaccaaaagatctataatcaggacattgtttatgtaagttggacaaaaaaaattcttcccctttatgtccacccttcctatgattgcaagacaaaatttccctcctttacctcatccctataacatgggaggctgagaaaaatgaggggagatggaaccagatacaaggagatccaataagagaagcttatttaaatattgtgaaataaaggaagaaccaaagcatttttttaagtggggaatccttttgaacagttattatttatccatattattaacaacatcttttctgacaaaatccatcagatgaagtgtaaatggataatcttttaatggatctaaacctagaaagtttcacttactgttcatgtccgtgttccagaattgtgaaatggtgtgtggttttgctttccaagttcttctctgcctcctcttaattctctaattccatgtcttacagaagaatgagaaatttctttcttacttgagtatcatgctctaaaaaacttggcttcagtcacagaaacgctggctctcctgtgcttatattgaagccaactgcctttaattcttgggccctcttatatttttaaggtgcaaaatttgaagtctcagtcaccagacacaggttctatacaattaatgatgagctggagaagtaatatgtagctaatttttcaaaagcattgaatatactttccggaaagaaaacagaaattaaatattgccacatcttgccagaatcccatctgacaccttaactttgtcaggtttcctacaacttgctaatcaagttttatacattctaaatctccccagtttctttggggctggaagatgcaacttccatttaatagaaactttgaaatcttggggtaagggagcagtggggggactagggagaaggataagaaatagaattattgaaaagcccccaccagggaccttcctggccagaatatgcagagtaattcctgctggcttcacctttgaaagtccctcgaaactatgcagatgaaactgagtctgtttttgatattgtcagatgtattctaccttggaagtcccaacacctaaactggaattcttgtatttacatctcctccactgtcccccacaccacccctcaattcctgctgcccctgctaatgttaagcatttttctcttgttatcatcaggttcacattaaaaacagatacttacaaactgacttgaagcacagatacttttacgaatgtgataaaatattttcttaagaaaaggaaagaggatgtgggtcaaataaaacaccgcatggatgttgattggtgaatactggtgtaagaaaagggagctcaggaatttttattactgtatttgtaaatgagtttgaaggaatttgtaaatgccactggtacatttttaaggtgacacatttgctccttataaagttattaaaaattacagggtaagcttaaatgacgtttgccagtagttttactttatataatcaatattgatattgttgctgaactatgtaactttatgatgcatttttcagtcccttttcagagcaaatgcttttgcaatggtagtaatgtttagtttaaattgacttaataaattattacctgagcaatggtttttggagggtctttatatatgtatgtgaaacatgcattacatgaaaaatttaacttgaaacaagttttttttctttgccacaacaaaatttattagaatagatttttttaaagaaggagggggaactgcattttaactccggaaataaagtatgcagacatatgcgaaaacatttatcttaggacactcacccatggcatttttttcaggcagaaatttttgtgctcatctttgaacacctctgagtttattttcctactaattctaaatcaaaactgaacacacatttccccagtctttattcatctgccagactcgagccttaaaaatgcaagcatgcttggaagcacccagaagtttcttggaacttctcctgggaacaacaaagaacaatcaaaaggagagtttccaaacctgagattcgatcaactttcccatgtttccaaacctgagatatgatcaactttcatttaacaagccacaaatctcaggaccaaagtttcacattttcttttgttcgtgttttcctgactggaattattcagtctttacttaaaaccagctgtgagttcatcatcyatttgtgatcttttatttattgcataaaatatttcacaaatacttgaacatatatagaaaaacataacaaaggctcatttacccacatccaaatctttaaatattcatattttgccttgtctgttcctttctttaacaaagattcatttaatatcacagatgctgtatttacatccctcaacaaccaaattctctacctctctcttcagcagtaactacaatcctaaagttattacatatccttcccagctatttttaaaatgcattcacctcatatttatctatccctaaataatatgaccaattactttggtatttatgagttttgcataaaaaatagcagatatctttatgcactttgattttctttcattcggcattgggtttttgagatacaaatagctccagctgcttagttttatacatctatacaatctattaaactccctattcatcaacatttaattttcactgctttatgcatacaactgctgtggttgtatacacatatacagtttattaatctccctatttatcaacatctaattttcactgctttatgcatatagctgctgtaattgtayatatacatataatttattaatctccctatttatcagcatttaattttcattgccataaatgacaaaagttgtgtgtataccactgctataattttacacatatatactatttattaatccccctatttagcaacatttgattttcactgccataaatgactatgcaatgagcattcctatgccagtctcactggaatatgtgcaaaagtttctccaaaatatacacctagaggtggaattgttgggtcatgtaaaatgcatatcttaatatttcctagatgctgacaaattgcttcctctccaaarcagttttactgatgtgtacccttgccatcagtgtagtatttccatttctcgtcatctttatcactacctgatgcagtcagatattttaatgtttgacaattcaatgagcataaaatgatgcattgttattttactttttatttccctgatgaatccatttgtatctgagtaactcatccttttcctgcttatcttttatgccatctttgtcatcttctgagtgtctacatatgcccaaatgttagtccaggcttttctggcccatttttctgtgtatctattcctgtcctggtgctccactgttttattaccatattttatacaaagtcttgttatctggtatattaattctcacaccaccatacccttcttcaaaattgttgtggccattcttggccatttactcatcatatgaattttcagatgagcctatcgggtctcctaaaaaattgtgttgggagctagattgaatttatgttttaatgccagaagttacatctttataatattgtgcctcctaatcttgaacatggtatatcatttcctttacattgggcttcaataaaactttacattattctttataaatgtttgcatatgttttattagattcatccctaggtaccctctcattacaacctccacctcccgtgtttaagtgattctcctgcctcagcctcccgagtagctaggattacaggcccacaccaccacacccagctaattttggcatttttagtagagacgaggttttgccatgttgtgcaggttggtctcaaattcctgacctcaggtgatccgccggcctcggcctcccaaagtgctgagattacaggcgtgagccaccatgcccagtcccactgatgttttaatactgatcttgcattctgtaaccttactgaactctaattaacattcttataatttgtaggttttcttggattttcaatttttacaacggtatcaccacaagctaacaacactgtttcttcttttccagtctttatacctcttatgtctctttcttgatctattttattgggcttccaggacagtgttaaatagaaacgtgttatgggcatcctttcttcttcctgactttagtgagaatgctatgaaaagttcactattacatataaggcatcatgtaggtgttgtagaggggaaaggaaagctgccattttgccctccgagggttcactaaaagtcactgacaraagttgaattaataggagaaaaggcatacaaatttatttgattatagttttatgtgacatgggagccttcagaatgaagacccaaagatacagaggaaactgtccatttttatgcttagtttcaacaaagtacggacagccttgtaggaaaatgattggacctaatgccgacagactgagtgagaaaacctagcaaggcctgtctgtctagatttttcttagcctctctgtgtaggaatgcctctcaccattccttccttctgggtatggggcaggaccctctctggaaagggggtcttatgacctacagtcaaacaagataggtcaggttatctacagtcrgtttttacacagaaagtctggtgtaaagttatagtaatatttttagactgtaaagctgactttggggcaagagggttccagtttccatgacctgccttggggaagtgagattccagtttctatggccaggctctggagagaatgagggaccagacaggagggcagcaggtcaaagagaactgctgctgggcccctacaatttttcagatacccttagttatgtgaaagatatgcctttatatttctagtttgctaacaattttttatcttaactgattttaaaacttctcaaatttttttctacatcyattgatatgttcacatggcttttctctgttaattaatgtgtaacttattacagaaaattattttagagagtatattttaaggttaaagtacccttgcattcttgagatgaacctcacttatacatgaagtatttttgcaaacattattaggttcaatttgctaaacttttatttaggatttttgcattaatgaggttcatcttttttgctgcttaagatatcgtttttggaggtgatttataagtaagttaaaatcttctaggattaagtaagtttctatttattataattctatcagtttttgctttatatattttgaagctgtattattgggcgtatatagatttaaatgttcaatcctccaaataaattattcttttcattgttacatacaatcccctttatttataatggtcacgtttgtcttaaaacctattttttctgatactgatattgctaatttggattttcctgggagtggtaattctctggtaagtttcttttcattcctttacttcctaattgttctgtgtcattatgttttaggtgtgtcttttaaaaacagcataagctagattttgttttcttctggttgagaatattttccttttggtggctaaacagttctctccttctcatttgatgcacccttccttcatttttcttttgcaatttgaattatttaaatcagccaattctgtaataatcactatagtaacaggatataattaaaggtccttgtaattaaagatccttgtgagataattcactgtaactgagagccctaagcttgggaatagctcttcccccatacaggaacaatcccagtcatagtgaaccaractctaaggattctcatctcactgtgattgaaaacaataattaagccttgattgtaaagttcaagagaatgaacaactagaaaatcccaactgctgagagaagggcctatgctcaaaaagattttgccatacattttaccaaaaagagattgagttgtattttcaggatctcccatttaaacacaaatcttccccacataaattatctgtcaatcattctaccacatacattattgaataatacttgaacactgtatgccaggcactgtgccaggtatgcagttagcagtacggatgtgctctccagcctcttggggattacagtctagtgggaaggctaaggtaatccatgtgtccctagctttctccagaatgttacttcctaaaacacggtaagtccaataattccgatgagacatgttcaaagagtcctaataaataaacaaaaggactttgaccttgcattatttttcaagaaaatcagttttccatgaaattctaagggttacagtatctgagccgcatctttaagcagttattctcttcttacacatctgctaatctctgcacctcagtctgaacactctgcacacagcattcttcataatccattaactgtgaaatggaacacctgtaatatgaagtttcatgtaaattgtataaatttatctgaaatccttccaaaacaattttcctttccttcaatttcacaactcctaaattagttaagagagggaaagaattactttggaaaagctgttaattatcttcagagccttactggactctattattgacagaggcctggggcagagcaaagttcagttacactcaggacttaactgataaatcactggtgaacctgtgtgcaaaaatcctccccgataattactaacatgacaacagaatttccaagtttccccatttgtgaagtatttttttcaaggagaaatttctatattttcctacttgatgaaaggcttctcccctgctatttaccatttgtgcaaactgagatagttcttcatcttctctagtcttatgtaaaatggagaatattatacctgatctgctcaaaggagagagaagagagactcagcaggtgtcacttataastcagaaataatatctgtttaattggagttttatctgtgaaggtagggtaggatcttggattgatattccaaatgactcctaggctgagaatgaagttctagaggcagtctaagtttcctcttcatcccagttttcagattttgtggacatcacgtaattcctcagagttcaaaagaacaaacatcttagaatatagttttgtccggccgggcgcagtggctcatgcctgtaatcccagcactttgggaggccaaggcgggcggatcacctgaggtcaggagttcgagaccagcctcaacatggagaaaccccgtctctattaaaaatacaaaattagctgggcatggagtagctgtaatcccagctacttgggaggctgaggcaggagaattgcttgaacctgggaggcggaggttgcggtgagccaagatcatgccattgcactccagcctgggcaacaagtgcgaaactctgtctcaaaaaaaaaaaaaaaaaaaaagaatgtagtttcgtgcaatgttagtttagttgaattataaattgatgtcatcttactgagatgcatttaaaatgtacacacattttgacctaggaatccttcttcaaggaacttatctgaagaaaaaaataattagtcaagtacagaaaattctctgtcctaggatgctagagaaaatacagctatccatcaaaaggaacttattaaacaaaaaatatgaagactttcagtttctgaaacagcatgtgtatacacagatagacacatgtagagaaagatttctgaaaggaaatttactgaaatataatggtcaggtttgttgtgatctttttctttcttctttatgcaattctaggcttgagtttgtttaacagaagtacatattatgttatggtaatccgaataatttattttctttttaaataaaagaggtataacctcccactttccctctagaagttattcagaatgtactgtttttcttccccactccaggtgaccccttgatgttgggtgcctctcattacaaaaatctcaaatcttacagaccaagaaaaatctcaagtcaaggaagacttgcggtgttcacaaaggcaacattgaccacagtccagtagagctgaagagcatataccagaattcaggaactcaacattttctcccctctgtccaaccacaggacagactgtgcaccccagggagatgctgtgtgtccactggcctcactgacttggattactcctgcagcacgtgaccagccagctcatatgatcactccctactgcccccaaagcagaattgactgggagctggaaacccacacaaaaagggacaattatattgaatgtaacatactccctctgcttacctagtgccttcacctcctatgggcatttggagtaaaaggttgttatgcaggtgtttgtgaaggatgtggccaagtcagttgtctcccttacagggtgacccaagattaatgatatctacccatccccagtccctcgaccccctagttgcaatcagctttgtcactgtcccccttaggcactgccatgtaaagcacgtggtcccccattctgaagcagtgggaaacctagaagagatgtactcttcgcaacctggttggatcttaaaaacatggttctaactgaaaagaaaaaagacatattacacatatttacataaattaaaactgcattcaccctaaacaatacacattttacaagaatgcgttccaacaaaaggatatatataagcatgctaaatacttgcttatggggattgaaggtaaggggaggctggagtgggataaataggaatttaagaaataatgaaaataaggcacactaactccttagctctcaaccttttgccttcctcagacacataagatgatccacagctgtccagaaccttacctagctatttggtactctcagcttttctttggaatggctccttccccattgttttctcctctctttctctaagacccccaaaaccaatttatttgttcattcacttcatgcatatcttcctttttcctctcttagtcacatacctcgtttcacaatctccgaccccttcaaccatgtcctgatccttctcccacacccagcaccaccctcctgcagagaaaagtgtacccggatgaaactccgatggaatattaaactaacagaacttgtcagatgacctttgctttatctgcctgctttctttcctcttcccttctgttctcttcttttcctttcttttctctcctcttctctctctccttcctattttcattctatctcttttcctcactctctttttctcccccttgaaggcactgttactagaaatagagagctctggggcttgcctgaagccatgggcagtcaccactccaggattccccttttagcgcctcctccccatcttaatctcaaagtccagcaggatagtgagcagttagagcccggcctccaatctgcttccatgggggttggctttctgagtgggagaaatgactctaatctggagacatttgctgagacccttgtgcctggtcacttccgctcccaggatccttgagatgcatcctttcctgagccgtaagtggaaaccagggggacgtgggtcagtagaggatcagcgagagggtaagacttgagctccgaaggctgctgcctgggattctggaatgttagacctgggtgaggtcttagagatgaggcatgtttttgacacacaggttctcaccctgagtcaatgcccattttcatagccaatattttgtaatgctcctttttgttttgaaatgaaattcgtggataatgaaacccgactatacacaatttcaacatgacatgctatctcagcttcaatatttttaaaaaccaaaggaaagcaatcaaaatagagtgtgacttcaatttacagatgcccaaggatgatttctattttttcttttttgagacagggtctccctctgtcacctaggttggagtacagtggtgtgatcatggttcactgcagccttgacctccaaggctcaaataattctcccacctcagcctcctgagtagctggaactataggcacatgccaccatgcctagctatttttcttttttaacttttgtagacatggggttttactatgttgctcaagttggtctcgaactcccgggctcaagcaatcctctcacttcagtctttcaaagtgctcggattgcaggcctaagccattgcaccaggctaggatgactattttaaaagatgtaaagcatctgcatgaattttcatcatgcctctaggaagtgagaccacgctctcaattgccaacaagtgctgtgattcacccagagtcatccaagccagggcttgaccccaggccctccccatctactcagactctcctctctgcagcaagaacagaaaatatgaggagatgtggggtaaccagacattggtggctttatgagtaatatcctatatgcttgtgattttcacatggatcttgtttcacgagagcctcacctcctcctcagcaaattccctcatgcaaacatgagattaagcaactgtctgtacatttatgtgcctgtgcttcacgggccgtaaacaggtacaggggaccattttacattccccattgtgaccaactttgccttcattttctcctcatatttccctttcaccctccttccttcctctcctcttcgctttcttacccctgaaaattgcagttttttgaaacttgacacatgcatgatgatttaaatgcattatctccttttatcttcaaccaaacttgttagtgagtactattatctcattccacaaatgaggagacaagagaataaggaatatctaagaaatgtggtcaaaggcagaaacatgtatgtgataacttgggattcaaagccaggtctatctgactccgaactcgaagagattctaccaggccctgtctatcctcccctagtcttccaatcctgtttggactgctcttttcccttggtcatgagtttcttttgccagaacatcacctaactccaacattttctcagaagcaggtaaaattataaccagtcttatgctcagtgaggaggaaattatgctgaaagtaccagctgttgacctagcaagagaaatgccctagactgccccctccccttccctaccccaacctctgaacattgtggagttgcacagtggagcagcaggtaacctagagagggcaggtgaggcctagtacctagagatcttgagcaactcgttggcgacgccttaccataggcccagcaaggacactacagggaagcagtcttggaaaaccacaccactggccgggtgcggtggctcacacctctaatcccagcactttgtgaggctgaggcgggcggatcacgaggtcaggagatcgagaccatcctggctaacacggggaaaccctgtctgtactaaaagtacaaaaaattagtcgggcatggtggcgaacgcctgtagttccagctactcaggaggctgaggcaggagaatggcttgaacccgggagtcggagcttgcagtgagcggagattgcgccactgcactccagcctgggcgacagagtgagactccttctcaaaaaaaaaaaaaaaaaaaaagaaaaaagaaaaagaaaaaaaccacactacctagactgaatgccatcctcatcacctggccttgcaaaaacctttgggacttttatgtctactttcttacctactctacctaggtctgtgcctgcttgtgcttgctcatccaaacacacactcactaacatacatttattgagcacctgccatgtgcaatatatacattcaggcaaaatatttgagcatctattatgcaccagtgctgcagacttagccacaataagcaagaaaaagctcctgccctctattccaggaaggagatagacataaatgaataagtaaatatgtaaaaatatatatgtgtgtgaatatgtatgtatttatgtatgtatccaatagagaaacatgccatgaataaaaccaaatctggaaagggaatagaaaaatataatgggggtgaggggaggggctgtgatagggaggtcaccacgttttaagtgttgttttatatgcaaaaataaataagtcacaattcttgtatagtatctacatagttactgtacaatattcatatgcataaaatgttcagctttgtttacactttgatatgcacaatcactttgggctaactgtgtatacaaagttatggaagcaatttgttttcagtacaaaagtgtggagaaatatctcagtggggcattctttcctacaattagctaatgactgaaatatataacatttgcaggtggctggggtatgtgctcccatgtaccaatttcctaatatatgcctgctctcccacaaaggaaggagggcacaaaaagtcatctatttccagctgagatgtttctccattcctgccaagcctattttaagaaaacatttaaaatttgccctaaaggggggcctcccatctacacccctccaggcagccttgccacagtcagaactgatttaacacatgccaagggccaggaagggtgatcacagagaatgcctactcccgaacgtgcggaagaagacccacccacctcagaatcaggaatcgaggagtgctcttgcttgtggacagccacaactgcccctgtgtggcttcagcaaaagggcatatactggaaggttatgaaggaatggagggaaggagggagggcagctgaaataatcaacaggaggctgaggaggtggacaggaccccacacgcaaagaagccaaggaaggccaggcaggagtagagtaacttctggtaggaaccgcctcttagcagctttgcttagcggatgcaggcacctggcattcactgccatcatccttgcacccagagcacgcatgggacagaggggacctccacagagaaggctgtgagagatcatgtccggagcggatgataccgaacagcaatggtgagggtcctcagcagcgtgctgcagactgcggccccatgtgtgaagagaaaacgaccactctggagtctccaagctggcagctccagcacagagaagcagaggagaaaaatttctctaccgaccagacactgtccctcaggcgtccaaaccccaacacagcttcagcaggcctccatgggaggcagtgtctcaaacgtcaatatcagtgagggacttcaaaactgccaaggcctcgaattccatctgtcactgatgtcctctaaggtggatggaggatgaaatcttcctttcctaactcgttggcaatcccaagtatcaaatgagattgcaaatgtgacaaggtttttttcaagttacctaagatgctatacagaaatgagatacaattggcattttgggccaggcttagtggttcacgcctgtaatcacaacacttccagaggccaaggcagacagatggcttgatctcacaagtttgagatcagcctgggcaatctggagaaacccgatctctactaaaaatacaaaacactagccgggtgtggtggcatgcccctatggtcccagctactaaggaggctgagatagaaggatcgcttgagcctgagaggtagaggttgcaatgagcagagattccaccactgcactccatgtaagaccccatgtctattaaaagtaggaaaagaaaaatagctgggcatggtggctggtgcctatggttccagctactcaagaggctgaggtgggagaattgtttgagcctgggaggccgaggctacagtaagccatgctcacaccactgtactccagcctgggtgacagaaggagatcctgtctcaaaaaagaaaaaaagaaagaaatcatccctgggcatctgtaaattaaagccataatttattttgaaagcttttctttgatttttaaaattattgcagctgagatagcatgtcattattttcacacattatatgagcattgggcaacagagccagacctgtctcagtaataataataattagcattttaataaatcacactgtgtccactgcatattttcaaatattttagaatctttttttcattttaaagggtgaggaag

SEQ ID NO: 98025 - DNA, 13030 bp, Homo sapiens
gcttggctgtgagaagcattgggaaagatcattaaagatggctttagagtcgccagcctgggtgacagggtgaatgtgagaggagtacatcagtctcatcagaggaggaattattttagacacctggagcttagagtgctgtcagaacagacaagtgaagcagtctcaaggcagccaaaaatgtgcaactgagacttagtcagtgcagacttgggatttccatttgaatgatctagcacagggcagacttggggtaattgaggtgatatgacctctgagacattgtagagactgaagccatcctgagtcaggggagaccactgaagggacctgccctcacaagggattttggttttcttaggtcaccatgagaagggaccacaaactggcagctgaaacaacagaaattgatgtcctgacagttctggaggctgaagtccgagatcaaggtgtaggcagattaagaaaaatgattaagatcctgtgtgctttgtcttaggattttctgattatttttttctctttcaaaagactgcaaattggagaagtttcagaagcttttccattccgtgaggatcttttattttcttttatctgtccccaagagcctctttttttcttcttcccattatttctgaccagataggctctctgtgcctgttttttgttgggaaagaaacctctaccacaagttgcagtttcatgttcccggggagcatttcagtggtaactcagtcattataggggtgttgtctaagaacttgcctagctgcaatggtcctgctgattctgttatctctttaaacaatgcggtagacgttagaatgggctgatgatttattttcccattctggcaagttttacaagtgcttctttcataataggagagtcttttttaaacgggggtaatttagatttgtttgttcttggaaggagggtggggtatgaggaatgccataatcttacattatggtattaatcattctttgttcagtttgttcttttacaggtttaatcttgcattcagttttgatagagaacataaagcatttttttaacctaatgatgtctcaagtagcggtggtacttgagatggctcattttgtacattacttcatggaaaatagattcttggcacccccaacaactagtgtgagctggcaagccacagatccttggaggttcagctgcttcctctgttaaaagcagatactgacacatagtgagtacatcaggcaaatgagctttatttggggaatgttgaatttagggtcctgttagaacatacaaataaatttgtccttatagcactgttttgagattatataagtacctggcataattaagtaatggcaatcactataattatcattattaattcaaggtacctttttctttttcctgatggataacccttacattcttacaaatactaaattaatgaataagaaaaaatgtgcatataattttgctttgaaatttcaaataaggaaaaataaatctaaaaaataaatattttctatattcctttgactctgaagaaccgcccaaaagaaccctctaataagtatgcatctaatattttctataagcaagttttttgggaacctttgttcctgatatgttattataattcctcagatacaagcaatagtgaaaccactttactctttaatcatcatatgaaggttttagtaattatagaaaatgacacttaagaaaaaaattcaaaacaaatttcataagatatctaagcaatgatggttcatgttttgattttccaccattccatcacattctcaattcaaatttgtaagtaattattaattacctaagtctgcgactcacggtgctagaatgttgtagaatataccaaccagtacaaaatgggcttcttgccatcactgagcttccaaaccagctggagagaaaagacttaatgatgaggagaagaagggctataaatggaatgaatgtcttaagggcttaccatgtgtcaggcatgtagataataagaactgatcacaggctatcccatggaaacctcaccacgtctctgagaggtacccccattgatgttcagagaagttaattaccagcaccaaatcacaagtctgtctgtcctgctccaaaagcaaatgcattttctatattatagaaaataatatagaaaatattaattgcaaagttaatcattcacattgtatcttgtcamttccgtgtcatggagcacaagtrtgtgtattgagtcaaaggtgatctgaagaaggcacacgtccatgtataagtgtgccgaagtagctgagatatgtacatgacgtggagacagtgtgacttttagagataaacattttaatgacaacaaaacctgcatcctgaaaagcaaggtgaaaatcacagtgaaaaatggttaagatcctgtatgctttgccttaggattttctgatttttttctttcaaaagactacaaactggagaagtttcagaagtgtttccattccatgaagatcttttattttattttatctgccccaagagcctctttttttcttcttcctattatttctgaccagatatgctctctgtgcattattttttattagaaaatgcattttacttttacccatcaggaaaagaaagttaaatagtaaccaataatataatataaaaagtagtcaagataactacagaagagttgtcataagacattagcaatgaaaagtatgtgttgtaggagatcagaggagggaagaatcactagattaggatgattgaggaaattcctgtgaaagagaatccatcactatatttcatatacatatagatggtacagtataccataaattctctattatccagttcaggccatcctgggacaccctgaaaatagtcaatcagtcctttatttcaatctcaagcattttgtcccaagccatgcagaatctgaagggcattggagatttagtgagagtttttctcacctagtctactctttctcttgattgtccccagtgccctgttcttagttatagagccttctggggcatcacctgccatccctttgccttgggcagagaacattccccagaaactctgctcttccttccctccctctaagatccttaaatctttttgcaaccttttaactccctcacctcacagccctgcctcctacatgtatggccctagcaggagctgtggtctccgccaggtctgaatcctcatgggtcgggatgaggacggaagcctcaagagtgcagcatcagaagatactcctacttcacgtgtgggcacacaaatctttagtcacttctccctgtgctgagttgtgctgaagtgtgtccttttccttgctagctttgaatcaaatcacaaaaggtgacagtggagcaagtgcagaggaaaactgagtgttctcatcaataaaataccctttcgtctgatgggggcaaatatccggcattctgcccgtatgaaaatacaggtctttggagacaaacaatcctactttttaaattctctcgcattttgaagttccactctttccaatgtatttgctaaccatgcattctttaaaaatgagaatctatatgaaaaagaactagatcttgtctttaaaaagtgaccttagggcataagtccaagagatctattgaacaagatggtgactatagttaataaagatgcattgtatacttgaaaattgctacaagagtagaattttaagtattctcaccgcaaataaatggcaaatctataaggtaatagatatgttaattagcttgatatatgtatatgaatatatgatacgtgtatgcatgtttcaaaacatcatgttgtataccacaaatatatacaatatttatttttcaattcaaaaaataaataaatttgtaaaaagcgacctgcaaaaatggtcagtaataagcatatggacaaactatcgggaccctagagagagaacagtgcagtgaaaattgctgagcgttttggtttttttcctttccggaaaggagtaggaaagctatgtggcagaaacacctgtacatctaagcaaagctctggtattcagctaggaattaggagatgcccttccttttgcaaacacatttaaatcacattgaacaaaattactatgggtaaagatgaatatcccacttcattttggacacaaattattataatgccgtaagcactttctgctcctgctcatcaagtgcagctgcaaagtctggtgtctctcctgtggcagagccgtcttcctctatgctccagtttggaactgggctgctcctcccaggtcctgccgcctccacccagccaagactcacttgaggccgtaggttctgcctccagataggccgcgatgcctgagatcagacccctgcagcctctcctcttctccttcctcaccatctctatctcccattatcttttttgttttttactttttactttttttgtttatttatttatttattttttgagatgaagtctcgctttgtcactcaggctggagcgcaatggcactatcttggcttactgtaacaaccacctcccacgtaaaagcaattctcctgtctcaacctcccaagtagctgggattacaggtgcctgccaccacgcctggctaatttttgtatttttagtagagatggagtttcaccatgttggccaggctggtctcgaactcctgacctcaagtgatccacctgcctcggcttcccaaagtgctgggattacaggcgtgagccaccgcgcccagctatatttttacttttaattgacaaataataattgtgtgtatttgtggggtacagtgtgatgttttgatctatgtatacatcatagaaggattcagtcaagctaattaacatacctgtcatctcccaatttatcattttttgtggtaagaacattaaaaatgtattttagcaatattgaaataaacattatgcttaactgtggttaccatgcaggataacagttgcagtgtaatagtccaactgaaactttgtacacttttaccaacatcttttctttccctatctcttcgtctcctctctagcctcacctcagataaccaaatttctactttttctttctaagagatacgcttttcaaaaatccacgtgagttaatacagtacagtcatgtgtcacttaatcatgggagtacattctgagaaatgcatcattaggcgaaaacactgagtgaacattatagagtgcaaccctagatggtacagcctaccccacaactagactatatggtatagcacattgctactaggctgcaaacctgtacacatggtactgtgctgaagactgtaggcaggtgtaacaccacggtaaatatttgtgcatctaaacatagaaaaaaaatggtaaaaatagggctctatagtcttatgggactgccactgtacatgcaatgcagtctgtggttgaccgaaacattattatgtggtgcatgaccatagtggtttttctgtgcgtggcttatttcatttagcataatgtcatccaagttcatccatgttgtgcaaatgacagcattttcttctttttatggctttgtagtgttccattgtttatatataccacattttatttattcatttatctgttgatggacagataggtatgtctttattactcaatgtggtcatttcaccagagaggtggatttacctacgtacactttccacgtactcttcatttaattcttcctctaaaacctcactaatactgttccccctcctctgcctctgtccatcaagatctgtcctatacaacatagtaaattccaagtggaagaagttaagtgtgcaacgtcaacccataaaaaaactagggggaaaattgaatcgccttcgaaagttctagagtgggaagagctttggaacaatagaagaaaccataaaagtaagaatcaggctctctgctcctcccatttgacagacagctacatattcttatgcagaaccagccatgtccctgagacaccatggtgaaggtgaaggccagagtaaacgaacttggtcgtgttgggcacctggtcaccggaactgcttttcactctggtaaagtggatattgtcaccatcggttacccgttcattgacctcaacgacatggtctgcatgtcccagtatgattccacccatggctaattccacagcactgtcaagactgagaatgggaagcttgtcatcaatggaaactgcatcactcatcatccaaggcgagatcccacgaaaattaaatgagatgatgctggcactgagtacgttgtggagtccactggtgtcttcatgaccatggagaaggctgaggctcacttgcagggggtaccaaaagggtcatcacctctgccccctctgctgatgggcatgaacgatgagaagtatgaaaacagcctcaagatcatcggcaacgcctcctgtgccaccaagggctttgccccccaccagccaaggtcatccatgacaactttggaatcgtggaaggactcatggccatggtccacgccattactgccacccagaaaactgtggatggcccctccaagaaactggcatgacagccacggggctctccagaacatcatccctgcatctactggtgctaccaaggctgtaggcaaagtcatcctggagctgaatagaaagcttactggcatggccttccttgtctccaccaccaacgtgttggtcatggacctgacctgccagatatgatgacatcaggaaggtggtgaagcaggcatcagaggggacccttgagggcatcctgggctacactgagcaccaggttgtcgcctctgactttaacagcatcacccactcttccaccttcaaagctggggtgggcattgccctcaacaaccactttgtcaagcttatttcctggtatgagaatgaatttggctacagcaacagggtagtagaccttatggtccacatggcctccaaaggcagcagctagctggacaccagccccagcgagagcacaagaggaagagagagggggagtccctgccgcactcagtcctccacaacactgagactctcccctcctcacagtttccatgcagaccccctgaagagggtgagacctaggggagccctacctcattgtgtacatcaataaagtcccctgtactcagcaaaaaaaaaaaaaaaaaaaaaaacacagaataaacataattcattaactgacatttcagcattttagtacagtttaaaaataataaggccgggcaaagtgactcacacctgtaatcccagcactttgagaggccaaggcaggcagatcactggagctcaggagttcgataccagcctgggcaacatgggaaaaccccgtctctactaaaaatacaaaaattagctgggagtggtggcacatgcctgtggtcccagctacttgggagcctgaggcagaattgcttgagcctgggaggcagaggttgcagtgagccgagatggcaccactgcactctagcctgggcgacagagtgagactctgtcttaaaaatgaataaaaataaataaataaaatgagaagaatcaatcaaagctattaacaaatcagcagaaattctgtcaagacaattttttaaagagattgtatagctactaaagaatcgtattgaaacctgttaacaatttaaccttacctgtaatctaagagaaatgcaaatctaaatcatgagatatattttttctattaaattaacagatttaaaaaatgatatgacctaatctttgatgagggcatgatgagaatagtacctttataacttgctgataacgttataatttaatacagagtttttgaaaatcaatttgtcttgtatattaaatgctaaaaatagattcatgcctttaactccatgatttcattacaggacattctcctaagaaaataatgtaaaaagtcataaatacaaagttataagtacaaataatttaacctcaaattattttccaaatcaaaaagaaatgaacagagtaattttctcttgacataggtatagatttaaaaattacaaagactgcccagtaacatgaagaaaattaatactatataaaaatatgcagggaacagagaacaccagaagaaaacatagcagtggtaagctagggtgctgagaattatgggtgatgtttatttcattttttctattctctatattttccttaatgcatttgttattatggtaatatgtataacataaaattcacccttttaaccactttttttttgagacggagttttgctcttgttgcccaggctggagtgcagtgcaacctctgcctcccgggttcaagcgattctccttcctcagcctcccaaagagctgggattacaggcatgcaccaccacacctggcyaattattattattattattattattattattattattattattgtatttttagtagagacgggtttctccatgttggtcaggctggtctcaaactcccgaccttaggtgatccaaccacctcagcctctcaaagtgctgggattacaggcatgagccactgccctcggccttaaccactttttaagtgtacagtttagtggcattaagtatttcacattgttgtacaaccgtcaccaccatccatctccagaacctgttcgtcttcccaagtggaaactctgcaccccttaaacactgacttcccattccctctcccccaggccatggtaaccactattctactttctgactctatgaatttgatttctctaggtacctcatgtaaattaaattatacaatatttgtgtttttgtgactggcttatttcactttgcacaatgtctttgaggttcatccatgtcgtaggatgtgtcagaatttcctggctttttaaggctaaataatattctattctatatgtacatcacattttgtatccattcattcttcttagggcacttgggttgcttcactttttggctactgtaaataatgctgccatgagcatgggtgtaccaatatctgtttgagtccctagtttctattttttgcagtatatacccatagtgggattgctggatcatacggtaattctgtgtttaatttttttaacaaccaccaagccattttccacagtgagtgcgttcaagggttccaatttctccacatctttgccaacactcactttctgtttctttcaataataaccatcctaacaggtgtgaagcggtatctcactgtggttttgatttgcgttgccctaatgattagtgatgttgaacatcttttcatgtattgatgggccacttgcatatcctgtttggagaaaggtccattcaatttccttgcccatttttgatggggatgtttgttttgttagtgagttgtatgaagtgtttgttttgcatatgtatttatatatataatttttatttttaattgtaattaaaaaacacataaaagtaaccatccttactttctttgagtgtacagttcaatagtgttaagtaccttcacattgtggtgcaacagatctccagaaatcttcatcttgcaaaactgaaactctgtacccattaaataacaactccccatttatttccccttgcccagcccctggcaatcaccattccactttctgtgtctacgaatttgactactttagttacctcatataagtagaatcatacaggatttgcctttttgagactgattaatttttatttttattttttttttatgtcctcaaggtttatccatgttgtactatatgacaggatttcctacctatgtaagactgaataatattccatgctatgtattgcttttatattttttatttataaattgtaaaatactactcatcggtgtgagtcttatactgtcctcttccctgtttcaatcacctaaaacctcctttttatgttaggtcttttgacattgaatgttttcaatgtcatactcccatttacctgattaataataagttctttatgtttcacttttaaccaaagcaggaacaccagggcaattagtccagtaaagaagaaaagcaaacagtggccatgctgagagtgaagcaaacccatgatatattcatggaaaagctggactttttctctcctcagaaagtgagatctttttgtgtgaagaactattgaaatctgaagcttcccttaggaagttaaaagttcttttgaaaatatttaaaagccctgaattaaaagatcttaatacagtcacacatgcaatacaactacatttaggtcacggatgaattgcctgtaggacggtggtcccataagattataataatgtgttttcgagatcaggagattgagactatcctggccaacatggtgaaacccagtctctactaaaatacaaaaaaattagccaggtgtcgtggtgggcacctgtgatcccagctactcgggaggctgaggcaggggactcacttgaacccaggaggcggaggttgcagtgagccgagattgcgccactgcactccagcctggcgagggagtgagactccttctcaaaaaaaaaaaaaataaaaagtgtctttactgtgccttttctatgtttagataggttagatacacaaatacttcccacggtgttacaattgcctacagtattcaggacagtcacgtgctgtgcagatctgtagcctaggagcgatgggctctagcatatagcctgagagtgtggtaggctatgccgtctaggtccatctaagtccactctgcattcacacaaggacaacagcagcacatgttctcagaacatatcctcattgttcaactgtgcatgactctacagtattatcttctcctgtgttttccttgtgaaccctcagctggttaacatggatcccgagccctgggccttccccggaactttctagcctagatttagtttgtcaggtttcagaaagaataaaattatctaaaattgagggaaaaaaattggcaggcaatttggaaaagactctcagttggcctgccaacaacactggcagaagaaatgtagtcgagttagaatccttccagcatgttccctaggggatgctcacacaggaaccacaggtgaaatagggaagtccctggctcctaaagcctaagcaggaaccatatactccaccactcccctcctgaagtgaaattgagtcccaaaccaggagtaacaggagcacaaaggtgacggagctcatacaaactgagatgaattgcagcttccaggacggaaatgactagtagcttattatttgtcattggctccagataaatcttacaacctgattaaaagcaaatgtattgacttttttttttttttttttttggctatggctattctgactattctcttttactgaaaatggtttttttctaattagatagcagcagcctgaaggtaggaccatcttagtttctgtgttccttatagaatctaggaaattattttgtacattgtaagtattcaataaagattggattactcaacttgaataaaaacaagcagatgataataccttaatagtcccagaattaagtttctttggacagtgatttgttgatatttttaaattagctattagacacaacaccctgcagcaaaaaggctttgcttacttgagctcacgcttgttatccttttggagtctgaagcctaattaatgtagaatagagcctcttttagaataaaagtcctctgccctatgggcttattctttgggtctctaaacacagattggggaacagaaaagaaagtcttttggcttcaggctagggataggcacctccccgcccatctgcctctcagtgttgctggccagggcagggggagctagtgtgatttgcccaaacctccctccctgaggtgtcatgttgctgtgatggtgtcacaggagtctcaggaaagctgagagctcaacataacaaagttcctacgtggacagtggtgctcaatagttgcttcttaaaaaatagattagttaggactatcggatgccagggactgaatctagtcacttaataatcaggttcccacagatctacttatctatatcccaaacactgtataattctaaaactatgagaaagaaagaaagagagagagagagagtgtgtgtgtgtgtgactcaactgcctcaaacacaccaaggaaacatgtttgaatataaataactgaagacagaaaagacagaatgaatcaaccagaggactagggagagttatatataaactgatatagatagatataattttttaaaattatttttaaatagagacggaattttgccatgttgcccaggctggtctcgaactccgggcttcaagtgatcctccaaccttggcctccagaaatgctgggataacaggcatgagccaccatgcccggcctagtgatataatttttttttatataggccttgaggtgttgtattttttataagaggtattatatagtttataaactcataaaaaatttaaaaacaaggtaaactgtaatattttaattgaaaacacttctttagttatatccttgaaaactgaaaccttacacattacaggattgttatcttgttagttggacaccgttaaatgaccaaagctattcatggtctcctgatgagaacccaagtaaagagtcttcccttagttaattcacaggatcctcccttactcaactggaccagcactttacagttgcataaaaccctggttttgagtttttcttgtccctcaatattcactaaggctgtcatgaaaattattatgcttattaaaataaaactccatggattgcttaatgaaagatacttaagaatttgccaggtttaagttttattgctatttagagaacaagattttctaaacctattgccctgtgactcttcaaaaccatcagccaggaattctttttggatacactgatatttctctatgttatccttagtacagcttagcttaccaaaggatagatggacaaaagagtcttaaaggttaagtcttggaacaatataa

SEQ ID NO: 98026 - DNA, 41479 bp, Homo sapiens
  misc_feature (1)...(41479): n = A,T,C or G
ctctgttgttcaggctagagtgcagtggcatgatctcggctcactaaaacctccgcctcctgggttcaagccatcctcccacctcagtctcccaagtagccgggactaccggcacgtgccaccatgcccagctaatttttgtattttttgtagagatggggtttcaccatgttgtccaggctggtctcgaactcctgagatcaagcaatcctcctgcctcagtctcccaaagtgctgggattacaggtgtgagccactgtgcccagctatgatcaagatttttaattttttaaaaaatattttaagtcatggtctattgcaaacatctacagtaaaaaagatttaacatatgtgaatattttgacctaatttcctcagtctctttctgtactaaaacaaaaacaaaaacaaaaactattatttattgagccttttctacttgccaggcactcttctaagtgctttaaatgtattaacttatttgatcctcacaaccctgaagcaggtactattaatattctcatttaacagataagaaaactgagacaaagaaagagtaggaaacttgcccagggctgcacaagctaggatgcagtagaagttgcactcttatccgcttcagttttactatcaacactacagatacagctgaaattctccctttcattctcctcctttcctctccagaggtaattaccatcttaaagttggtgtatatcattctcatgtcactcccttaccggtttttatttaagtacccataaacaacacagagcactgtgctagtgaatagttaagatttcaataaatgttagccattgttatttattatgtccttttaaacacatctttaaaggtaatatagtcaaatttatcaataacgtcctttatgggtggagatttttctgctttatttaaatcttttccttttcccatgtgatacagatgtacgactattttggaaaaacacatcacattttccctctgctctcacaacaatcaaccccgacgtctgtgaccaaaaatgtgggggtttttccccaccaataagtagtggacaccagctgggtatcctccaactcaattttgacactatctacctggagatagtgtcagatcataggttgagggcttggtccccaagactgcaccccaccctcctccagacacaaatagcaagctggggcctatggaacttctgaccaattggcttcaagtcctcttaggtttattttagtttttatttttttaattcctcttaggtttttatggaagcttcatgatgtcagcattccttcccccagggtatagggtggggtccctctctgaggagggtcttaagactcacaatttgaaagacagggaaagattccagtcctgccttggggtaggtgaaaggagggcaggagagattctgtttcccaaggcctgctcctaaggcctaggatgcctaacaaaatactgtagcaagggctgagagttatgagccaggaaccatggatgaaaacctatatatgtgtgtgtatgtgcatatatatatatatatatatatacatacacaatacttaatagattacaatatagtgtaaacataacttttatatgcactgggaaaccaaaaaatttgtgactccctttattactatatttgctttattgactatttactcaggtctggaactgaacttgcaatatctcctatatatactaatatgtgaattagaaccagggattcatctttttatctcaattactggaataacatagaagtactggtaaagctggccaggcagtggctcatgcctgtgatcccagcactttgcctgtaatcccagcactctgtaatccactgaggcaggtggatcacttgaggtcaggagtttgagaccagccttgccaacatggcaaaacaccatctctactaaaaacaaaaaacaaaaattagctgggagtggaggagcacatctgtaatcttagctacttgggagcctgaggcacaagaatcgcttcaacctgggaggtggaagttgcagtgagttgagatcgccccactgcactcaaacctgggtgacagagagagaccctgtctcaaaaataaataaataaataaacaaaattattggtaaagtcgaatgtatacatacatatatacatttctgacagtgctagaatttctggtagattataaatgagatatagaaggaaaaacttgataaatgtgagttgagtgtattccaaaaacagatacactactataaacagtggcaaaggaatgaaattacacccacagtacattctccacatgggccagagtgcagctttaaaagtataaatcttggccgggcacggtggctcatgcctgtaatcgcagctactcgggaggttgaggcagtagaatcacttgaacctgggatacagaggttgcagtgagctggggttgcgccgatgcactgtagcctgggagacagtgagacttcgtttaaaaaaaaagaaaaaaaaaaagaaaaaaaaaggaaatgagggaggccaggcatgatggctcatgcctgtaatcctagtaccttgggaggccgaggcgggtggatcactttgaggccaggagtttgagaccagtctggccaacatagcagaaccccatctctactaaaaatacaaaaattagctgggcgtggtggcacacgcctgtaatcccagctactccggaggctgaggcacgagaatcgcttgaacacgggaggcaggggttgcagtgcgtggagattgcaccactgccctccagcctgggtaaaagagtgagactctgtaaagtaaaaaaaaaaaaaagaagaagaaggaaggaagaagagagagaaaaataaaaaagaagagaatcagatatatttacacagatgcaaaagtgcctaatccactgaaaagccctctctgtaagctgtcattattatgaagctaggagaatgccaagagctgggaggtatcaaaagtttcaggagtgccttgtgaaaaggagggggcagaaactgatgtgagtccagctgccagggttgtgcgagtgcgaatgtgtgtgtctggggaaaaggtgataaggaaatgactcaagtgatttacaagacaagcaaacgtatgtcttgtgaagggtgatctatttagactaacctcaattactgaccaagaacctatttgacctgacccattttctacttcattcacacaccagtctttgttctcttccttgaagtcaggccacacactgcctcttctgttacctgaacacccctatattattcccatctcaggaccttctgcacctgcctggctccttataattccggtttctgttcaaatgttgcttcttcggagacgatttctcttgactattccatctaaataaaatagcgtaactctttccttcgagttcccccgatttcttcattgcacctttcactctcttaaagttatctcatttatgtgtttacttgtttaaggcttgcctcccccattccgatgtacactctgtaaaccagggacacttttgaccttgttcctggctgtatgtaaccttagcgtcaggcgcacagaaactatatacatatctgctgtcttctgtaaatataaaacctcaagtccggagatccctagacactgggagcgatcaagggccgggagtgtgccttgtggacgaatgaggaagtgggaaggccgtcctgagaagatcggggaaccctgggaaggaaaagtagaagtccgagctctcgggaggaccgaggggcgcgaacgtgggggtctcacctgccgaatggccgccagcgtgttctcgggcgcgtcgtggctgccgccacggtgggcgatggcagaaatgcggtcccggggcttgagcacctgcagggccctgcaagagggcaccggctcaaagctgaagacgcgcagtagaacgaagaggctgccggtgaggaggcaggcattgaccgggctccgcgtcaccagcagcagcactagcagcaggaaggagaaagggcccaggaggccgccctggtcctcccacagccacatgccggcgcccgcaccggcacggacgggagtcccggacccgccgggctcctggggcagtagaacgagaagcgagggggagggtccaaggcaccggcagcagcaggaaccctctgaggggaccagcgccgcacaatggcggcagcagacacatccagagagggagtcggccgcccagccaatcagggatcgggattcgcagcgccagtgggcggagccgctccatggcaacgggggagggcccaggccccaggccccaggctcacgttccaaatctaaggtgggttagggttttccgaggtctgaacttcaacctgggcgttcagactcctaggcgagaaaaggagggataagaaccatcctaaagctgtaggactggaagggattttagtgactcctttatctgcccttgaggaaactgaattccagggaacctggagaggcaggatgcttagactatcaattcaattcaattcagttcagttcagttcaattcaagatgtgccaaataccggtccaggtgctccggacacagttgaacaggacctacagggtttttgctcttatgggattcacattcttgtgggaggaaataaaagttagcaagtacacctaacgtttacagagcacttaccatgtcccaggtacttgacgagcaaacactttatatgcttatctcattctcaatacagcctaacagttactatcaggagactgatttcaatcgactttattttccagattctgggggactggaagagcctagcaaagaaggcacaatcggattataaaactggaaggggttttaaggattcccttatttcatagatgcggaaactgaggataggtgaattaagcagttaatggcagggtggggactgacataaaggcctccccagtgatttgtgacattttcactcctcctccccctaatcttacttctgctaagggcttttgtaccaggcactgtacaggagttacctcaactgtgcctcacaaccacccttgtgataggcacttttaaaacccccattttacatatgcaaaaacaggcactggaaggagggtaagagagatagaccatgaagccgagttagggagtgaaaaggggcccctggacatattttggagggctggtaacatttttatgtagagaactttgcaaaaatattcagggatttttctgttacctttttttcctttagtgcattttcccactgatttgcaaaaggggatagatgtcttaagccttccagttggcatctaggattcagcctttttttttttttctttcagacagtctcactctatcgcccaggttggaatgcagtggtgcaatcatggctcactgcaacgtcgacctcctgggctcaagcgatcttccgacctcagcctcccgagtagctgggaccacaggctcgcgccaccccacccggctaacgtttaaaatttttgtagagatgccgtctccctttgttgcccaggctgatctcgaactcctgggctcaagcgatccttccgcctcggcttccaaaatgttggaattataggcgtaagccatcacgcccggtgggttcagcaagtttttacctacaagaaaatattttggtgaatgttacatgttttctaacggctgcatagaaaggggttatctttatacagataagaaaaaaatggcaacttcaaggaacacttcagggggcttcagaccctgaggggtgttcctattctactaaataagtaaatttattaataaattctagtctctagcttgcaaggaagactacgtttcccggcgtgcagcgtgctggccgtaagcattacgtcctccatcgcgggcgcgcaatgcacctcggggatggtagtgttctggtggcccaacggttttaacagcccgggaatcaaccaccggaagtgccggccctgagaggtggagtcggggtggcagcggcggcggttgccaggagcccgcgttgcagcctgagatccgtaatatggcggggaggaggaggagaaggcggcggcggaccgagctgcgctctgtcagtaccatttgagccattcgcttcctgacaaggcccgtggcgaggggagaggagctgaaggggccgtgggggatcaggtgtgtgcatgaggagggggcttgagccttgacgggtccgggctgagaggtggtctggcgaggcgaaattggcgccctgagaagctgagggcgggctctgtgctgggctcccgggcctcgagccccctggaaaggcgccggctgttgggaggcgggaccccgggggcagccagcaccgggcgctgaggtgatgctccgatgctggccccgcctggagggccctcggtttggagtcttaaatcggaggagctggaggaggtgggcatggggcgctggggagarggcagggggccgtccctggtgaataaaactcgggccagagccggagaaccccatcgtggtgatcaaattgtttgggccgtttttcttctccctcccacggtgctggagagggaggcttccccggggtgtgcattggccatttatgagcccctgtttccacaaccaaggccctaggagcgctgcttacttcgcctttgccactctggggcataaacttgaggataataaagtaatcgattgcccctggagctgctagatggttcccaccctttgattctattctggttacgatccaagctccctacccccagtttaggcaaatggcagccatctcgagattgatttgacggggagaggtctagggacagggaaatgaggaagccgttgtccccttttctatatttttcagtttcatttgaaacctacggggaaccaagcactgtcgctgccctccaggaattcatactctactgctaaaaatcgtcatcatcattatcctcttaataagaaaagcagtccccattatttgttgctttctgcgtgttctgcactacgttaattgccctacatgcattagctcattgaattcttacaacattcctttgagacggataccgtgatcatccctcttttacagaggacgaaacaggtgtggggatggtaactggcttgccaagaacttgcagctagtacgcatctgaataagaaatcttcccctttaccgcttttacaagaagtttgcgtctttggcggaactgatgggcaaagaaacactaggttctgcaaaaaaaaagcaggatctgttctgtgttacttttaccactcttttcagtgacatgtctggcagagcacgggtaaggagcagataggaccatgagtctacggggtttgcaaagaggctcatttgcacaagggtcagtggttctctgtggtataaatggagaagacrgcatgtctgaacctgctgtagctgacaaattattactggaagtggaccagtgatgcctgatggcaagatatagagcagtagatttgtggctggggtagccttgtagtcagggctcccttaaaataaaaccttgctgacagtggtaattgtagtgtgaaaggcatagtgtcctcttgcttaatcatgggatacagactgctcacttcttaaatggttacctttgcagtttaagaggtaccagtttctctgggactagagccatggtgaaatttccattctctaaattccactcttccttgctagcttcggtgtatagtccgccttctttttttcttctggtttacattattgtttgagcttattattattcttattcatttattcaatacttttatcaagtgcctgctgtgtgctgatactgttctgtgtaatggggattcagtgaacaagactgaaaaggtacctgtacttatggcgcttacattttggtggaggaagacagacaaaaatcaaggaaataaacacgataatttcagatagtggtaagtgctatgaaaattgggaaacagcagggtaatgtgatagtgatagaggcagagttcatttagatggggtcatcagggatgccttctctgaggaggggatatccaagccgagactgaagaataagaaggatccagtcatgctctaaggatcatctagtaatttgtataatctccatattagcactcatatttgaatgagtaatgcgttgtcatatgctgtgttgtgctgtaataataatatagtactatacatctgcaagatrtaggacatatatgtactatttaagggatgtgaataactttctgaaacaatgaggcatagctctatgatgttgaaagaaaaataaaactatggccataaaagtattatatttccttaataatttccctcacttctaaaattgaatttcatgctttgcttgagtatccatagaagatatattactttatttgtataatctatttacattctgtgtattgctgaatgcatggcatgattaaaaaaataaaatatttgagcagaaatggggttaagaaataatgtgagttgaaacctagacctaaaaaaaggctatgccttaaggtgttttattgtttttacttttgcttttttaaaataaataaaagcttgtaaaatagtctcactcacactgtagagaaccatttgtttgtcattagattcctactttgcatagattgaacacaaataattacaattgattgaatagtaggaagaagttttgttattgattaaactatttagaaaaaatagcattatatcttatttttttataacctgattataattttgactattttttttttmccatttctcattgcactataatttgtccctgatactttggtgtactgaatttttaagtactttgaggcctaccgaggacatatcctatttcatctttgcatatcccacatcatgaattgaatttccctgccctctctttttttgttaagaagctaattattttaaaatgaagacataaaggaacatgattgtattctattttctgtttccatagttcatacccttgctggttatgattctgataatgtctttttattttcccttgcttatttaaaggaaacagtgccacacataatgctgtgcaaataagcaatcaacatttactgtttgctaaatgaatgaatatgatgcctaatccctcctggttaccttgtattttcataatcacaatttcccagaaactgtgaaattactgggattgttttaagtagtttggtgatggttccaattttcaacaataaaatataattaatatcagagccaatcgatttgctcttttttacctctgactgagttggctggtgctcatgcagtccaagtatagtgttaagataggcaaattgaggcaggaggattgcttgagtctcagagtttgagactatagtgcactgtgactgaacctgtgaatagtcactggaatccagtttgggcaacatagtgagaccytgtctctttaaaaaaaaaaaaaaagatatgagagtaacctctgaacttcaaaatagaaaatttttaaaagtaaatattctttgatttaagtaggcttttttactacagtgtttgtacctttgtatgatatagtttttcttgtgtagataagtcctgttaaagaaaatataatatcctgttttacaatgtgaagttagtaaagatttacagaactttgtttcctttaagaaggttttactgaattcttagctaaattaatcccatttaaagattgatttacatgcaataatattcagaaatatttaatatataaagtaaatcttaattrgacaggttcttgaggtgaattaccatacccaagaattagctcctgatcagtaagacaattctgggaggaccagttataggaattgtgaattatagggactctctcatgctctacaaaatctgccaaataattaagatctgtttttcccagtacattaaaaataacatttttctctcttgtagtgtgactgtgggaagatggaggagtatgagaagttctgtgaaaaaagtcttgccagaatacaagaagcatcactatccacagagagctttctccctgctcagtctgaaagtatctcacttattcgctttcatggagtggctatcctttctccactggtaaacttgctttgtttttaaatagtttttttctgtagtgaacaactaaaacagttcgtggaaaaacaaaagaaaggcttataaacatttgaagagatgccctcattcagaattagagaaatrcaaatgaattagcattttttacttactattatagattggccaagacctaatagaactttgtgttccttagattgtggagaaaatgcacttttaatgcacttttgctaagagaatcagtttattttatttctagatgagcagtttggtagaatttaaaagcatacatagcctttgggtcagcagttccatttttgggtatatcctacaattatatgtgagcccaaagaaataagtacaaagttacattagcattgtttaaaatagcaaaggttgacgaaccacctaaatgtccatcagtagtggagtagtttaactatggtctattttataaactctcatacataccattacagtaaggcagatgtaaatgttgaggcatggaaggatctcgatgatctagtgtaaaacaccgtgtgcagcatgctgtcaggggcagtatagagtcatgattagaggtccagactctgggccaggcacagtggctcacacctatagtcccaatgctttgagagaccggaaggaagaggattgcttgagaccaggaattcaagactagcctggtcaacatagtgagacctcatctctataaaaacatgttaaaaaattagcctggcgcagtgacatgtgcctgtagtcccagctcttcaaaggctaaggcggaaggatcgcttgaacctaggagttgcaggctgcagtgagtcaggattgcatcattgcctggactacagagaaagaccctatcccaaaagaaggaaaaaaactccagcctgggctaacagagcaagaccctatcccaaaagaaggaaaaaaaaagtctaggctgtggagccttctggcctgggtccaaatcattgctttgctacttacttgctgtgtaaacttgtggtccattttcttatttgttaaatggggataaaatagtgcctacctcataaggctattttgaagattaaatgaattcgtagatataaaatggttagaataccacctggatcataagaggtacccaatataagttaaccatttgggtttttcaaaggatggctattccttttctggggagtggtgagagaatataggataatagggaagacacttcatcatacaccctttgatactaattggatattttaaaaatgcatatgactttattttaaatcacaaactaatattagaaaaaagtgagctttaaatttattttttggtataacaggagttaagagattaattttaattaattgaattgaatttttaaagacaccagagctaactgccaactttttgtaatgaaactttcaaacatacagcaaagttgaaaggatagtgcagtgaccacccatagatttaccattagattaaataatttttaacattgttgtcatctttgctttattgtgtttgtgatttttatatacatctatgtgtgtgtgtacatatgacatttttaaaaattgcctagctatttgaaaaccacggagacctgacactgctcccctaaatattttggtgtacatctcttaaaaataaggacattctcctatgtaaagccccaataccrttatcacatcttaagaaaactaataatttttaataatatctaataattctgttcatatttaaatttttccatttgtgctcaaaatgccttttataactttattcccccaatctggatccaaagttcacaattagtatttgcttgttatgtttctttattttaatctaaaatagctactgtacgtcttaaaaacagttttttttattggttgagcatggtgcctcacgcctataatcccagcactttgggaggctgaggtgggtggattgcattgcttgatccccagagtttgagaccagtcagggcaacgtggtgaaatctcatccctacaaaaaatacaaaaatcagctgggtgtggtggcgcgcaccaggagtctcagctgctctagaggctgaggtgggaggatcacctgagcccgggaggctgaggctgcggtgaaccctgatcatgccactgcactccaacctgggtgacagagtgagatactgtctttaaaaaaawaacaaaactatgatactgaatttttaaagagaccagagctattgtcttgtagaattccttagatcttggatttgtcccattgtttcctaatagtgttatttaacttgtttctctagtccctgtagttcctatgaactggaagtgaagtttgataaacaggttaaagatttttggaattctttgaagatagggctgggcggggtggctcatgcctgtaatcccagcactttgggaggctgagaccagcctggccaacatgacraaaccccgtctctactaaaaatacaaaaattagctgggcgtggtggtggatgcctgtaatcccagctatgtgggaggctgaggcaggaggatcccttgaacccaggaggcgaaggttgcagtgagccaagatccactgaacccagtaggcaaaggtagtgagccgagatcgagccactgcacaacagcctgggcaacagagtgagaccctstctcaaaaaaaaaaaatgtaatcccagcactttgggagcccgagatgggtgtatcacttgaggtcaggagttcgagaccagcctggccaacatggcgaaaccccttgtctactaaaaatataaaaattagctaggcatgatggtgggtgcctgtaatcccagctgtgcgttaggccgaggcaggagaatcgcttgaacccaggagggatcgggatcgcaccactgtactccaacctgagactccatctcaaaaaaaaaaggaattctttggagatgatgccctgcacttcatactaaattaaatcagaagttacataatgtttagttgccctctattagtgatgtttagtttgaacacttgcttacagtagtgactgccagatggctctttaaagtacacattttctccttttgattagcaagtaaattgtataatcattctttggtaccatgcaattaggaaaaagttttaaaacaacatatttatcagctatttgataacacattgcttgatttaatgtggaccaaaatgtctgaggcttgttgtgtagggtctatgactccgtctgttatttatttataagcaaaatgtgatgtttatggacctaatccacacttttatgttrtatttgataggtgaatattgcaacttttgaaataattttttaatgatatattttctatttgtgtaagtctacgataagtcttgactgttaacagtgatttaatttcccaggacttaataattaagattgaaatccattataaagagatacaatgcttagaagccttccattttttaggtacattatatttttatcagaaggtagagtgaggtgaaagaaaagatgtattctgcttytgtaggcaaataatatattatctgtttattttatcattaaacctttggacattttttgaggcagcaaagagttaaattgtgcactggttagaaaattaaaagttgtagaatccagttgatccagtgaaataagatactgaagatgggccaggcgcggtggctcgcgcctgtaatcccagcactttgggaggccgaggtgggcagatcacaaagtcaggagttcgagaccagcctgaccaacatggtgaaaccccatctctactaaaaatacaaaaattagctgggcgtggtggcacgcgcctgtaagcccatctactccggaggctgaggcaggagaatygcttgaacccaggaggcggaggttgcagtgagccgagatcgcaccactgcactccagcctaggtgacagagcaagactccatctcaaaaaaaaaaaaaaaaggatactgaatgtgaagtaatattcaagtcaatattcaagtgaagtaataaaaaactcagcagtggccaaaagggccttaattttatttctgtcattttagaacatttgattagtgaacaaacttttttctttttaaccttttaactgaaaataatttacacatagcaaaatgcacaaatcttaagtgttaaagttccatgagttttgatatatggcatacacatgtataactcacacccacacaggattttcttcaccatggaaagatctctaatgccccatcccactcagtacccagaccattgttctgatttctttcactatacattagttttgcctgttgcacatgtttttaatctttctgattcacaacttcccgattttatgatatttttatcgtgggaaataattacatttttatgatgttttgcagcttaacattgagaaaagaaaggaaatgcaacaagaaaagcagaaagcacttgatgtagaagcaagaaagcaggttaacaggaagaaagctttactgactcgtgtccaggagattcttgacaatgttcaggtgtgtgattttagctgtttcagttataataaagaaatcataagataagcgttgatgataatttttctgaaatatatttkcacttaactaattactaatgtactttactgttacstttgagaagcttcataatttgtgattttccatttcagttactccaaagagaatgtacttgcttgttagtaatgcccagtwcttgaatcagaggatatttacacaatagaaccatacactgaatataattgcttattgtttgcatcttatgactctaaaaacattgaattctcagtgacaaaatgacagaattgggtattattgtttaccccaaactaattagactattgactaaatgaccttattctcattctttgcttaagtaaataactgcctccaatttttttttggtgaaaactcttagatacacaaaatgcagtttagataacmttgaattgtttagatgcatcctatgtctaaaaactatttaaacaacacatctacaccttgtgcagttatttttagatttgtataaacaatttgttctgacatgtggatcattttgtactaaaaagaaaaacaaatgaattagattgaacgaataatttctacaacatatagcagtgttctgctggtaacatctttttgttttttcataatcttaggagtttgtggtttgtctgtttaattcgtatcgatgacacgtgtatamtgaaccttaagggttcatttctctgttggtagtgtaaactgaagaaaatgactgaggcaagtctcaatcgatttagaggtttgttttgccaaggttgaggatgtgccaaggaaaaagagacaaaagttacagtagaatctgtggcttatgcttttccagaagaggttttgaggacttcagtgtataaaggggagagaacagcaggaggggaaagaggaaagaaaaaaaaaggagggtaggtaatgagataagcgatcacatttttgtgaggctttgattagcactcactgaatccacaagtcgcatgagaaaggtgggggtagaggaacagtcagttatgcattcatctcaagctcaataaatctgcattttacataggataaagtaagcagagtagaggaagaagtcaaatatacatttgtctccaaagggatgatttctagtcatctttggtctttgtccgtatcttgtcagagtgaaattcagcagaactctgggttggtgtaaagattttggggcctacgaggaatttccttgtgagcaatttgcaagagagtctacctgggtagataggtggccttctattttgcagctatctgtttaggaataaaaggaaggcagtttttgtgtgactcagttcctaagctttactttttcctttgacatgtgattttccatttcagttactcgaaatccctatgtaatgagtcttcagaatctgatgaaaaagtcaaaggaatatatagaaagagaacaatctagacgcaggctgagaggtagtattaagagaattgttaatgagagtcatagtgactctcatgtgacatagttgagtttggggtcctsagatattatttccctttcacagtagtatatagtgtgtgggtagtagatttcattttgcagattataattactgtccatattaagtttaaaaaatgtattgagtagcactaatttaacaataagaggtaggttttttacttactacgtatttcctgtgattgaaatgaaaatggcatatcattcttggtccattgagggaagataaaatatactactaataaaattgttaaaagagcatgtataatgttgaactgtaatgaattaattattcagataggaaaattttatataatacaattagatttctgcttcacctgtaaaacctaagattctatgatagatttttttcttgttgttatttaacttgtctaactaaaggctcattttagtgacgtataaacaacatagcttccgaatatcacaaatgtgaaatattttacgtaaggaaatcatctgttttacttaaacctgtgaacatgttcatggatttcataaatatgcatcctttttgttttattttggtcctgaggctgtgactaagtatgtcttgtactcttgtactgttgattgcatagtacctggaaacctttttgcatcttttttgttttattttggttctgaggttgtgactaagtatgtcttattgtactgtgtattgcatagtacctggaaaccattacctgtcttgggatttgtaacgtaaaataggagagccatgtggtctagaaaaaaacaagcacattcaaaacaaccaaaaaatattgtaatattcagactttttttttttttttttttttttctgagatggagtcgcgctctgtcgcccaggccggagtgcagtgacgtgatcttggctcactgcaagctccgcctcccagattcatgccattctcttgcttcagcctcctgagtagctgggactacaggtgcccaccaccaagcccagctaattttttgtatttttagtagagatggagtttcactgtgttagccaggatgatcttgatctcctgacctcatgatccgcccgcctcggcctcccaaagtgctgggattacaggcgtgagccaccatgccccgccaatagtcaggcttttgatgtctgtattcatatgataatacaatgatttttgccagtttaatatacggatgtataattacctttagaaactatcctagttctctttttattcttttgcaaagttggattatttagatacaaaatatctatttttacattcattcattcattcattcatttttgagacaaagtttagttaaactttggagtaagcatgtaggtgcaggagtcttattactgaatcatttttgcttaatcaatgtcctggacaagttagtctttgttagagagggaatcgtttacgtaagacatttcattacttgctgtttattgcatatattattatccttggatgatagctatcctaggaggaacagttggtaatgttaataacatatgactagaagaaatttaagtgcttstattctaagattaaattgcacatggatatatgaatatatgtgtgtgtgtatacacatatatatgttcatatttgtatcagattagatgtttctttttataactcttttataactcttttaataacttaggcaggatgaccagtaggcatcttttcaataataatttgagccccctgtgatacaggataccgtagaaacctgtcatcttagtttttctttatgttttgaaatgtcagaattctgaattttcaatttcaattttattttagaaaacagtgaaatcagagactttttgtgcaatgaggaaatattaatttttaaatttcctgtttcaggttagaaaagcacctaatgccagtgattttgatcagtgggagatggaaacagtttactctaattcagaagtcagaaacttgaatgttcctgctacrtttccaaatagctttccaagccatacggaacactctactgcagcaaagcttgataagatagctgggattttgccattggataatgaggaccaatgtaaaactgatggaatagacttagctagagattcagaaggatttaattctcygaagcaatgtgatagttccaatattagtcatgtagaaaatgaagcttttccaaagacctcttcagcaaccccacaagaaactcttatttctgatggtcccttctcagtaaatgaacaacaggatctaccacttttggcagaagtcatcccagatccctatgtaatgagtcttcagaatctgatgaaaaagkcaaaggaatatatagaaagagaacaatctagacgcagtctgagaggtagtatsaacagaattgttaatgagagtcatttagacaaagaacatgatgctgttgaagtggctgactgtgtaaaagagaaaggccagttgacaggcaaacactgtgtctcagttattcctgacaaaccaagccttaataaatcaaatgttcttctccaaggtgcttccactcaagcaagcagcatgagyatgccagttttagctagcttttcgaaagtggacatacctatacgaactggccatcccactgttctagagtctaattctgattttaaagttattcccactwttgttaccgaaaataatgttatcaaaagtcttacaggttcatatgccaaattacctagtccagagccaagtatgagtcctaaaatrcaccgaagacgttccaggacatcatcagcgtgtcayatacttataaataacccaataaatgcctgtgaattaagccctaaaggaaaagaacaggcaatggacttaattattcaagatactgatgaaaacacaaatgtgcccgaaattatgccaaagttaccaactgatttagcrggagtttgttcaagcaaggtttatgtgggcaaaaatacatctgaagtcaaagaagatgtggttttaggtaaatcaaatcaggtatgtcaatcttcaggaaatcatttagaaaataaagttactcatggacttgttactgtggaaggtcagttaacatccgatgagagaggygcacacataatgaacagtacctgtgctgcgatgccaaagctgcatgaaccatatgccagcagtcagtgtatagcaagtccaaactttggaactgtgagtggactcaagccagccagtatgttagagaaaaactgcagtttgcaaacagaactgaataagtcttatgatgtaaaaaacccttctcctttattgatgcaaaaccagaatacgagacagcagatggacacacctatggtgtcctgtggaaatgaacaatttttggataacagttttgagaargttaaacggagacttgatttagatattgatggtttgcaaaaagaaaactgcccttatgtcataacaagtggaataactgaacaagaaaggcaacatttgccagaaaaaagataccctaagggatctggcttcgttaacaagaataaaatgttaggaactagttccaaaggtaaggaatctttgaagcgtttgataccttctatgcagatacctttattttaatactcttaattgacatttttgrgaaaaaagtggtctttattcatatgggcacttaattttatttatcttattagaaagcatattagtcagctacagtttattgccatttgataggctttcttaaagattttcttgagacaaggtctggctctatcaccccagtttggagtgaagtggcatgacttcagctcactacaacctccgcctcctgggctcaagccatcctcccacctcatcctcccaagtagctgggactacaggctcatgccaccatgcccggctaatttttgtattttttgtactgtagagatggagtttctggcatgttgcccaagctggtctcwaactcatgagcttgagtgagcctcccgtctcagcctcccaaagctgtgggattacaggcgtgagccacgacacccagccaggattttcttttttgagacagtctggcactgttgcccaggctggagtgcagtggcacaaccttggctaactgcaacctccacctcccggttcaggcaattctcatgcctcagcgtcctgagtagctgggattacaggcgtgagccatcatgcctggatggatcttcttatttaaatgatgaagctttcatagtccacttggtattattgagaatattaataattggaggaaacagttcttttttttttttttttttttttttttttgagacagtcttgctctgtcgccaggctggagtgcagtggcgggttctcacctcactgcaacctctgcttcctgggttcaattgattttcgtgcctcagcctccagagtagctgggattacaggtgcttaccacctggcccagctaatttttatatttttagtagagatgtggttttgccatgttggccaggctgctctcaagctcctggcctcaagcgatccacccgcctcagcctcccaaagtgctggaattacaggcatgagccaccgcacccagccccaaacagtcttgcctgaaacatcacttacagttttaattcactgtattgctatgaggtctttcttttggactatagtttctaatgtttatttcagtttgctttttcatttgtagtatgagcttcgtgtaattggtccttcagtaaacactttaacatcaaattattagacaaagtatcagaaataaggctctgagtaggtggttcaagaacggttctttaggmcggcgcggttgcttacgcctgtaatcccagcactttgggaggccgaggtgggtggatcacttgaggtcaggagttcgagaccaaactgacaaacatggcgaaaccccgtctctactaaaaatacaaaaattagctgggcgtagtggtgcacatctttaatcccagctacttgggaggctgaggcaggagaattggatgaacccaggaggcggaggttgcagtgagccgagattgcaccattgcactccagcctgggtgacagagccagattccatctcaaaaaaaaaaaataataataataaaggttcttaattaataaaaattattatttcagttttttctgttgtatccattaacagcaatttattaaagcacgtttttctccttcattaccccttactttgttgtcattgttgataattctttattactgatatagaagacatacaaatcaagtaagttaagctcttagggcttatgggaaatacagggttgggtcagactgcttaaaacctgtgcaactttttttttttttaattttttttttttgagacagggtcttgctccgtcacccaggctagattgctgtggtgcgatctcagttcactgtaggcctgggttcaagcgattctcctgcctcagccttccaagtagctgagatttacaggcatgcgccaccacgcccagctgttatattttttgtggagacagggtttcaccatgttggccaggctggtctcgaactcctaggctcaggtgatcagccctccttggcctcccaaagtgctgggattacaggtttgagccaccagccctggcccatcctgtgcaactttataagagctctaataaaaacaaccactgttacctggggagccaacttggatcctccaagtagatagcatagcaaggcaagaggctgcctcagtgaatatcagaagtacataagaccaacagagtggaaatttcttttttttttttttgagatggagtttcactcttgttgcccaggctggagtgcaatggtgcgatctcagctcactgcaacctccgcctcccaggttcaagcgattctcctgcttcagcctcccaagtagctgagattacaggcatgcgcttgtattttttyagtagagattcggtttcaccatgttggtcatgctggtctcgaactcctgacctcaagtgatccacctgccttggcctcccaaagtactgggattacagacgtgagccaccacacctggcccatacttggtatttgtacatttcaacatgtcttaccacattctatttaggaagcttgtattgtcataatgttttctcttagttagtaactaaatatctggaattttaacgtccagtcctttttgaaacctcaagctgagaaagctttataccatcaaggaaacactttctttgaaaatcaaaacaaggcaaaactacaagctacactaccagagatcctggaggacaagtgtcaaaaaaacaaatgatggtaggatgcagttgaggaccacatctgaaagttaagtagagtcaggagaatcttgtctgaatrtatagtcctgggtctgtcatttcagatcaggatgggatctgttgaatgagtgggtraaggtgatgcaatacaggtcttactttattgagtagcatgaaataaaaggagtgtggttcgaagtagagacccagctatatcttgattgtattatgtcagatccaggaatactctcttgtcagaaggataatttaaattgatggtataaaatatcagacattagacttgtgaattttctaaattgaggaaacatgtttcttttcagaaagcgaggagttactaaaaagcaagatgttagcttttgaagaaatgcggaagagactagaagaacagcacgcccagcaattatcactactcatagctgagcaggaaagggaacaagaaagactgcaaaaggtgaggaatgtggagggagatacaactggtaagtgaaatttagccaaggatacctatgaattttggtcatgtatagaatacgtgtaatttttgcctccatatatcttaaggtaagggagtcattttgatacgtgaatggtattttttgtcaaaatatgaattttgatatttagatccttatctaaaagtaattgcataatttatcgagaatattttattgaatccttgatttaaagcttaatattttaaaaaggtattttataaataggtgctaaagtacacattctgcaggagttatatcataaaaatgacactcatgctgggcgtggtatcatgagcctgtagtcccagctatgcaggaggctgaggtgggaggattgcttgagcccagaaattcaaggctgcagtgagctatgatttcgcctttgtctagccactgcactccagcctgggcaacagagggagaccctgtctctataaaaagaaaaaaaaaaagaacgacacttgttataatattattataattaataatttaactatacattatcacatattaaattatagcctgggcgtggtggctcacgcctgtaatcccagcactttgggaggccgaggtggatggatcacctgaggtcaggagtttgagaccagcctggccaacatatagtgaaatcccatctctactaaaaaatacaaaatggtggtgtatggacctgtagtcccagctacttgggaaactgaggcaggagaatcacttgaacccgcraggtggagattgcagtgaaccgagatcgtgccactgcactccagcctgggggacagagcgagattctgtttcttgaaacaagaaagagagagagaggagagagagagagagagagagagagagagagaaaggaaggaaggaaagaaaagaaaagagggagggagggaagggaagggaagggagaaggaaggaaggataatttgaggaagaaaaacttgaaataaataataattgctgataattacatgtacttttggctaagcctaaaatgatatcattttgggacataattaaaaggtttagcaygttacaataaactgttcatgtataggaaatagaagagcaggagaaaatgttaaaagagaagaaggcaatgacagcggaagcctctgagttggacattaacaatgcagtggaattagaatggagaaaaataagtgactctagtttgctggaaacaatgctgtctcaagcggactcactccatacttcaaattcaaayagttctggtaaatatttaaaaatccttttacatttgggaaagtgatcctacggtaagatatttatttggcacactataagattatatctcctgttttcaaatgattccatgtccaaccctctttgccagctgcttagtaaccagtgaaaaatgacatgataggagatcaaagacttgtgagcagatgtttgtgaacaaagattacctttgccaggaaaagatcaggaaatttggcttagagcccagtctgatcattcatgcagcaggtgatatacttcaagtgaaaacagtttgctctctcctgagtgatcttgaattacctctaattccctagtccctttaaatagcttatcttcatatctcaattatcctgagatgctgtttgtgttgaaaagatccacctggtatgtaagctttaaagtccataaatattttaagtcggcaggtaggtcatttttggaggcagttgttattcttaatgagtgtcacaagtgtttattgggatgttcttcgtattctaattatatgacatcaagtataatactatatgtatgtttctctaggtttcacaaattctgccatgcaatatagctttgtttctgcaaacgaagcaccattctacctctggggatcatcaactagtggcttgaccaaactctcagtaacaaggccttttggaagagccaaaactagatggtctcaagtgggtaaacttaatgatacatgtccatctatctatttatcttttcttaagagctatattatcttagactgtataaatgaacaccaataaacattgtgtctgtcttctttctcctaggtttttagtctggaaatacaagcaaaatttaacaaaataactgcagtggcaaaaggatttcttactcgtagacttatgcagacagataagctgaagcaacttcgacaaactgtaaaagtaagattcctgtaaatcgtttgtatttcacttctgtcttagtttctatcagtcttgtgacagctgagctaacagattagttcagaacttaaacgctttttagtcactgtaatctaggcagttttagaagtctgattgtttgttgcgggaagtcagggaccccgaatggagggaccagctggagccgcagcaaaggaatataaattgtgaagatttcattttaatatggacatatatcagttcccaaataacacttttataatttcttactcctgtctttacttcaattgctgaacataaattgtgaagatttcattttaatatggacatttatcagttcccaaaattaatacttttataatttcttatgcctgtctttaatctcttaatcctgttatcttcataagctgaggatgtaggtcacctcaggaccactattgtgttaactctacaaattgattgcaaaacatgtgtgtttgaacaayaggaaatcagtgcaacttgaaaaagaacagaataacagcgtttttcagggaacaagggaagacaaccataactgactgcctgcgaggtcgggcaaaatagagccatatttttcgtcttgcagagagcctataaacggacgtgcaagtagggaagatattgctaaattcttttcctagcaaggaatattaataattaataccctggggaaggaatgcatccctggggggaggtatataaacggccactctgggagtatctgtcttatgcggttgagataaggactaaaatatgccctggtctcctgcagtaccctcaggcttactaggattgggaaattccaccctggtaaatttgtggtcggaccagttctctgctctyraaccctgtttccttttaagatgtttatcaagacaatacgtgcacagctgaacatagacccttatcagtagttctgattttgcccttgtcctgtttcctcagaagcatgtgatctttgttctcctttttgccctttgaagcatgtgatctttgtgacctactccctgttcttgcaccccctccccttttgaaatccttaatraaacttgctggctttaaggctcaggtgggcatcatggtcctaccaatatgtgatgtccccctcggaygcccagcagtaaaattcctctctttgtactctttctctttatttctcatcyggctgacacttatgaaaaatagaaagaacctatgttgaaatattggrggctggtccccccaataatygttaatctttctcagataatattatgaataacatgtaaatgaagcagtttgtgtgtttttgacttgcttgaaagtgagtggtttgacttctgataagtaatagttttatttatgttcttagtacagtcggtcctctatctctgggttccacatctgtggattcaacgaaccatggatcaaaaataattcagaaaaaacaaatgatggttgtgtctgtactgaacatgtacaaattttttttccttgtcattatttcctaaacaatataacaactatttacatagcatgtacatttattaggtattttaactaatctagagatgatttaaagtatatgggagatgtgcttaggttatatgcagataactattttatataagggactccagcatccttggattttggtatctgagggattcatggaaccagtcccccacagatactgacgaaagactgtaattttggattgactgagaaaaagaaaaaagcaaactccagtgatcacaaatctttctagaaaaatgtttttgaaggagcatttcttttttcaggatactatggaattcataagaagttttcagtcagaagcaccattaaagagrggcattgtttcagctcaagatgcttcacttcaggaaagagtgttagctcaggtaaatacrtggatcctgaaggcttttaagacatggacatattatatttctccttttttatttaatcactgaaaataggtttcaatgaaaactattttaatctttttctataaataagtgtacatggtatatagtattcctgaactctaacctcatcttttaaatgtatacaatattttcttctcttgtgcctagttgcgagctgccttgtacggtattcatgacatattctttgtaatggatgcagctgaaagaatgtctattctacatcatgatcgagaagttcgcaaagagaaaatgctcaggcaaatggtatgttatatgatttctaatgaatagagttcttctgggtttagggtaattgatactaaatgtcagttttggttgacttcagcacccttcttctgataattcttaagcacaagtaattcctggaattactagcagcatttaaatctgtagacagatttaaaagaattacatcatttaagaattacatattgttttcttattggattttagagttgaagctttgaatgttttgctcagatggcttatacaatctatcagctgctcctgattgaatttccttgaattcaattataatgtgggttttgctttttttgaaatctgagttagaaaacaggctccaagttaatttgaagtatatcagagtatgtgatttgaatcagttatcttagtgtgattgrcaaaggaaaagcaagcaaaatttacataattctaattatttaattcttagaattagactgcttcaaaaatacaaaacaagatgatttaactaaattaaaaatgttagtagagagaagcttttccaggcaatgtgggattataatacattataatatagtggtattaattggttccagtagagtttgacgttacttttgtatattaaaggataaaatgaaaagtccacgagtggctctttcagctgcaacacagaagtctcttgataggaagaaatacatgaagtaagttttttgtatcatgtcatgttagttatcaaaccaattaattttagtcatytgttggtctatttgcatatttaaatttagaaataaagagttaatttttctgcagttgagctgatagaaatcccctttatataaagaaatttattaaaatcaggtgctaaaatctcatttcatcttagatgaatttatttactaaatttgacaacattcaactcatataactgatagctggttaatcttaaaaacagttaatctttatattcagtgcctaaatrtattccttttctgatgtcctaaaggtttcttgggaataaagacttaatgggaaaaatatcttaataactttttwaaaaaattcttctttcttgaatgcagtctttaatatgcttagtacaggtcttccagtagtacaccagcttctaaatgatgatttgtttctgtcatcctgtattacatttgtaagcatgttttcttcccttctctaaatacattatgtccttatttttatattgtgttagagctgctgaaatgggaatgccaaataagaaatttctggttaaacaaaatccttctgaaacaaggtgagaaaaatcacttagtcttaatgagaggctttttgttttttatagaaaaaaaaaattggctgggcacggtggctcacgcctgtaatcccagaactttgggaggccaagacggatggatcacctgaggtcgggagtttgagaccagcctgaccaacatggaaaaccccatctctactaaaaatacaaaattagctgggtgtggtggcacatgcctgtaatcccagctactcaagaggctgaggcaggagaatcgcttgaacccgggaggcagaggttgcagtgagccaagattgctccattgcactccagcctgggcaacaagagtgaaactctatctcaaaaaaaaaaaaaaaaaaagttaaaaaattaaaatttaaatcccaaacttcatttttgttgactttgttctacttgacatcagtagagcacttcttgctgaattgggtygggggtcgtcctcaggctcaagattcataccaatacctggccatatacctagtcacatgtcagaccagatgtgcccggaccttttgtaggacatgctatctgtggtagaaattttgagcgtggtatgtcttgagttcagttagacagtccagaggatctttgatacttatttaaaaaccttagaaagctaatttaagctgggctgggagcagtggctcatgcttgttatcctagcagtctgggagggtgaggtgggtggatcacgaggtcaggagttcaagacyagcctggccaagatggtgaaatcctgtctctattaaaaatacaaaaataaaagatacaaaaagccgggtatgatggcgcgtgcctgctcagctactcaggaggctgaggcaggagaattgtttgaacctgggaggcggaggttgcagtgagccgagactgcaccactgtactccatcctgggcgacagagcaagggtccgtctcaaaaaaaagctaacttaagctgggcacagtggcatgctcctatggtcccaggtactcgggaggctgaggcaggaggatagcttaagcccagaaattcaraccagtatgggtaacatagtaagacccatctcaaaaaaataaataaataaaaaataaagctaaaaagcgaactttaatatttctgacctgttttttactcctgtaaaatgagagtgatactttcttctctcactggtttgaagggaaaagttagcttttgtaaagcatatgtataagaaaattatctaaaagcacaagggttagtctatatgttgracatttctttgctgataaaaacctaaggtttggactcttagtgagcaaaatacaagtatcatattaatatgctttagtcgatttgctctgatttgtggtaatatataggccatattattgcatagttgacctttaccttacagtcatcatctttcatccgttgaaagaaaatgggaaaaaatggaatttaacctattaaattaatttttcatttaatttgtcaacagagtccttcagccaaaccaaggacagaatgcacctgttcataggctacttagtagacaagggtaagaatgccacacacgggtattgaaaactacggaaaccaagattagatttsagagggaaaaataaatctagtgttctttatgtaaaggataatggtttttcaatgggattttttttctttmtagcattgggaaagatattttaaagttttgtcttcaaatgtaaccctcttggtgtactgttgtgtattctaattactgtcttaagttgggatgtttttacttttcatttcataccattttactcataaagtattttaaatatccatatagtaaattcagcatcaccgaagtgattctccaacagagtatgactcgtgcttatagtctcctgctgaagccagagtttagctttccttactgtgcgcatgcatgagacttcagttcttttcaagcttatttgtgctttggacagttgatgcaatgtgattgctttctttgaattttgaacatttagaccttaatgccagtgacttattaatttttttatattcaattagaacccctaagacatcagtgaagggggttgtgcaaaatagacagaagccttcacagagcagagtgcctaacagagtgcctgtttcaggtttgtagaaaataaattcctgaagcccattcaatagaaggaagtgcacaagctgccccataactcaggccatagaagtggaatagattgtctttccttgccaccataattttggcatattcacagtcatcttattagtgttctttggtcttagcattgtatggcagtcaggaagtcttagtaaaagtgtgattccagtcttcatttctataatatttctgtggaaagcaccttgtatttttcattctgaaaaaattgtagaatttgccatgcttaattcagaaaacctttttatttaatgaataaaagataacgatcatctctggtgctaagtctgtgcattgtctgttcagcttggggaagtgtatctgcacataaggggataaactttctccctcagactataagatcacatgtgaatatgccagtgggaggagggcttcatattttgctcagtccaaagcttgagctaaatctctccttatgttcattatttgaggattaagagctaaactaaaaactgtattttaaaattctgtttatggtggcaagaagacaaactcattcttgagcaaattcaaagctcttaaccaaatgctttaatattttttaggtatctttgttaagacactttgattaagctcacttaaaaattatgtgatccatttaaaaatactttccaaatgttgtgctttaactatactgctttctagacatttacaacaaacctaaattaatcaccaggcattgaagattaaacctttaatcaattttaatctttccattaatatacaattaggcaaattttagagctttattactaagtgatttccttcaaattaggagggaacaagctattggtcgtaactttgaaatgatggctgaccttttgtatgtatgtagtgaaggtaattcatagtgtcacacatatataggataatttaaaagatcatctttggaaatcattgtgagtgacagttaatggaattgtcttaaaggattacatagctgaagatactgtttactccagaggcagtcagaataagctagtttgaaagataaccatttgaaaggactcagaccaaacaccaaacctgtggaattttaagacattttctgtttttctcatgttagtattctatattgcactgaaacttagcaagttggaaaatcattgaggaattagtattgttttgcctgataccaatttgccacagtgactactctccatgttcttttctcatgcatttcatctccactatttgtcacttgtgaacttataagcaaaatagcaagtactgtttttattcagcaatactcaacagtataaaggatgtatagtcagtcactgaagttagtaacatacaatgaagttcattattttgaactattgaggttaaattgcattgcaacatacttattaatacaaatgaacttaacccttgaattaatatgtatctaaacaagtacaaaagtctgttgctgttgttttctaaagatttacttatacatgagtgcatatttagacaattgaaagaaactaaataattgtgttctttttttttttttgagacagagtctygttctgttgcccaggctggagtgcattggtgtgatcttggctcactgcaatctccacctcctgggttcaagccattcttctgcctgagcctcccaagtagctggaattacaggcgcgtgccaccatgcccagctaatttattgtatttttagtagagatggggttttaccatattggccaggctagtctcgaacgcctgacctcaggtgatccgcccacctcggcttcccagagctctgggattacaggtgtaagccaccgcgtccagccagaattgtattcttttatataaactgagagtttgggatattggctggttaaaatgctaactatgaatctgaacacaggaactcactgtcgctcttgaaaagattactctttcctgcttagagttttaatggtctgaattatgttttaaacaaatttgaaattatgttctgatttgctctaaatggaggcaaatcctttgttaagcaatttatagaaaactaacttttcttatgatagaatatcatactcttagactgaagtagaattctaaaatgttaaagtatgctgcaaagcatttagttatttatagttttacaaacctaaattgcaatctctgatgttatcgtaagtgatctttgacttacggttttaaaacacatttcttcatttgatgttttgtgcttgactagagtttatatagtgaaattcagaaaccactaatcaaagcagagtaggaggtggtcatgcaaaatggttaagtaaaataacacatcaggtggacttgggttatcagagttcttccttctagctctgttccttaggcaactgctctcctatgcctcagttttattatccttaaaatggtcataacaatttctacctcaggatgattcatataaggattaaatatgataatgtatattgcctagctcagtgtttgttccagagtaaaaactcattaaatggtatcattatagaaaacctcccattgagaagtaatactggttttgctctatttttaggagtatatgcaggaaaaatccaaagaaagcggccaaatgttgcgacaatttaagaagacaacattcattaggataaaatggggggaaggattattattcatgttattttccctrcccaagactttatttaaccctggactccgtttacacagacaaagtgacatcagaaggctgagcacttatctggatcatttggtcagtttggtaattcctgctccacacccctattttcctcttaataatacgtttgggtgaagacaaattagtgtttagtaattgcatcatctctgtgcttacctatacaaacataagtttattttatatgcccagatgtctacagagaccctttttgtaaatgtcaaggacatttggatttacttttacagaatattgaaaagataagacaaattataaataagttctaaaacataaatttaattcatctctgcatagtgatttttgaatttgattcaaagggaaattattgcagaagaatgcctttccctcattttataactttaaaaacttggattaaccactcaatgtccactttctttgacttacagtataaccatgnagccaattgtggcccactaaaatctacagaagttaatgtgggtcaccattttggtcagaagcatacattcctgtcagacaactagttgtctgacagaaatgttaggcttcatgtatgttaccccagtactgttagaaacatttgtactaggttataagatctttctgtgacaggtaacaaatttggggaagacagcacaatcttcttgaatgtagctcttgggaatgcattattacatccatttctgtaacataataatatgttgcatgcagttatattttctatttagtctgtatattttgttcttcatagtctgttttttctagcatgcttgatttaggagagaataaagggctatataataataaatccagatttccggataagaatattgcctggttaaaattctgcattgcttaaagacacccatgtttaagatttttcatcactaacrtatccattaaaagtatcaactggccaggcagggtggctcacgcctgtactcccagcattttgtgaggccaaggtgggtggatcacctgaggtcaggagtttgagaccagcctgaccaaacatggcgaaaccccrtctgtactgaaaatacaaaaattaggcatggtggtgcatgcctgtagttccagctacttgggaggctgagacaggcgaattgcttgaacctgggaggcagaggttgcagtgagctgagactgtgccattgcactccagtcgggttaacagagcaagacactgtctcaaaaaaaaaaaaaaaaaaagtatcaaccaacaaatgttaccaagataacgtgacttcatgagggagaatgtcactattaatttatcataccatttccaaaaagggctttgtgcttttcacataaaattgagacagtgtatatttaatctaatttaaattttaaagagatactggtattttgaaaatgcaacctatatatattcttaatatccttttaagaatatggagatgaagattgttttctccaattttctgtgccattttaaatttaactttgacatccagctatagacagaaataataagccaccctgggtgtaaacttgattttctttattgagatgtatcatgtattgaatgagtgaaccagaaaattagaagatggtcaaaaaaagtccaagttaccaattttttaaaatttataggcaaagtatcaaattgtcttcttaatatgataaactgtgctttatcattctgaaaactcaggatacagcttattcatagcattgtgggtctctccagtaagaaagatgctaaaagttttgtgcactttttgtgtgtgtaatgcaaattagttaaaacaaatagttttggagaaagttaaaactagctttagagtaaggatgagaaacttgagtgtttttaatttaaagataaaagcctgtgttttacacattcttttttggtgttcatagcttcttcycatacaggtgccagacactgtttgtgcttttgatggatttttatttatatactttttttgcttatttttactttgagtggaatgttcattaatgtaaattgtatttatttttatacttttattttcactagttttgcttctaggcaaaaagcaaaataaacttttcatcttaaagaaaatctagtttgattgtttttatttaccaggggaaggactattaagaaataggccgggcatggtggctcatgcctgtaattctagcactttgggaggccaaggtgggtggatcatgagatcaggagtttgagatcagcctggctaacatggtgaaaccccgtctctactaaaaatacaaaattagctgggcgtagtggtgcatgcctgtagttccagctacttgggaggctgaagcaggagaatcgcctgagcctgggatggggaggctatagtgagccgagattgtgccactgcactgcagcctgggtgacagagcaagactccatctcaaaacaaaacaaaaaagaaaccgatattagccaggcatggtggttcacatctgtagtcctaggtacgctggaggctgaggcaggaggatcacttgaacccaggagttacaggtggcagtgagctataatcgcaccactgcactccagcctgaatgagactttgtctccaaaacaaaaaagaaaaaagaaacagatattgaaaagtattaggccaaaacaaatattgtatataatcattctttacaagttccatgaaagatatatctcattatttaatatgtcccctgggccaggtgcagtggctcacgcctgtaatcccaacactttgggaggccaaggcgggaggatcacctgaggtcaggagtttgagaccagcctggccaacatagtgaaaccccgtctctactaaaagttggacttttcagaaggtaaaactcaggctggaaatgtcttaacttattaagagatagaagcctgctaagggaaggagagggagaaaagagaatgcgaaggttgaagctcacatcaaagctgttaatttgcacaactttaagaatcctcctcttgttactgcctaatcatgcagtgtgagcctaggaaaaggctcctcaccttgacctcttattgagatgttgcatgtgataacatgcatggctgtatgggaagagctccttgctttcccgtggccaccctttaacccttgttcacttccagtgttgggaatagcaggtacgagtggatatactttcctactcatactgagctgaacactggagggcccgttctggagatgatccttttccctgtcataggtcaccatctcatgaacaaccacagaccaccacccccgaatgaaaagtaagagttataaaaacatcgaatgctttctctctaagggaccataatggatatctaagtaagttataaaagtaataattaaaaaaaaaatttttttttgagatggagtttcgctcttgtagcccaggctggagtgcaatggcgcaatctcggctcactgcaacctcctcctcccgggttggagcaattctcctgcctcagcctcccgagtagctgggattacaggcgcccgccaccatacccaactagtttttgtattttttagtagagacggggtttcaccatgttggccaggctggtcccgaactcctgacatcaggtgaaccacccacctcggcctcccgaagttctgggatcataggcctgagccaccgctcccggcctaaaataatttttaaaaacgttctgtggtcgaaatggatatccaccttcctagaaacactgctttgccaagttggacgaaatgcgaaccctaatttccccacgtgcattagctgtagtcaatcatattagatctagggcagccctcggttgctagtcgtgggaagggcattctgcaagtgcctaaaaccgcccgcaaagcagtgggtaaagcagcggcctagagggggcatggctgtcccacgccaaacagcgtattagccgcaaaaccaggtactggctgaacctcagtttgcgtcttcgctccgccgccttctggagtcctttctgcccctagaggacgcaggtgagctaagcagcagtcatgccctttaccatcatgacgcccgcaggcgggaccacccggcactgtagacagctgccctttacaatcatgactcatagaaactacggcactctggccgtggccgacgttgctcctccgaagcatggcgccggcgggagttgtaacccgggctgtccggagcggggagctgcccctcacaagcatggcgtcagctgaaaatgaagcctgtgctgtgcggagcgtcgcctgcccctcacaagcatggcgtctgcagaaggtgctgtgcggccgctgcggggcggccagctgcccttcacaaacatggcggccgaggggtgcggggagtggcggggtaaggatgggaagccgagcagacggccccagaacaagcggtcatgtgactgggaagatggccgtctttccttggtaaggaagcagcggcgggtgggctttggagaggggctgtccttacttgtgatggggtcggcctgggtctgagagtgtgaattcctctctgtcgggttctggtggtcgaccggccacccccaagttgtcttgaccgtagaatccctggccgctaccgcggtccagcggagcaatctgaagccagactggcgggttcttggttctctccccgtctgctgcctctctgcgccttccacgggcccctgtccattcattccctaaagaaaacttgagtttccaggcttccgcgtccccagaagttggcgcgggttctggggtcgctggatgagggtaatggtggactcagcttttaaagtctggacgagtcgggagatctggctgttggtcagtttcctcagctcctctgttcacctggagacttgcttttctcatctgtaaaatggccgccattcatcctatcctaggcacagccctcagacttattccttggcctcaaggagctgacagtataatggggcagacgcacagtagagggatgtctaaagaaggcattcggatgaggcaccaagaagggagtgattatccccaccagggggctaggggaaggcttcagagaggaggagttaaattgggtcttggaggatgaataggagtccaccatagggagggcgtggcgtgtgcctggttggcaggcccgtaggtcccttgtggttggagtagctaggaatgagtgactgaagcttcagggttcagcaggtggtatgtgtgtgagtgaagaacttgaggaagttgtgttgttgatgatagtgggatttggggacggggaatctctcctgcatctcagaaagcgagataatttactttctcttcaaatgatgtgaagtagcttagattaaatgagcaaatgaaagaccttagaaataatcaggtacaaccttctgcttttgagcttgataaacacttcattttgtcttattcctttcatttgcccaacacttaagagactgcttccttgacacgctacatcagcattgaatgcctctgagcacttccacaccctgaggtttttttttttttttcagttaatagtcatgctggctgggtatggtggctcacgcctgtaatcccagcactttgggaggccgaggctggcggatcacctgaggtcaggggttcgagaccagcctggccaacatggcgaaacctaatctctactaaaaatacaaaaattagctgggctaaattagtggtggcacgcacctgtaatcccagctacttgggagggtgaggcaggagagtcgcttgaacctgggaggcggaagctggagtgaaccgagatcatgccactgcactccagcctgggcaacagtgagactctgtctcaaaaaaataataataaaaaatgaaaaagtcatgctggcttgaccaaaaagctaaccaaaaacatgagaaacatttgacttcagtggatttatctgaagtttgcaatcagaaaatccaggaagatgctgtcttaatctctgcatcccagtacatttctacctttggaattttaattttatattacaagcaggcaaacaggtgccataacgcttttagtatttagggtctctatagttcctaatatggccgtgctctaaatattttgttgttgttgtttttgttgagacggagtctcgcccaggcttgattgcagtggcgtgatcttggctcaccgcaacctccgcctcccggctcaagtgattctttgcctcactctcccgagtagctgggattacaggcgatgccaccacaccaggctaatttttgtatttttagtagagacggtgtttcatcatgttggccaggctggtctcgaactcctgaccttaagtgatccgccgacctcgggttcccaaagtgctgggattacaggcgtgagctaccacacccggcccgtgctctgaacatttccttttgaagtatgcattcatctttcagtttccctaatagacttcttgctccttaaaagttaaaaggactggctgggcgcggtcactcatgcctgtaatcccagcactttgggaggccgaggcaggcggaccacctgaggtcaggagttccaagaccagcctgcccaacgtggtgaaagcccgtctccacaaaaatacaaaaagtagccaggcatgacggcaggttcctgtaatcccagctacttaggaggctgaagtgggagaatcgcttgatcccgggagaatcacttgatcccaggaggcggaggttgcagtgagccaagatcgtgccattgcactccagcctgagctactaagcgagactccgtctcaaaaaaaaaaagttaaagggactgagttttgtccatctttgtatgtggagcctagaacataatggtgagtgctgaataatatttatgaatgaatgaggaaactgaggaggactgcagaggagaaatgagtttctgtcattaaatttacatttatcaagtccttattttctgtcagacatcactcgtaaagtgcgtaacatgtaacatcattaggttcttataacaaccccatgttgcggaggaagaaatagaggcagagagatgaagcagtttacttaaattagccccacaagggatagctgaggtttggaagccagaggctatgatagtaatcatcctcatcagctggacttcaaatctatatcctgggctgaggtttctggcttgcggggttccccaaatcccactgccttgtcatgggtctccccaggaatgcctctttttacccacagtttttgctatccctgctatattttggcctggctaggagatgagatgtcctgtataccctagatcacattttccgtttaatcctgtggttatagcacacttggaaataccaccctttggaccgggcaaggtggttcatgcctctaatcccagcactttgggaggctgaggcgggtggatcacttgatgtccggagttcaagaccagcctgaccaacatagtgaaaccctgtctctactagaaaaaaaaaaaaattcctcaggcgtggtgacgggtgcctgcagtcccagctagtccagaggctgaggcaggagaattgcttgaacccaggaggcagaggttgcagtgagctgagatcgcgccactgcactccagcctggatgacacagtgagactccgtctcaaaaaaaaaaaaaaacaacccttggagtcagaatctctacatcattttaagagttttttttttatgtgtagcggtgaagggggctgggtaatattgtgattgtggaagaaaaagctgtgtggtccgattatgtgattagtaaccaaaaacttatttgagaattaaaatagttgagcaaagcatttagtggattttggtgtttccagtataaggagattaatttggttaatcatagtgggatttctgtgtatccatattatcagaggtaaataatttaaaaataggccattgtcaacctttaatgtgcatataaaccacctgaggatttagttaaaatgcagatctgattctgtaggcctggggtatttcagcccgcccaggtgatgtcattgctggtgatctgtgaaccacattttgaatagccaagggctaagcccagccaatagtggaggtgtgaaatggtggccttttttcctgtggcaggtgc

SEQ ID NO: 98027 - DNA, 16905 bp, Homo sapiens
ggtcaacgagaggttcgacgtagccaccaggtgatcccccagtgcaccccaaccctgctgctctcccaatcttcccttagttccttgatcctctaaagctaggacttcccacaaactccagcctcctaggacacccacaaagctatctcccttgcctcctagatccctaaacctgaaatcccttggaatggtccctctgaagcagcttccttgtaataagagctttccattataatgaagtcactgagccaaactgtaatatcactctcatttcacagcctcccccgttacttctgggtccctaaccgaattctggacagtgaggtcaggagagcatttggccactttcatcagggccgtggaccggtcagtgtgatggttagggtaatggctgtggattagagggtcatgtgggccagggacatcgtggagggaggaacctctgtgaggtcagtgtgggggcaagggtagcgtggagctaggcatttctcccacaatgaccctcttctgccccatgtgaagcgcttgtcctggcatcaccctgggggcagtgatcttctccgctgtggaggcttctatacagccagtgaccctaacaaggaggatatcaggtgagggaggcttgatgagaagaatcaagggttaggtgctcagggtagactccttatttcctgactccctcccctccagagcagtggagttgatgctccaggctgggcattcagatgttgtcctggtagacactatggatgagctgcccagccttgcagatgtccaacttgcccacctgaggctgagggccctctgcctgcctggtgagaataacctttgacccctaaccctcaccctcacccctaggtctgctgagcctaacctggtttaccctttgcttgctgtagatgagtagctctttagtccaatgagcccgttttcttttcttttcttttttcttgagacggagtctcggctgggcatggtggctcacgcttgtaatcccaccactatgggaggccgaggtgggcagatcacttgagggcaggagttcaagaccaacctggccaacatggtgaaaccccgtttctactaaaaatacacacacacacaaaattagctgggtgtggtggccgatgcctgtaatcccagctacttggaaggctgaggcacgagaatcgcttgaacccaggaggcgggtgaactgagaatgtgccattgcattccagcctgggcgacaagagtgaaacttgtcttaaaaaaaaaaaaaaaaggcagatgagacggagtctccctctgtggcccaggctggagtgcagtggcgtgatctcggctcactgcaacctccaactcccatgttcaagcgattctcctgcctcagcctcctgagtagctgggattacaggcgcctgccaccatgcctggctaatttttgtatttttagtagagacgaggtttcaccatgttccccgtgttagactaggctggtctcaaactcctcagatgatccacccaccaaggcctcctaaagcgctgggattacaggcacaagccgtcgtgcccggccagtgagactgttttctactcacctcccacctctcccacctctcccacagactcactggtttcctgtcttcttgaccccaatttattctttaaacagctttattgagacataatgtacataccataaaatttacccttcactgaagtatacaattcagtgagttttattatatttacaatgttgtacaaccatcaccacagtttaattttagaaaccatcctggccatttacaattacttttcattcctgttcttaacccagcaggctatcaacctgaatcctgaatcctgagttctaatctcttgcccttctgatctttctaccctctatcagattcatctgtagctgaggataaatggctttcagccctggaaggaacacgatggctggactatgtcaggtactccctcgcttcttctagccatcatttataattcaaccttcctcaaccttctgttaacttggggtcctaaatggcctttctttagttcttctcctcggtttcccaagaagactgccattttctgctctttagaaggaggaggggtaggatttggagtcggccttattccatcccatgacccatcaaaatcactccattcccctaggcttatcattcttcctccctcttcctcacctgctcctccagggcttgtcttcgaaaggccagtgacatttcagtattagtgacatccagggttcgttctgtaatacttcaaggtgagttccttggttaagcccattccattccttgcctcttttctttacccacctgaccagattgcattcagggagggagacccataaggcttcttcctctcctgttcctgggaactacctgcgagctctactctcatccttcagtgctacctctgcctccccatcacaacttgtggtccctgacactaggatggtcttagcccctttgttcctttccttccatcagcggatggagactggggttggggtgggaagggcagtgtggaagctggtttgagaattgtgattctgccccttacatgtgaaactgggtatttctatccgggtggagtccaggaagtgaatcattcaaggtctttgttttctcttcacttctatgtgctttctcaatcctcctaccccaaacctttcccctctgtgcctctcacttctccttgccgtatttctcttctcattctcttctgccctagtttcttggacccctcttctttgtcccttcttcctctttatcacccagagcgcggtgatcgtgatctcaatggcctcctctcttcactcgtccagctgctttcagcccccgaagcccgaacactgtttggcttccaatcactagtacagcgagagtgggtggcagctggacatcccttcctgactcggcttgggggaactggggccagtgaagaggtgagaatgattcgggatggcatcgggggcatattactaaggaagtaagagaatgagaaattattttgtataatccattggaggtgaatccggtcagaagggccccgaggttaggctgggacgaagatcctgatgagtgaggccttacaagcccctgctaccctcaattcagattttcattccctgacttccataagttccccctattccctgtgttccccattcccttatcatctcgtcatcctccctctttgggtcccaataatcccttccaacctcttaatttcttttcaggctccggtgtttctcctcttccttgattgtgtctggcagctcctccagcagtttccagctgattttgaattctctgagtttttccttcttgctcttcatgacagtgtcagggttcctgacacccttaccttcctgagaaataccccctgggagcgcggaaagcagagcggacaggtcagtgacttctatttttgactcgtgtttttttttccattgagatgtactctctgaagtttggtcttgatttgttttatgagaagtgaggtctgtgagtggggagggggagatttattctcattttcaggacgagacttttgccctacatctttcctagaataagaggtgagaatctcatgatttgtctctagatgtgggaggattgtgtgtaaccatcctttttcttgcttcctctgtccagttaaactcctatacacaagtctacaccccaggatactcccagcctccagctgggaactcttttaacctgcagctgtctgtctgggactgggatttacgttatagcaatgcacagatactacaattccagaatcctggctatgacccagaacactgtccagattcctggctccctagaccacaggtgaagtgtctaaacttcctaaattcccttgacgttcccacaggctcatgctactagacagtgagaagtgaaagacaaaatgtcttgagttccttagggaaagctactccactactcttctgcagctgtcacttatagtccctgggtgtccctaggaagacagaagacctagaatagcacagagggcaccctttttgtccttcctcaagtctgtttactcatcttcctgtctcgtgcacacataaggtgccctaaaatcaaccttaatcagtcccgaggcctagttgaagcctaatgaggagggtagaagagttctcatggggaggcttgtagttctagtcaccagtgcagtgagtgggtggcagcaggacaccctgtcctgatccagattggggaaactagggttatctggtctctctgttgccagttgattttcttttccttttagccaagcttcatggttcctggaccccccagttctgtgtggctcttctctagaggagcattgacccccctgaatcagctctgtccttggcgggacagtccttccctgctggcagtctcttctcgttggctccctcgacctgctatctcctctgaaagcctggctgaccaggaatggggtctcccctcacattggggagcttgccctttacctccagggctgctgctgcctgggtatctgggaccccagatcaggctctggagacgctgctacctgaggggaaggcctgaggtccaggtaagaagggaaaatagactgggagtgggacaagggacttgactctgctgaaccagatgaacaggagctggaaaggcaaggagctgaagcctctgggagtctgggaagtgaagttctactcctcttggcatcaaacaaggtttgggagtgtaggaggtgcgggaaagtgcttgtggcttagattaagtggaatttagggcatagctgaaaggggaaacagaattaaagacaccagaagtagcagagaagcagggggccagagctacaacagtattcttctctgttcctctttgcctcctccccagatgggcctctcagctcccacaatctctggcctccaggatgagctatcccatcttcaggagttattacggaaatggacaccaagaatatctcctgaggatcactccaagaaaagagatccacataccattctcaatcccactgaaattgctggcattctcaaaggcagggcagagggggatctggggtagaggagggttctgtctaatcttttttttttttttttgtatctgcacttgcagcctcagctttcacacttcagcccttaagttcactaagaaggtctgagtttctgctgcagatagtggtgttaactgctccaactcttgtcttgcttagtttctacaaatatttttgcttcttgtcatttgaaggattaagaaacaaaaacaatccagaaattgatcggtttttttaggccaatcccatcccttctggataaccagatgttaaatcatgagatcagagatgctgttcatcagtcccaacaagatggcctagaaatcgcattctcacctcgccttgctgctgctttaattccaagttctatttcttcccttatagttttctatgggaatgaggcggatacaggaaacaccctatctcctctgtatttttgtagtggaatttctatttaaggggctcattaaagcatagtatttatacacattgctggcattgtttcttgtgtttgaataaaggattctcctaggtaggaaagtggtgggtaaaaggggtgtatgacccaagagaggaaggcatccaccatattattgctaaggaaataggggaactgggtttggtgaggctctgcaaaattcaagtgcaatttggggaaagggttctcttgtgtgtgtctcccatttagaggcagatggggccagagtgttctagagatccagactctagagctccgatcccatccacccctcagctgtggtcacacaccaacgcggagcagccctcaccctccccatgcaattaggacgaggtgagcgcagacgtcactctaagctcagacatttcgcagtctcctcccctgagggaaaaccaaatacctccagcccaaatcagggttgtgaggccaaatctgcaagaaggctgcaggcgagagggaaggctccctctgcgcctgaaagcccccaagtcctcgggttggggggaactcttcagcacatccttctctggacaacagaagaagaatcactgtccacaaaatatattaaaactgaaatttttgttcttttagctttcgaatttacacttttgagagcagtgtgattctttcaagtctagcagtgcattaagagggcctgagcgtttccgttccgccctcctcgctaagacaactagcagcggcacctcaggacgcgagccgaggactctaccgcccgacccaggttaagtttcggaggctcctaagatggctgcagccgcttccaggcacctcctcttccgcggccccgcccaccgctacgtccgtcttcgccccggaagtggaagtcgtgctgaggtcagaaggcggaaccgctgctgggagacggcgggatctctttcgccatggctgccgggccgatctccgagcggaatcagggtaactggagggggaaagtctggaatgggctcagcgtggctaggaggccccgactacagccagcagtgtctctgcaggggtgggagactggactcctcccttccccagagggcgcgagaccggccctctgcctgttgggggcggggtggccgggtgctggctgaggcctctgggtgtgatacttaagtccggtcccctgctgacttctcactcaaaaaatcaaaaaaacccactcacaatactaaattagacttcagaggattcccgaagtcctgggaagagagaagtttaagggtttaaacttttttttttgctccygtcccctaccgcggtccccagttcccctggttgggttccatcttcatgtttccatcacttccttccttcccgttacactctcacgcttgctctttttgctccctcccttcaagatgccactgtgtacgtggggggcctggatgagaaggttagtgaaccgctgctgtgggaactgtttctccaggctggaccagtagtcaacacccacatgccaaaggatagagtcactggccagcaccaaggtgagtacatgacaaggggcgaattgctcccggagggtcccagcagtattcacaactgttttggaataacatgagcaacctaaagatttttttcttttaagcctctcttcagtttatttctggaaccattcttaagtaaagtgatgttgtttctttcttgttctttgtgattagagggtagatgaattttaccccattttcagtctctttacttacgttgttaacctcctcttctccacttttccaggctatggctttgtggaattcttgagtgaggaagatgctgactatgccattaagatcatgaacatgatcaaactctatgggaagccaatacgggtgaacaaagcatcagctcacaacaaaaacctggatgtaggggccaacattttcattgggaacctggaccctgagattgatgagaagttgctttatgatactttcagcgcctttggggtcatcttacaaacccccaaaattatgcgggaccctgacacaggcaactccaaaggttatgcctttattaattttgcttcatttgatgcttcggatgcagcaattgaagccatgaatgggcagtacctctgtaaccgtcctatcaccgtatcttatgccttcaagaaggactccaagggtgagcgccatggctcagcagccgaacgacttctggcagctcagaacccgctctcccaggctgatcgccctcatcagctgtttgcagatgcacctcctccaccctctgctcccaatcctgtggtatcatcattggggtctgggcttcctccaccaggtaaagcttttggttaaaatatgtttgtcttaaggttgggggagagggtcaggaggaagaagaaaacaagtctgaaagggggacaggggacattgagtcagtgagttgatgggaagaggactgaggggtgatggtagtggtgaagaaraaagttgttgggtttctttaggagggtgaagttggttgacttttctaacattgcttttgattttagagcactgggaggagggggaaagagctcaccctgcctggagaggccagatcaggacaggctctttaaagacattttctcctcactaccattaactcttcctttttccatttcctctataggcatgcctcctcctggctccttcccacccccagtgccacctcctggagccctcccacctgggatacccccagccatgcccccaccacctatgcctcctggggctgcaggacatggccccccatcggcaggaaccccaggggcaggacatcctggtcatggacactcacatcctcacccattcccaccgggtgggatgccccatccaggtaggtgtgctttgttgggaaagggagggaagagcttggtagagcatctctgttaccactcaccctgctgccctttgttcctcaacagtaacagtttcagagttttcctttccttcagacattctattataaaaacatacaaaatgctctctaacatctaccaccctgaatccatttcttaagtttttctgacaagtagactctacttgccagtttttatttctttaatctttagttccattctcttctctgactccacctcaaagtggtgacctaattgccaaatctcggggacgcttctgctccttatctagtttgacctctgatatacttgaaactagttgtgtcctcctgtttgaaattcttgtctctttttgcttttgcttttctagatcctccacccctctctctgacttcttaatctcagctaccgtgatagactcatgtctacttgtgcctagatttttgtgcttgtttctcttttctgcatatatctatagttttaattgggtatatactgatgcctcctaggtctgtatctctagtccgtagctgttgatattccagatccttgatgctgctgcttaatagatagcgtcatttttctatccctctccttcaaatccattcttcttctagtgttcttttttttcaggtgcttaattcatgaatctgagagctatgtttgactgctccctatcaccccactcttaataccaagtcttatttgtatcagtggcatctctccccatggccagtgccctagttcagtctctcattgcctcattattttacacttaatttgttgtagtaatctcttgccactttgactccagttttccctaactttgatctactttcacagtgtaggtcttttaagacacagatgtgcacacacttgctcagaattcctctgttgctccctttgacctacagagtaaaacccaaactcattaccatagcattcacagctctttatgatctggcccctgcccctcatttctataactgcattttgctcctgattactgagttaactggcatttcctggaacatactgtgctgtttgccacacctgtgacttgcacatggtaatctttctgcttggatgctttcttcccatgatcttatcctcctgaagtattcatcctttagaattagatctttgcttagacagttatgtcctctgctactttctcaaatcctatcaacagagttattactccacttgttatatacttcatcattactattacagtacctaaatcatggaagaagcaagcaaatagggtaaggagttgattgagtaattggttgattggttggtttgtgctgttggaatagggtcaaggatagggagcactttttaccacccttctttttttatttttattttttggtgatggggtctcactctgtcatccaggctggagtgcagtggcgtagttttggctcactgtagccttgacgtcccaggcccaagtgatcctcccacctcagcctcctgagtagctgggaatagaggcacacaccaccatgcctggctaattaaaagtattttttgatagagctggggtctcactatgttgcccaggctgttcttgaactcctgggctcaagtgatccacctaggcctcccaaagtgctgggattattggcatgagccactgtgcccagccagccttattttctatacccttttttctatatagttctctttctgatgtcactttctttctaattttgttttcttcctttctctattttctttgcctccttctctttgtctcttttcttcttgtgtctattttattttcatagggatgtctcagatgcagcttgcacaccatggccctcatggcttaggacatccccacgctggacccccaggctctgggggccagccaccgccccgaccaccacctggaatgcctcatcctggacctcctccaatgggcatgcccccccgagggcctccattcggatctcccatgggtaagtcggctctagccacctccctcatctgcacttatcatgttcttacagcttcctgtaggcacaccccttgtcccgtgcccttactaacttttcttttactctttgcaggtcacccaggtcctatgcctccgcatggtatgcgtggacctcctccactgatgcccccccatggatacactggccctccacgacccccaccctatggctaccagcgggggcctctccctccacccagacccactccccggccaccagttccccctcgaggcccacttcgaggccctctccctcagtaaattcacattttccttcctcctgttacattttcccaatatcttttctattccttggaccaatcagagatgctgtagctccttggggcaaaggtactaatccctttcagcacccccactccattcccctttttaatgtaactttttccacaggaggtatttcttttttatgttggtcctgagtattttgcaaatgcacagagaaaataaaactaaactccttgtttatttgtggtgttttccttgacaacagtaacttttctctttttcttttaagaagagatgtcagtatcatgaaaagaatggtaaggtaggagtaggagcaagggtgcttactccacattttaaaggcttattctgtaatgtgctgttgcagttgctgagctttgctgtgcactagagtaattgtttccttacgtagagcttatcttctagtttggaagatagggacccaatatatatagcataggatcgtcattttttttgtttcttttttttatttggagacacggtcttgctctgttgcctaggctggggtgcagtggcacgatcatggctcactgcagccccaacctcccaggctcaggtgattctcccaccacagcctcccaagtagctgggaccacaggtgtgtgccaccacacccagctaatttttgtattttttgtagaggtgagatttcggcatattgcccagactggttttgaactcctgggctcaagcgatcacccctgcctcagcctcccaaagtgctgggattacagacgtgagccacctcacccagccggactattgttttaaagtgaacagatgtatctggagatagtctggcaaaaatgaagtaacatgcactatgcaattcattgcagcactgttataatggcagtagattggaaactcacatctccatcagtaaagggacggttgaataaactgataaattcatgcagcagagtactgtgcagctgtaaaaaggaatgtaaaaaaagctttaaaaaggatctccaagtgaagatctctacgtactgctgtggagagatctccaagtgaagaaaataatgtgtgtagtgtgctaccttctctaagggtagcatatatatatatatatgtattaacgtttttaaaaatgggtaaaccagctactcaggaggctgaggcaggagaatcacttgaacctgggaggcggaggctgcagtgagccgagatcacgccattgcactccagcctgggcgacagagcgagactctgtctcaaaaaaaaaaaaaaaaaaaaaggataaaccaaatactaatggaaattgataacactggggagggagtggatattgagggaagctggattctctgagtatactgtgttaatgtgtttttcatttggaacaatatagatgtcttacataattacaaaacaaaatgagtaaatggagacagtaaatgttccatacgtgttccattttgttctgttcctacagatgtctgtaaacagtcatctcagataaggagtttgtatttcaattttttttctcatttctcagtccttccaaacttgattttcatcacgtgtaaatctcagtttaaagacttttcagtagaccaaatccaatggcctttttctcccccatgttctttgccacattaatcctgttaagtcaccccttccttgaagtgccctctggcttatgtaactgtgaactttactaaattctaggcaagaagtgagcatggcccccttgttctcgtccatcattctcattaacatttttatggtacctgcaaaggatgtctgttggtggcagctgaggattcaaagataagcaaggcagttctgctgtcaaaactgacacataagagattgttaatgaaacaaaatattttgagagcaggaagaaagttacctattctggcatgaaagtccaggaaaacggccaggcacagtggctcacgcctgtaagcccagcactttgggaggctgaggcgggcagaccacctgaggtcaggagttcgagaccagcctgggcaacatggtgaaactccgtctctactagaaataccaaaaattagccaggtgcagtggtgggcgcctgtaatcccagctactcaggaggctgagacaggagaatcgcttaaatctggtaggtggaggttgcagtgagccgagatcaagccattgcactccagcctgggcaacaagagcgaaactgtcccccacctcccaccttaaaaaaagaaaagtccaggaaaacttcctgggaaaaaggtgatacctgcatttaatcttcaaggaaggatagacctttcccaggcaaggagaaattcaatccaggtggatgggatgtttctgaggagaaacagattgataaatagcatggtgtataatgcactagagctgtttgggattggaggcaggctgaggtcagagccagttagggagctcccaaaaaccatttttcagccctttttcacatcatggcagggaaccatttgaaacaaaattgaggtaaggggaggcagctgcttcagcctggaggctgttggctcggaaattctagctgccccagtttgatatgcttattagatgttcgtgtggtgatattgaatagacagagattttgagtctgggcttgatgggaaggtctggactgcagatataaatgggaatcatcagcatataggcagtattaaagtcgggactgcctgtggtgagcaagaagagagtagaaggcttcccgcccctgggactgagcccataggaactctaaaattaaatggccccagcaaaggggactacaaaggagtggttggtgggacagggcactggcacctgggggaaaatgatgaggtcttccctcagaacttgaaaatatatacagtcatttgtgtattctcaagggattggttccaggaccctccacagataatcaaaattcacaaatgctcaaatctcttatataaaatggcacatttgcatataacctaggcacatcctccagtgtgttttaaatcatctctagattacttgtgacacctaatgcagtgtaaatactatgcaagtagttgttatactgtattgtttaggaaataaatgtcaagaggagaatgtctatacatgttcagtacaaatgcaaccatcataggcctaactacattttccatccacagttggttgaatccatggatgccaaacccatggatatggaggactgatggtataagttttcactctaaaagtatgcaagatttctattttagcaaataaggtatcagtggagagtaggcaaagtcaccttaaagggaagaaatggctccctgctggccaaatgctctcctgctggacttggctataacctaattgaaaatgttaacatatttggctgggtgcggtggctcacgcctgtaatcccagcactttgggaggccaaggcgggcggatcatgagatcaggagattgagaccatcctggctaacacggtgaaaccccgtctctactaaaaatacaaaaaaattagccaggcgtggtggcaggcgcctgtagtcccagctacttgggagactgaggcaggagaatggtgtgaacccaggaggcagagcttgcagtgagccgagatcacgccactgcactccagcctgggcgacagagcgagactccgtctcaaaaaaaaaaaaaaaaaaagaaaatgttaacatatttaaataaagaatattgtcaacctggctgtgtgtggtggctcatgcctgtaatcccagcactttgggaggcagaggtgagtggatcacttgaggtccggagttcgagagcagcctggccaacacggtgaaaccctgtctccattaacaatacaaaagttagccaggcgcagtggctcacgcctgtaatcccagcactttgggaggctgaggcgggcggatcacaaggtcaggagatcgagaccatcctggctaacacagtgaaaccccgtctctcctaaaaatacaaaaaattagccgggtgtggtggcgggcacctgtagtcccagctactcgggaggctgaggcaggagaatggcatgaacccgggaggcggagcttgcagtgagccgagattgtgccactgcactccagcctgggcgacggagcaagactctgtctcaaaaaaaaaaaaaaaagttaactgggtgtggtggctcgtgcctgtagtcccagctactgggaaggctgaggcaggagaatcacttgaacaccggaggtggaggttacagtgagctgagattgcgccactgcactccagcctgggcgacagagtgagactctgtctcaaaaaaaaaaaaaaaaagaaaaagaatgtgtgttaacctgaagacgggtcagcaatgaaagtctagtaaagggagagtccctgaggccagtccaagcaccatcctggaaagccgtcacattcagagtagtccaggagtgctggcaaggctgccaatagcaaagaggtgggggtagaagattgttgccaagaagagttttctggacccattggcatggctgcttattgcagatggccagatgccattaaagatacaaatcctccagtaatgtcattgtgcatttatacattgacattatgattctgatttggcttcagggagagaatgtactagacatgtagatatgagttttcagtctgagtgacagttaaatatttatgataaattaatatttatgtattatggctttatatttcagaagattgtgaactttgttggcatgaatgattatttccaagatccagctttggagtctgcaaagcccaggcccgtgtccctgtcagaggtaaattcaacctggcaaatgttacctgtgtggtctcttcggacatagcctgtcagccttctccatgtatatatatcagcattctgaagcctccacatttagtaaggcagaatcacacgctattagatctgagagggacctgatgcagtatctagtccaagccccccttttccagatgagaaacctgaagttcacagatgtggagaacttgaccaagagttgacagcttgttagcagtgagaacccaggtccaagcccaggtcagtgctgtctggaaggtcctgaccttatctggcatagacacattcaggatgtatttccccaaatcaccatattccctctcactccttcggcagggatggtcatcaagtgtcaccaagtggcatgtcttggatctctgagtccaggttattgatgcaagagcaaaggaaagatgaagggaaaagctgaaacaatttacttcttcctgcccgggaagtacaagtgtgtggaggggaggggagggaggtagaggagagtaagagaaaatggagaagggtattgagaggatcctttttgagtcattggagcaaattaatggaaggggaactgtccggttggtcaggtctgtaaaaatccctcaacttccccagtacttctgctaccaccaactgaatggacaggatgaggaggtgtccactgtaaataagtaacctggactgttttgtgaggaaagagatggaaggaatccaggggtctctgactctggcagttcaggatagaaaccacaccttgttatctctgctttctctaaaatgtccaggtaaacttggaataggagcactctggatttgggagactgttgtgaaaaaggagtttgagagcagtggagaaggcaagggaggtgttttgaaggcagcaaaagcccctgaaattattgggtcctgccatactgagactggggtgctaaggaaggggctgccacattccccatctccctgtcttcccacttgtcttcctaacatcactgtttttttctttagttccttctatcttttactaggaagggcctgggaagggctgggtgccatttccagctgttcttgtgacaacctccggccctttcatcatttctccccgtgccctgactccctccccatcctcttttctcctctccccaccaatggtctctcccgatgctcagtggcgcggggtaggggggggcggaggcggggctggagtggtggaaggggggtggcaggtctgcattgccgcttccctggtgccgggagcagtcgccgctgccgcctccgcccgcggccgggacccccgtcctcgcccgggactccttacccggggaacctagaccaggtgagacccctttctcagtcgctcacctcctccccgcccctggcagaagcatctttgccttgccttgcagccattttatcct

SEQ ID NO: 98028 - DNA, 81872 bp, Homo sapiens
tcccagctccttgttcagcaacatcacattggtagcatgaacttatcagtggtagaaatatttgcaccatgaaaattagtaactgctggctgggcatggtggcttactcctgtaatctcagcactttgggaggccaaggcgggtggatcacctgaggtcaggagttcaagaccagcctggtcaacatggtgaaaccccgtgtctactaaaaatacaaaattagccaggcgtggtggtgggtgcctctaatcccagctactcaggaggctggggcaggagaagtttgaacccgggaggcagaggttgcagtgagccaggattgtgccactgcactccagccttggcgacaaaagcgagactctgtctcaaaaaaaaaaaaaaaaaaagaaaagaaaagagaaagaaaattagtaaatgttacaaatcagggctttttcaccctggagaaccggttgttaatatttactagcacaccactggtggtcaaggaagtagaacacaaatgtagaaatggaaatgtagaaatggagttaagaccaggctgggttccctcttacaaaggagattaaggaattttcagtttatccattgacactgaggtattgttgatgacattttactcgttgggattattttggttacaagcaatagaaagactaaatttgaaatggctcaaaaaataagaaagatgcatttatcccatataacaagaatttcaagttggaccactctgggataggttaattcagcagggcaccaaagacccagattcttttaatatttttgctctgtcatcctcagtatgtcagtctggcctctgaccagcacaacatttccaaatccaacaactttcagcagcagaggaaaataatttattctttcttttcatctctttgtaagagcaaagaagactttcccaaaagcctccagcggattttctcacatctcgaattggtcagaactctatcacatgcctagatcaagcactggcaaggggaagggagccccatgatccattagtgtttcacccgtgttcctcccactcagcccccgccccctctactgaggccaatctcccctgaagccatgtacagcaggctggttacttgaacctaatcaaggttctataggcatggaggaagaaggaggatggacattggttaagcaaccaacatgtttgctagagtttttgaaaagagagaaaacatccatgaaataatttaggaagtggccgggcatggtggctcacacttgtaatgtcagcactttgggctcacgcttgtaatctcagcactttgggatgccgaggagggtggatcacttgaggtcaggagttcaagaccatcctggccaacatctctactaaaagtacaaaaattagccacgcgtggtgtcacgtgcctgtaatcccaggtactctggaggctgaggcacgagaattgcttgaacccgggaggtggaggttgcagtgagccgagattgcaccactgcactccagcctgggtgacagagccagactccatctcaaaaaaaaacaaaaaaaaaaaaaaaagagaaagaaaaaaaagaatttaggaaccataatcttagcactggtgtgcaagcagatagagggcctgggattagggaggctcagctatactattacaagatactaaatatgaaataataatctaccaaagcaatgctttcatttgccaaatggctgccaattcattcattcattcattcacttaatagatatttaataaatgactgtcgtgggtcagatactatgctaggtactatacacaaaatggtaaacttagctaatggagtgtcagaatctgatgggtgaagtaaatatcaatcaaataatccacaagtaaatgtaaatgtttaacctggttaaatgttatcaagaaaccctggattttttttttaattgaggcaaaattcacatatagtgatcttaagtatacaatttgatgtctgtgtgtaacagccatccttatcaagacacagaacattctcatcacctcagaaagttccctcatgtcccttcctatttgatcttcacctccctctaataggtaaccacagttctgatttttatcttcaagattacgttcgcctgttcctgaatttcacataaatggctttttttgcaccacaaatgagtccaagattcattcatattgttgtgtttaatgatcatttgttttttaaatttgtactccattgtaagaacaatataagtaattttctgttggtgaacatttaaaatgttctagtttggagctattatgaataaagctatagtgaacattcacgtataagttttttgtgtacacatatatttcatttctattgggtaaattcctagggagtggaattactaggttttagggtaggaatgtgtttaacattatgaaacttcccctcatacagctttttttttttttttttgagacactttctctctgtcacccaggctggagtgcagtggtgcaatcatggttccctgagcctcgatctcccagactcaagtgatcctcccaccttagcctccctagtagctgggaccacaggcatgcaccaccatgcctgactaattttttttttatttttgtagaaatgggatctccttatattgcccaggctggtctcaaactcctgtgctcaagccattctcctgccttggcctcccaaagtgctgggatttcaggcaggatccaccatgcctggctgagccctatatatatatatatattttttttttttttttttttgagacagagtctcactctgttgcccggctggagtgcagtggcgcgatctcgtctcactgcaagctccgcctcccgagttcacgtcattctcctgcttcagcctcccaagtagctgggactacaggcgcccgccacctcgcctggctaattttttgtagttttagtagagacagggtttcaccgggttagccaggatggtctcaatctcctgacctcatgatccgcctgcctcagcctcccaaagtgctggtattacaagcgtgagccactgctcccagccgagccctagatatttttttaaaaaatatggattcatggtcttcagttccaagaaagaattctgcgtcagtctgaggttcctaggcatgtataatatgtagtttttaaaaactccccagaaccaatggtctaaattatattggtggcggtggaaaggaagttattttggtttggttttcttttccaccacaaaagcatataaatgtaaatagtttttttccctgcctagctacaacctttctctgaacattttccccaactctagccattagccccagtattgaaatagtctctctttttagtttctctggtgaaatgcaaagctctggtttttctgctcttgcttaaagtgatgtaaaagctcagggagctccttgaagcagcccttagaattgctaagacgagtaaacaaaaacagatctctagggtggaaaagaactttggacagaatagcagttgagggtgtgtggccctgtgtacaccggtaggattttgtctggtgcttttaccttttttcccttactattctacctagcagcaagaaatagtcaactgtgttctggctgctgccaatgtctacattaaacagctgcctctgagcatccaacctagtgccagcctaaatggctgcatatcactagagaagaagcctctagtttctacgcagagaaactgagacacaggaatgggaagggagtcacttaatggattagggactggttgagctgggaccagaacccaggtggcctggctcccagcccagctgaccacactgctacccacacagcctgggctgaccaaagacaagcagcccattgagcaactgcacaaacaacaatgaatgatggatggtcagagcaagaaataggcacaaagcaactgtgaccccatcacttcctggcccctaaatttccaggcaagcctataaagtgtggtcacttaaatgactttgaccagcaacttggcccagctttcaaatctggagaccttctatggtcactgccaaaagaaaaagtcttatattgagggtagagtgcctttgagctccacgcctggttctattaagtctgtggcagtggcgttaagattagaaagacatatttatatgggtataacctggttctggacagctgtggtgaaacaaggcaactttcagattttgaggctcctcttctacagatctgtgctcccatctcagatttaactagcaaagggtaggtgtggtcagtgattgttgtcacaatcattccagaatgtttgtgtagagttactagaatttcagtcttttcattctaaagtattttcatccctctcacctttctagaacgacacccttttcagctcctttccaacggctgtagccaactgattctaccccagagtcccaagcgtccacccccgtacccttccagttcagttcagttagagttcagttagagtcaatttaggtgaccaaatctcatcctgctctcctccttaaatttaccactaaacggtagctaaaatttgtggtcccttatacgcttgaagcccacgccaaatgactttacttgtcaacctctattgtatgtcttggatatgcccccatgcaaggcactctgacttgtttggccttagcatgtgtggacagccttgggcccagccctaaattttcgattgtaaacccaggtgtatccctaagagatatagctgtctaggaagtttccctgtttcaggtgtcagtttcctattctgagctagacaattctaaaatgcctatgccccacgcctcccctttagaaactgaggaagaagtgaggggaaagaaaagttgactagagtatttgtttttacataggcataatgggcacaattaggcaatacattattttgaatatgcagaccaggtgctataatgttaggaatctgaattaaaatttcaaatgtcttttgttagagtatagccggggttggcatcgttttgtgtttgtcataaagaggtatttactaaatggcctttctttcttgaaacagtccacacaggcctaatacttattcattcattcaacaaatatggaaggtctactatgtgacaaggatggcttattatgttctcatagccatagctcattgtcactcaggtaggacacatacaagttctgctacatataatatagttttatgtattttactaaattgtaaaacctttgatgtctgggattatgtcttgttaatttttgtatccccctgtatcactgagagcagtgatacacatcacagggatacaatacatatttgaattatgccataatgttttaaaagacataacaaacgcactagaagacataacaaacgcactatgtaagttttttttactgttagcagtctaaagcagatgtatcaacagggtatcactgttatgcaagtaaataaatattaagtgtttacagagaaggatatgttcacttcaagagtgaaggaacaagagaaatatataattgggtggagactggtgtggaagaagctaatcttcctccggtcactccagaatgattgtgtagagttactagaatgtcagtcttttcattctgaagtattttcatctctctcacctttctacaactactccacccctttcagctccttcccaacggctgtagccaactgattctaccccagagtcctaagagtccaccctgtactcctccaactcctgttcaagaatgctccagaccaggagctttagggactcgggtcgggaaaacacggggtcacgcgcggggcaagcgccaaactggccgcagcctggggagcggcgctaaaggcggggctgcgacggggcggagcgggaggaggcccgggggcggcctgggtgtcaccaccaacccgctccggccggaaactggcgcctgtttccggccggacagcagaaagccaccgatcctgaaccagccgccggagccggagtggcgaccgggtgcggagygggcaaaaagccactgggggaggccagtcccgatcagtcctttctggctccagctccagatcccgtgcggagcaacagctgcggtcgcagtctccaccaccgcctccacctccatcgccgtcgggggaggggccggccggaccccggggtcactgccgaggaatgaagagaggcggccgggccccgcgctccgccccggcctagggccttgccccgggagcccgcgagggtaacggagccccccgtcctgacaccgtcccccgtctgctcccgcccctcccggcttctcagactcgcaaactctgctcctcagatcgccactgtcccctttctcctttctgaatctgtttcacccgaagccatctcccctcggcactcctttctcgccctgactgctccttgcttcgtcccgatctttcctcctccctttcacctgcgtcctgcgttcctaccccgcgctctccagctcccggcctcccttcctgagctgtgctggccagtttggacggtccccccttgtcagctagactttcgggagggatggtggagttttaaggtgattaagatgcagtgtattatccccacagtaggataaagttcatttaaaatctcaatataatactaaaatgaaaagcaaataagcttattcttcctattgatagccaaactaaggtgcatacagtaatggaggaaaggcgagaaaaaggtgtgtgtgtgtgtttgtgtgtgtgtgtgagagagggagagagacggaggttgacggattctagggcagtcttaagaactttagaaaaaagaaaagttgccatgagccgatggaaactttagaagctgatgatgagtaagccgggggctgcgtgatctcactcttctcataattactaggttaacggtgtggctccggtcgggatggaatgggatttgtttactgggccggcgtatttttagcttgtcggctcacaaggaccagcgctcagagtctctttctccccgctcgtggtagtctttcttgtctaacctaggtggcttctctgggcacaataaagatgtaaaaatttgaaattagaaactgactggtggaattttatggaagaagttccccacaaacttttcaggcagcttttcacgaatgcaaagcctagaattagcaggacgttgacttttattttccttatctttttatacgtactacgtaacgctttgcttagaaattcacatgctgctaatttttcagtctttggcctctagtactgtatatttaggagatttttgaggaggctggatccctttgtctttcagaatctatttcaaaggtggaaaaggacagagtagagaaagaggtggcggtaagactggctccaaagagttgctaacccctaaatatttaaaaaagtttctatgctatgtaacttctgaaaacatgtagaaaattttcttcctactaaatgagattgcattcctgatggggagaagacttcagggacggaagctgggtggctagggagaatcagaggtagttaaatatttgctgtgtataacttacaaatacattatgcgcaaacaatgaagaattaattatacgctttgtcttcattgtttttcaagtagttcttttaacgttcagtaaccaacctgctgtgctagtctattgatattttgaaggctgaacaaaactgtaaaataaatgaacttgatgttgctcctctgcaggctgaatacccccgaccgttctaatttccactattgacccagcttgcctcagagcacctccctgacaaagtggccagttactatgtacttagagattgcaaatcaatgcaaatattagctcatactaggaataattaagaaggtaaatatgctgaaaacatatattccaaaaccaaaatagattttttcgattttaccctcatttttgattatcaccacctttctgccaataattatccgttaacatgaataatttagaattgaacagatatctgctttggacattacactttcaagatagaaggaaagatggaaggaagatagtgccaaactaattttttattgtcattgccttatttgacttattccttgcttttaatactgaagactccctcggaaaaaaatgtaaaactttgccaaagcaagagctggctatctactgacttgtataaggcccggtgactggtaatgaatgctaatcattaggtggcctttagtggccttatgttgccaacaacttggaaaatttcccaaagctttatttgtttaatctttcttttgagacccctatttaaaaaacgacttaatttggagacgaaaatctaatttttaaaaaccacatacacctttcccagaatctgttgatgatcaataattgttttgatctgtgtgagttgattggtgccaatattagtgatgatatctgggtaaattctatttatatctgcatctagcaactccctaagttgaactgcatactttattccagggcatggggatcaaaggggttgaagaagcctaggaatgagtggagagctgcctggtagtccaccactattcctagttctcaggaggctttatttgcaattttgagattcaatgtatgtaaccaaaataagtattctgattgttatgagggcactaagtgccacttgtcaaagttttggagctcctgagtatcttaagcatgctaaaagacactggccattatagtgtgggtgtatgtgtgtatgagtagcactctccttaccctaaacactcatcccaccaaagggaaaatccttaaacagcgctttgaaatgtgacctcagcagtatctttcctatgggaacttaggagctgtggaatagcagactgtggaatcttttttgtagcctctgataaattcaggtaattaaaaatttgtgtaactggaagatagatacagggcagtttttctcatgaatgcctgaattcagttgactttttaatataatagaagagagttgtttgtttgtttttaaataagacatccttgctgagtaatgattgaacacttctctggataaagcagtctccatgctccagtgacaggctttagggaggtataaaagatgtaaagacatgtgtctttgctcttggggttgagggtggatgggaaaggtggtgtataaatatgggaaggcagactattatgagctttaacatttaggaaacaacatatagacaaaagcaaatttaacgtgctgataagtatgtaagggctgagaagacttaaagtaacaaagtaagaatcagtgaaataaattggggagatttctgagtcagtaaattttgaaatggacttgggaggctatggatgagtcataaagaggtatgggctattgagttagatgggtcttcgttcagaccttgcggctattttttaccatgtgaccttggacaagttaacttcttttccttatctgtaaaatgtgagcattcaagtaaatgaaatagttactgtgttgggaataaaagaaaagaaaggatcttccaaacagaaagtatagaatgtacagtgtgcaatgatgatatgaatgactaagttgtgagtggggggaatatatgagagtgactgtagagaatgtgggttgggcaagtcatgagtagagcaggcaagagggtggaggggactcagaagccagactctgttgggtgttgatagaagggtcaatagaatcattgtaggtccttgaacaaaggacggatttaatgagaaatattgagccctttggttcaggaactcagggacaaggaatcaggcaggcatccgtacattgtgactcttattttctgtaccatcctaacctgaagggatacagccaggaggcataagattccttgtagaagtttttgtgtttacacaccttactatgctgagcctgcttgttcctgtctcgtagtgcaccaacctgtggggaagtctcaagactatggccggattctcctcaagagcttatagtaaggacagcattatgtttcaagtgcatttaactctcagttgtctctgctaatgtagggagcactgttgtaggtaattcagaacttaacaaagacatttcctggttattttcaactgtgttttttttaggattataccttatccctttatttcctctaagaaatagttttagataagaaaaattactaaactgttatttgtagtgacccactatgagtttaattctttgctaggtgctatggaggtttaggaaaaatgacaactttgctcccagactgaagtacagtggcgcaatctcagcttactgcaagctctgcctcccaggttcatgccattgtcctgcctcagcctcccgagtagctgggactacaggcgcccaccaccacgcccggttaattttttgtatttttagtagagacggggtttcaccgtgttagccaggatggtcttgatctcctgacctcgtgatccgcctgactcggcctcccaaagtgctgggattacaggcgtgagccagtgtgccgggccgaaaatacattattttttaaactagatttattttcatttttggggatcatactaatattgaaataaatttgcatttctaagcttatattacctgatggtggggagagtacactgatgatgaagaacagtcattcttgcattaaagatttggccttagaaatccgtaaaatgaataatccatttgtagataattaagactagactacactgaatatgttgatagaccaatttcttttcaaaatctgtatggatccaatgtggcctcctaggctgtctgtcttatgtctgagaatgactggcaggtgatgcttgtgttccagccagaatgagccttcattcacagtatctggacgaatgccactacattatgttgtgttgttgaagattaagccggctttctcaaaggacttgtgctttgtagaggctcttccagatatcagcttcattgaaaatctgtcagacttttcctcctgtaggaaagttgtttgaaagtatgtccaattaaaaaaaaaaaggaatgggcagaagtgtccacatttaagaagtaaacaaaatcacatgccattctttcatcccttttttttcttctccagttgacttgcttttctccatccctgccactctcccccacctctttataatcattaccaaactgatgtcacgagcacaggattattatttacttcttgagtcaggagattgtagtatttctgagctagaaatcaggtggaaaagtcaggaatcttattttatacaactagatagggattattttcaactgtgctttttttaggattataccttagccctttatttcctctaagaaatagctgtagataagaaaattactaaactgttatttgtagtgacccactatgagtttaattctttgctaggtgctatggaggattaggaaaaatgacaactttgtgtccttgaagagtttacagtccagttgggagtaagaagaataaaaaggaatgaatacttgctgagcctcttaatatgccacacaaaattttaaaatgtgaaactatattgttagttgcatagtgcagacctcataccgtaggtatttggggagaggagtactcaggtagttatgtcacagaggaattataactcatttcagatcttaataaaaaaataggccaggcacagtggctcacgcctgtaatcccagctactcaggaggctgaggcaggagaatcacttgaacccaggagatggaggttgcaaacagccgagatagcaccactgcactccagcctgggtgacagagcaagactctgtctccaaaataaataaaaaaataaatgaataagtgttattgtattaggtacaagggatgaagatgaagaggataacaaaacatttcatattggagctgaaagggatcaagcgaaagcctggaaacaggactatacctgagatgttcttggggcggtgaggagactaacctgagtggcagtgagcagtagtgaaatgaaggtgggtaggttggtttggagctatgtttatagagggtgttaaaaagctaggcttataagtttatatatatatataaaatttatttatttatttatttatgtatttatttatttatttttttgagacagggtcttgctctgttgtccagctcaggctggagtgcagtgacacaatcttggctgactgcaacctccgcctcctgggttcaagtgattctcgtgcctcagcctcctgagtagctgggattacaggcgtgcaccagcatgcccagctaatttttgtatttttagtagagacaggatttcaccatgttggccaggctggtctcaaactcctgacctcaagtgatccgcccaccttagcttcccaaagtgctgggatgacaggcatgagccaccgtgcccggtcaactttatattttaaatggtagaagatttttgaatagaatagcagtatgatgatactaatacacaggttggctgggagggaatggagattgacactgggggtgtgtgaagtgatgaggcccgagttagagttgtggagggtaggctaaggagaggaaagagtgaaaaagagactgtgaaggaaaaatggaaattaatgaggggtggatgtgggagatgaagaagggtgatgagtcaactacaactgtgacacgttgtgcctgggtgtctgagacattgagtgaaataaagaagttaggaagctttcctcattttggggaaatatgatgagtataatttgcgatgtgttggatttaaagtggcaatgaaatgtccaaatgaaggctgtcctgggtgtgagctggagtaaagatgggggtaggtttggaaatgcagttttgcaattcatggcctagatgtggtagctgtagccaagagaattaataagctctctgaggactaaagtttagggaaagagcagaagggcaaagaaaatggtactgataaacctaaacacgtctaaacctaaacatgtctcctatcttgtaaacaccatcctaggcactgagatggaggtaagggagacaaggaacccacgaggagcgtatgggtctagtgggaggagacagatatgtaaatatatagatagaatgaagtgtgatagatgctgtgatagaagtatgcagcagggagagtgggagcccaagggtcagttctgccttgggcatgctgaggttggaaagagcctccctgaggagttagcatttgagctgagtcttgaaagatgaattaaggatatactctacagatgacaagaattacattccagtctgagaaaataccatgaacaaaagcttaaaggaatgaaggccagacttcttcaggtaacttttacttaatcattatggctggaggatgggatggagggcaggctgaagaggtaggcaacgctggatcatacagagttttatcttttttttttttttttttgagacagagtcttgctctgtcacccaggctggagtgcagtggcacaatctcagctcactgcaagctccgcctcccgggttcacgccattctcctgcctcagcctcccgagttgctgggactacaggcgcccgccaccatgcccggctaattttttgtatttttagtggaggcggggtttcaccatgttagccaggatggtcttgatctcctgacctcgcgatccgcccgcctcggcctcccaaagtgctgggattacaggcgagagccaccacgcccggcctggagctttatcttatactgcagtatatcaggagccatttaatacgtttcacatcctagaaagattatgtcagtggtgtgtagggtggattggagatggagaaagcagaattcctttcaataacttcattatactgaacacatttattgagagtgatcatatttacagattcatggaatcagacaactggcggggctgcgatgctttcttagttttcctcattcattttcmaatagaatacctgaggtttactcaggatcacagaagtggttctgtgatagcttagtctagaattcagtcttcagcatgtactaggtgattaataaaggtgaattcacctctctcttctctcccaagtcccatttcagtgtttgtgtcattctgccacattgcattgtactagcagatagaaggacttaacatcattccattctaccgtctttttttaaccagtccaaagtgaatagaggtattttcctaggtctgactgagaaagatgttccctgagagtaccattgggaagaggggcagttcggtgccctggactgggctgaatgaggtgttaggatttttcagctgtagtgattcagatgtagaagaatgtcaaggtatttgttttgttgcatgtctttatctctgccactaagctccctttaagttgttttcttttaaacttagttttatttgtgccactgaaacttgttaaataagctatgataaattgggcactgattaaaagtatatttatctaaaaaaaaaaagaatatctaaacaaaatttagaaaagttcagggaaaaaacccaaacagaaacaattttgagcctacatcccaaatttgatggacattaacattttgtcatatttgttttagatgtcttactctctttaaaatattaaatactcagattctgcatcttccctgtattttcattttcattggatttttgtggagggaaattgtttggttttaaagtgctaagtgagagtttggattttgtgttttagtcacttttgctggaggagaacagaacagggtagagggcatcctctaagtccttagattcccctgggagaaattgggacttaaggacgtgtggaaggatggataccttccattgataggccttcctcaaaacttgtctgagttgtgatttttaaattcttttctctgggctctgtcagcatcttccccagagaagggccttggtttggaagctgtccacttaagcagagctgccaagtcttaattctttctcaagtgggcaagggtacattttgtttttgtttgtgagtatttgggagaaggaaggggtgggtagaaaggaggcacagaatagctactcacagtgagtacttatctgaattcctgtgtaactggaagctttcttggctgttttaggggagataacttggttacactagcatttaaattatgtgggaaggtggtttttcactcccctctgctatctgatttgagatggcaataaaccttcttgtccatttttgtcagtcctcactctaccctgttctaagcgctgctgtttgagggatgtgaaggctcctcttcagtctaaaactgaacaagtcagatatctccttatagttttgggaaaccattctgctcctgactgtttttgtgttgactcctctattcatcaaatcacctggccctttattaattttacaattttgcataatgagatatttcaaacatttagaaaagttcaggggaaaaactcaggcaattttgagtctacaaccccaacttgatggacattaacattttgtcatatttgttagatgtcttactccctttaaaatattaaatgttatagatatagctgaagttccaccctgcatcctttcctccttcctctttctcaagaaatgactactggcctgaattgatgtgttcattccttcatgttttatacttcctctgccccgccacatctttatttatttatttatttattatttatttatttttgagatggagtcttgctctgtcacccaggctggagtgcagtggcacgatctctgctcactgcaacctctgcctcccgggttcaagcgattctcttgcctcagcctcccgagcagctgggattacaggtgcgtgccacagtgcccaggtaatttttgtatttttagtagagacggagttttgccctattgaccaggctggtcttgaactcctgacctcaagtgatctgcccacattggcctcctaaagtgctgggattacaggcatgagccaccatgcctggtcccacatatgtattcataggcaacatacagttttgttttgaaattttacataaataggatcatgtatgtatccttttgtaactttttttctcaacattgcttttcagatgtgtctacaggtagatctagttcattcagtcacctaaattttaaacctgttttctccattgccctccccacttgtcctgtttttttgtttgtttgttttttgttttctttttttaagacagggtcttgctccgtcacccaggctggagtgcagtggtgccatctttgctcactgcaatatctacctccagcgttcaagtgattgtcctgcctcagcctcccaagtagctgggactacaggtgcgcgctaccacacccggctaatttttgtattttttagtagagacagggtttcctaatgttagccaggctggtctcgaactcctgaccccaagtgatctgcctgcctcagtctcccaaagtgttggattacaggcgtgagccaccatgcccagctcccacttgccctgttttgttttgttttgtttttaaacttacccattcttaaagtcccagtgtaaactatctcttccacaaaaacgttcctgattttcttttttctccagcaggatataatctttcccacaactggcttagaattctttataagccttttatattaactaatcaaagttgtatccaggctacactctacagatacctacttagagaatattatagatagaatgcagctttgaaagtgccagtgctgtgttctaaaatagttctttgaaaagtcagggtcattttaaatgagttagtctactagtgccttttgaatcattaacagctaacatcaaaagaaaaggaagagcgaattcctctgaggctttagtgttaattaatattgatatttacatgaaggtagtcgcatgtgaagaattaagacacgacagtgggaaaatacaatgatgctaactaacaaaaatgtagtttgtttatttatttattagggacagggtctcactatgttgcccaggctggtcttgaactcctgggctcaagccatcctcctacctcagccttgtgagtagctgggactataggtgtgtgccaccatgcctagctccaacaaaaatatattttagaaacttatctcctcttatgtgttccattgtgagcatctgcttttgcctcccttgaactggtagctcacctggctaagtatgaaaccatcaatttcctgaaaatttctatcagttctaagggacaggattctctgacatgaacaatacttggtccctgttgtttactgacatgaatagagactttccataccccttcttagaactctgaaaatagaatttgagagttagacttaagagtttctgtgtcctagcttctttgcttgcctaaaataaattcctggctatttggcacaaggtgtcctgtcattttaacaactttaagttccttctttctcacatctttgtaattttgtataatatactagttcattatgaaaattgagatttaaatcatctgtgcaaatttcccttgatgtttgctgcttgattgaaactacaaattcctttccaccgaacacttggctgtgcactggaatctggggacaatgcactaaggagatgccaaggaggagttacccagtaaataaataagcaggaggagaactggccccttgggaatttatattctgggttacataggacatggttacatacagataaatgcatataaagaaaaaaaatgtgagaaacaaatacaggctatgtagcagtatatctaatatcatatagcattttagaactgaaaagagatttacatattgtcattttctaggtgaggaaaatgagacccagaaaatttaaatgacttgtctaaggtagtagttactgtcaacagtttattggatatctgttctctgaaaagttaggcttccagtatattatagaaacagtcaaagtcattaagaactcactaattatttgtgaacactgaatatttgcataaatagataaatagtaatacaagtccaaggtactaagtaccaagtgaggagtacagttacatagctatatagaagtttaaagggaatagatagggaaaagttttacctttatggtaatctagaccttagagaagagagaaatatagcggggaaacattcaaggtggagaaccagtgagctgagctcaccttgttttgggggcaggaaaagtagtttgtagcacagtgttttacctaggagggcaataagatcagtaaagttagtaaagttagagagttagataaattggagtgagacttaaatctcagccaaaggaatttggtttttatacttatactgaaaaatctctgagtagggaattgtattgtatgaattagtattttaggaaaactgattcagccttgtggtataaaatagaggaaaggataccagttagaggactgttataatagtccaggaaaaagactgtctacaagggtaatggtaatgcagaaagggggagagatttgagtaatttgaagagagataaggggaatttggtaactgattatcgtgaaaaaggttaggtaagaatgatcacacattttcagtctgggtaatagcaataaggagagctgggtttggtgggtttctgatgcctctccgaagtggggtaccttggtagacagctttgaaaggtactgagtctggctcagcattctcagtggatactgaattcagggtttaagtaactggtttatgtttgcatgcctagtaagtagtaggacttggtgtgtatcgtccgttcttttgattgttgtttagtgctctttctactagatcacattgcttgagaagagatgggtcaagtggttaaaaacagaacaatgcctggaaaacaaaatgggaagttgaagaccacattatggtgaggtttaaccacaagctgtttcagttccgtatgggttttccttatatttagacacaaaatgtgtgtacttagtctatcaggctcttaatgcaatagtggcctgggtttcttagagctatcttctgagattcaattcgtcatattcaaggggaaagatttctttagattttggatttaagtgcatagtctctctgactcccaatttgaagatacaattagtgtccccccactctccctgcaagaaggtaggcttgcttgagttgaaagctgtgggtgaagtagcctcaaaggcccattagtcttttttttagtaaaaggaagagagctttagacccaaatctttgagacttatttaccctgtcagcagttaaaaacaatttactgacatagatcttattacctgaaagggagagtaaatactataaatcaattgagtatttttgctaataggagattttttacagcgttgaatagccttagatcttttgtatttgcttttaaaatacatagtcaggcatatttaagatgtgactcgttcctaccccttttcttgttttcttcttttgccagacttttatctatgtgataacagatacttgaggattgaaaatacaattttctgaatcagctaacacttgttatgcacctaccgtaagggactggcactgttatttaatttcgtctgccaagactaaatattctcggattttttgactaggaactcagctgcttcctggaactcagctccttgctgtcacagttttaagcatttttaaatgttttctgctaggtaatgctcacaagaaatccttgtgcctgttattaagcttctaactccagaataagcaccagtcatcctaggtatggcccatgatgatagtaataaacatcttctaatgcttggcttcttccatgcttatcctatcttattcgtggccacagctcgtctgtcataacttctgacctggctggagaataaagggaagaaaactttactctttagtagcaagatcctagcctgagttatactaaacattttatataacacctcatttatactcatagcaatgccataaaatagatactgttatgcaaccttacagattaattcattcaaagtatgtattagtgtgatttaggcactgtttaaggtcctgaggatgctatagtgaatgtcagatgaagtatctgctaagcaatagagacgttaaataatttacccaaggtcacaaatcaagaaagtaacaggtaggatttagatatagctctaacggattccaaaaggaatgtctgcaaccattgttacattatgccactgtttacatatattggatgttctctgtgaatatataaaggcataaaaataggtggaaccccagtttttttttgttgttgttgttaaaaatggtcttgatgaatccaagaaagaaatgtgtcttggtgctgaaaagcatacttgcacaataatgcttttcctctcttccccttgcctctcccttctccctctccactcacttgtacctgggtataaactggacagtgtgacctgctttggcatttgaatgagtttgtgctttgagaactaggagaatgttgtttgcttgtttctttttggcttcctgaaagttcgtgcctgcttgcaggttctttcttgtagcacaatggtgagtaatgtgttgttaacattgtaatgtggtcatgcgagttggaattttttttgttttccctcagttctctctgatgagtatgcaggtagggactcttgagtcaaacttgcctgctcaattcattcaaatagaaaaagctytctgtattcagaggactagaaaagagttttgaggttggaaacaataccaagatccaatgtcttttgcccagctgaaattcagttttgttagcattctaggtttattctttagcttgtgctatctaagagaggacttgttttagattacggccactattaccgtgtgccatacctgggatgtgtggtctttactctggagttagcatcttcagaacaggtgcaaggatttattttgagcattatctcgtagaaagcataaaaaaaatgctgaagacttagagcgagtagctgagttccagtaggaattgagttccagttaagttctaaggattaattaggtgggatcaaggttgccagtgttttttttttgttttgttttgtttttttgaggtggaggtttgctttgtcacccaggctggagtgcagtggcacgatcttggctcactgcaacccctgcctcccaggttcaagcgattcccctggctcagccttcctagtagttgggattacaggcacgcactaccatgcctggctaatttttgtatttttagtagagacagggtttccccatgttggccaggctagtctctaactcctgacctcaagtgatccacctgctcagccttccaaagtgctgggattacaggcatgagccactgcgcccggccaaggttgccagtattagaactgtctggtattggaaagctaatcaatttagtattggggatccaggagtatctgggcatagttgatgaggttagcgagatgatttatgtggatgtatctaacccacaagtaatgcatggtacttggattaggtgcacaataaacgttaaatcttcaaaaggtccttgaatgctaaatgttgtcagtttgtctttctagagcagcttctttattgttagtattccttctgtagaagaatatttattaagtatttaactgtgggtaaagcatttgggaaaaagattgaggtaaacaaagatttatagtgtcaaattcttgctgagactgtaatcttaacatttatacactgaatcaattagacctagcatttaaggggataatttacagggaaattttttctgtgatgtttgcattgctagagtcagtccaatgcttttttgatagaaataacttcttgaattgaaaatgcttgctcttcaattccagttaaattgggtttgattagccaggcatggtggcattcgccggtagtcctagctactcaggaggctaaggcaagaggactgcctgagcccaggagtttgaggttacagtgagctatgatcgtgccactgcgctccagcctggttaatagagcaagactcttgtctcttaaaaaaacaaaaaattggggttttttttttttttttttttttgagatggagtcttgctctgtcaccaggctggagtgcagtggtgtgatctcagctcactgcaacctgacctccgcctcccaggttcaagcgattctcctgcctcagcctcccaagtagctgggtttacaggcgcatgccaccacacctacctaatttttgtatttttagtagagacggggtttcaacatgttggccaggatggtctcgatctcttgacctcgtgatccgcccacctcagcctcccaaagtgctgggattataggcgtgagccactgcgcccggctgggttttgtttttgatgtttgagataattgcctatgatatttccttttatcccctcttcatttttttcagtgaatgaggtaataatacatttgaaagtattttatgaactgcaaagttagcacttgttatcaccaccaccactaccaataatagtgttaaaaataataatgggataggactcactcttagaagggttggtttcttggattaatttcaagaaggctcagaacacaatggatgtttaccagatggcttgtgtactaattgataccttttgtagtttttgtggaaaggagaaggaaaaacagaaaccttcactgaaaacttggcctatgtaattgtggtcattgtgaagcattgcccatactacttgtacccactcagtatggggcaagaaagtttaaacaggatttacatgtttgaccctagaggcttagagtacattctattggaagcatctgtctgcacaggaagcaactcatcccagttttggtaagatcaaccacattcctataatacagatattatataatagatattttaaaatgtatcgatgtagatcagtatctgcttgttttcccagattagtaagattaaggaaacagtgcctttgaccaaaatatttggttagatattatcataaaaaaacctttacagtcaatttctgatgattgacattcttggagaggaacacatgactttaataatccaaaggagtaaattgtttaataaatttgtttagtaaattgaaaaagcctctcaccttttaaaatttcctcttcatctttttctgtctctggtctggcacttaataaaccttttgttaagaaagttggctgatatctatcttggggttttctctggaaccagtccattagatgaacttttagaaagcagagataacgacttattggctgatgcatccccttcacttagcagcctgcctggcattaagaatgctttttgaatgattgagtcaggatgttaaggttttcatcaggagagaattgcagtgacctgggcactactgtactgatggtgggccttcctcaggggaagaggaaatattgcctmcctacaaataaacttgaataaatgtgaatgtgagggaagttattgctttgatgctttcaggctgtatactttcttttttttgagacagtctctgttgcccaggctggagtacagtggtgcgatctcagctcattgcagcctccacctccctagttcaagcgatgctcctgcctcagcctcccttgtagctggaattataggcacgtgccaccatgcctggccaatttttgtatttttagtagagatggggtttccccatgttggccagactggtcttgaacccctgacctcaggtgatccacccatcttagcctcccagagtgttgggattacaggcgtgagccaccatgcccggccaacacttttggctaaggagaagtaatacagtatgttaaaagttggtggtttatttctctcttggttttatgttttgtcctgttcaaaatttagctataggccagcccggtggctcacgccagcaatcccagcactttgggagactgaggcgggtggatcacttgaggccaggagtttgagaccagcctggccaacatggccaaaccccgtctttatgatacaaaaattagccaggtgtggtggtgcacacctataatcccagctacttaggaggctgagacatgagaatcacttgaacccgggaggccgagcttgcagtgagccgagattgcactactgcactccagcctgggtgacagagtgagactctgtctaaaaaaaaaaaaaaaaaaaaaaaaaaaaaacacatgcacacaaaacaatttagatatagctgtgatttctggatggtgtatgataagtagcttcaaactatcagtagaagagaaaaattatcctgatgtcacacataatcttgtcctaccctcttgctacaaaatagttataacattagaagaatacttacaaattcagttatacctttagtagtgatgagcaaaacataaatgattatttggttttggcatgacttcatgattttcttattttgagacggagtcttgctgtgtcgccaggctggagtgcagtggcgccatgtcagctcagtgcaacctccgcctcccgggttcaagtggttctcctgcctcagcctcctgagtagctgggactacaggtgtgcaccatgcccagctaatttttgtatttttagtagagatggggtttcaccatgttggctaggatggtctcgatctcttgacctaatgatccgcctgccttggcctcccaaagtgctaagattacaggcatgagccaccgtgccctgccccatgatttactttatagatgatttcctttcctaaatatggcttgcttaagtgattaaatttcctaggtatacatctttttctttggtatacatctgtaggagtaagagatttagctgggtggctggggaaaggcagtttttgtgaataaatccacaaagtagatcccatggaaaattgagggctagtggtacatgtgaagtcaaggaaagattactggaatgggagtaagcagatttatattcggtactcagttttactatagttagctctttgaatttggacaagtcacttaatctcactctcctggttctgtgtgttgtcatctgtaacttgagggtatggaataaaaataatctctgatgttctagttctaaaagtttatgattctaaagtgtcaatcaggaaaacagactgactttctgtacctcaccaccaggtttgttctacataagacccaaatgtgaaatattaattatataaatgaagtatatattctatgttcccaggtaaactagaactatcagattgtgttatatgcttgtaactaattttatgtgcataaataaaagagacttggtttcttctaaaagaaaaattattattataaaaggtacgatcagtagaaatgagagggccaaatagtgcccaggatacactgggttagagtttctgctttttaacaccaacctggaaaatgtgtgtgtgtttgtggggttggtgggaggtggggagggtagtagtggctaggagacaatgtagtgaatatggatattattttaaaaaacaaaatagtaagagttatttagcctgtggggtttgcacatctagactgatctggttttgctataaatccctagaaaactgatatgagccccgcattctaagtccgaatacataggcccaacctctgtgctatctgggtatcatttaagctttgtaaactttttttttttttgcgacggagtttcgctcttgttgcccaggctggagtgcaatggcgcgatctcagctcactgcaacctctgcctcccaggtacaagcgattctcctgtctcagcctcccaagtagctcggattacaagcatgtgccaccatgcctggctaattttttgtatttagtagagacggggtttcactatgttaggctggtcgcaaactcctgacctcaggtgatccacctgcctcggcctcccaaagtgctggaattacaggcatgcgccaccgcacctggcctaagctttgtaaacttttctatgtgtatatgttttccatcagaatagatgggattaaaaacctcaaaaagtatttaatttgaaaaatgtttattatgaggttatttatgaaagtgctttaaaaacaaaaaattataacagagaagctattagtgaacagacagctatacaaatataagttatatttattcatatagacctatttatacatcttgatgggacaaatttgaaaccagtatgtaactcacaagcctattttaggtgtagataactctcaattatccacatatacggactagcatgaatagtttagaaccacaaatatttgctaggcatctactatgtgctaagcaatgtgttaggcctgtttagaatgttttcaagtataaaagaaaggtgcagacttcaagaatcttacttctgtcttgaatgtattcttgtcctccatcctggtgagcttttacacgtccttaaaggcttggctaaaagtttagaagcttccctaacccacctgggtaaactggttgcttctatatctcttcctatcccaatgggcactaataacatgtttatatttctctcatcagatcagagtgccttgaaggtaagactgggatatctccaggccccatggcagtgcctggtagatggtagaccaacttggtaaattttgaatgaatgactgatagtcagattggagagttaaaatgtgagtatcaggaaggtcaactagtatcacaagacagtaaataataacagcagatgccaggtggatgttttgaatactgggcctatagatcaaatgagatttaagtatggctagcaaagatggaactatggaacttaaagatggagaattttaaaaaatgacgatagtaataagaagtatccatcttttaactgaattatataattttataaaagacaaatttccctccctccccccgccccccaccttcttcttcttcttttttttttttaacagggtctcaccctgtcacccaggctggagtgcaatggcactatcatagctcactgcagttttgaatgcctggcctcgattgatcctcttggctcagcctcttgagtagctgggtctacagtgtgtgccaccatgcccagctaatttttgtgggttttttgtttgttttgttttttgtagagatgggtctcactgggactacaggtgtgtgccactgcacctggcccaaatttctaattgttctgaggctttttttttttttttggacagagtctcactctgtcacccaggctggagttcagtggcacgatttcggctcagtgcaaactctgcctcccaggttcaagcaattctcctgcctcagcctcccgagtagctgggattacaggtgcccaccaccacgcctggctaatttttgtatttttagtgaagacagggtttcactgtgttggctaggctggtcttgaactcctgacctcaagtgatctgcccacctcggcctcccaaagtgctgagattacaagtgtgagccaccacgcccggcctgttttgaggctttataagaaattaattagtacttgtatgctgagggaaattaatttaccagaagaaatttatgaagtggattaatttcctgtggataaccaagagtagacagtatagtaatttgaatttttttcttctatttctccccttgaatggaaattctgtaatttatagtgaaatgactaaagaaatcaagaaagggagagaagattgtcagctactgaataaatgtttgagaattgattctagagagatagtgtgttttgctattagcctagtctcttgatttatagtgtttttttctcttgtgtgaaaaattcaatgattagaatctttaataggtcaagtagaacttttgtttttgcaggttattcttttaaaagttgaatttgttgagagcccaaaccttggactatccttggccttagttgaaaggaataaaacagttcattgtgtgttgcaaatagacatgctggtctggatctaaaaaaaataaacattgacatgattcttgtttctatttaagctactattgttgtgccaatattataataacagactttctgtatgactctccctgcccccattttcccaaagattacttcccttttgcaagtcttccaaattattaaatttcccaaataactgtaatttaaggagcctttatcagtagcactgaagagacaaatgccaatttccaagttctctgttcactagtccctgatctttatattaccctttggttattgatgggatttgtctgttggagttttatatcaggcctgctgtttgtaggcctgatacaaaactagaaattcttgaaaaaatagttaaatttttttctgacacacacacatactagtggtagtgatgaagccaccagggactagttcctgagaccttaatgttgtgtatccacaatagcatatgataaacaaataaattgttttgggagtggttatatgattgagttgagatttttttttttattccatgtttgacttagggggagaaagtagacattcccaaagtatatcctgcattagaggtagaaaacaacccagaagtatgcagggtgagtagaaggatatgtaaacatttccttccaataatcaaaaaaatagataatatacatgagattaagagactattacaaaatctttgaacctggaatgagtagaagtagtaagaggtacaggtgggggaggtaggattggtagattaagacattgggattccagtaaatatgtatgaaattgctgttcctggagatttgggaatgaatgagctatgtagctgtgtacatctaggaagggacagacacttttcttttgctgttatttttgagagaccatctggtggaaggtacaactaagggaccccctttagggtattttcttgaaggcttgagttgaaagacactggattggaaatgatgggctgggcactgtgtgtatgtgtcaagactctgttttggaaatggtcgtgggactgaagggtttgtttgggaggggtagaggaagcttttaaaggaaagatacagggagggggctatgttgggcaccagtggagtgagagtgtatggaaatgaattgggcagaaagaaggcaactgacaattgttgaggatttattgtatatcaataagctgccctaaggcttcacgtatgttatttaatcctaacaggagggctgaaatgcatacatttcccccattttatacatgaagaatctgaggcacaaaatggttatattacttacctatgattacacagcccttaaatagtagctctgggattggaaccaagatctgtctgaatccagagccagttctttcttctgatgtggagttgagaggagttgaagcagtgagggtggacttccacatggtggactgcccgtgttttcttagtcctcctccctggacaaaatgtggcattgtatgtgagcgtatgttctctggagtcagctgggctgggttgataaaaatcctgggtctgccacttttacctgtgttgccttgggcatattacctaacctctgtgagctttagtatcttcatctgtgatgtggagtaacaataccaagttctcagagttgtttggaagtttaaatgaaataatatctaaagctttaaaacatattactttctttctcttcttactttgagactcatcttgttacttctggattgtaacatttagtgttatatagatccctttagagtaggattggtctggattcaggactagatccacagataaaagaaaaaagaaaaaatatagtaaaattggtcatattttctaagaaggttatattttgtttctttgacttgaaggacccatattaactaaaaacaaattgccaagacaattattcatctctccctcccacctaatcaagaattatgtgaaagttctaagtgcctctgtccctcctctttctctctgtctggattccttgggactgacatcatagacatggaggagtctctgactttttaaagtttttgacagtcttgaatgttgtggttttccagtgagttatgggaagagttggagaggactcaaatgcagctctaatgcttcagtggaatcaggagacggttagagagtgaaactctggaagctttgggggatgttgtaaatgagagaatgtacggtcagtagtttctctggcattttaatagagggttattatccatggtctttaattttgggtcatttttctctgttattaagtaagttggacacttggaatatgcagactgattttaatattactctgagctaaacaatgtttaggaagagaaatttgttgcaaataaagtcgtataacaatcttaaacatatgtctttgagatgagttactgttttagacttgtctgtgtacaacactgatagactatcaacagtactgtgtgtgtgtgtgtgtgtgtgtgtgtgtgtgtgtgatggggtaccatacaaatatacttcagttcatctgaacaaaaattgcctgctgtgcttggatgctggggaatattggatgaacaagccaagattcctgccctcaaattgttcctggtttagtggggagacaaacatgtaaataaacacaactaccatgcagggtgataaacattatggtagaagtagcatacagggtgcagtgggggcaccaagaaagaagtgggcaatttaggaagtcagagaacttttgcaaatgaggtagtacttaagttagttttaaagaagaggtgagaattcacctgctacacctaggagttactccagttagagggaacaatatgtgcaaagggactgagatttgaagcacatagtacacttcgggaactcccagtacaaggaagggaataatgggaggtagaaaaggctggagaattaggtagagccagatcatgaagggccttgtttgtcctgtatagattttttttttttttcatacagggtctcactgtgtccctcaggctgagtgcagtggtgccatcatggctgactgcagcatcaaccttctgtgctcaagtgatcctcccacctcagcctcctgagtagctgggactacaggagtgcacctccacacccgactaattaaattaattaattaatttttttgtagagatgggttcttgctacattgctcaggctggtcttaaactccaggactcaagtgatccttcctccgtggtctcccaaagtgctaagattataggtgcaagccaccaggcgtgagccagcatgcccgaccctgtataggaatttgtttttttgtttgtttattttgagatggggtctcgctctgtcgcccaagctggagtgcagtcgcatgatcctggctcactcaacctccacctcccaggttcaagtgattctcctgcctcagcctcccgagtagctgggataaaaggcacacaccaccacgcctggctaatttttctattttcagcagagatggggtttcaccatgttggctaggctggtcttgaacttttgaccttaagtgatctgcccgcctcggcctcccaaagtgctgggattacaggtatgagccactgtgcctggcctctgtataggaatttgagtcttaggctttagccattgaaaatccattgaagaatttagaacagtgggatgtaatactataatactggcattttaaattgctcatagtggttgcctgtggaggccaatcaattgacggagagaggtagagggaggagttagggagctatttcctggggtgcaggttatgaaaacctgagatagaataaaagagctgtagcctgtggaaggttttgcagggatttgagagatatttaaggtaaaattagtaaaacttagtgaaagattatttgtgtggataaggcaagagagaagtccagggcggctccctggcttgtgacttggatgattggggactatttgctacaataggcagtactggaagaggaatagtttgaaaggatgggagacagagatgagagaataagctcatgtttttatatactgaattttaagtgcctgtatgattcccaggtgaggtggaaagaatttgggggtgcagatacatttggagtcatgaacatttgggtgcttagggctgtgaatgaagtttcaatgagaagatggaaggcctaaggctagaatggtgggtgcactaagtttggttcagtcacagaaatgggagtccacaaagacgaccaagacacagggccagagaagcaggaagagtggtcagtaagtgtcaaatgctacaaagagagcagaagtaaggatgattgtgwtcatcttatatataagccagtgccattctctttctgcagaagcctatttttgtaggttgaggacaaggagatttgcagggaagaggagagtaaccgccaacaaataggagcaggggaggaaacctaaaggaacccctcttgctttgctttgtaattttttttttctgtgaagtaggaggcaaggtcatttgacaggagtaaggggaggtgatgtggcttgggtgggaggctcaaggagcatggtgaaggtatgggatagtagctcagaagattgattgaggtactaaagcaaagatagcagtgtttcaataaaagcaaggtggctgaataacatgttagtagtcatattgctctgcaaggttagcagggaagttagaatgtgggatccatccaagttggacagatgaaatggataaggaaactaaattttcacaggaaagtaaattaggtgatcaattattggttttactttgttaggtaagaagagataaagtggaatctatccatttccctcaaccttcactgcttttatcctggtttagcgctattttgcaagaattttctaatcaattctctccctaaatccactgtgcttcttccaaactcttcacattgtaaccagggtgatcttttaacaattcacatctgattatgttctacctctgcgtgcaacctttcagtggcttcccattatatttaagataagatctcaaatctttaacagggtccactaggccctctcttcatcctcctgtagcaacattctcatctttatgttccttcctgccacggaagtttagcgcatgtttcctctgcttggagcgttcttcctttcccaatttgtctctccaattgctgcttaatcttaattaatcttaattcatagatgaaacataatttccttggggaagcttttcctgactccctataggagataacactcccttctctaacattgctttattataattgtttgtgaaaatatttgaaaagattatgaaaggcagaaatgttagatgaattgtgcaggtggttgttgaaattgctcaggaagatggtaggattttgtggttttttcctccatgctggaagcttttgaggatagggattgtgtctagttcactgttgtgtttttactcatgagcatagtgcctcacacaaaggcactccaaatacttctgttgaattaatgaataaggtggttaagagactggatgtcttagtgagcaggcaggtttaaaagtacagaggaggccgggcgcagtggctcacgcctgtaatcccagcactttgggaggccaaggcgggtggatcacgaggtcaggagatcgagaccatcctggctaacacggtgaaaccccctctctactaaaaatacaaaaaaattagctgggtgtggtggcaggcgcctgtagtcccagcttcccagctactcgggaggctgaggcaggagaatggcgtgaacccggggggcggagcttgcagtgagccgagatcaggccactgcactccagcctgggagacagagcgagactccgtcttaaaaaaaaaaaaaaaaaaaaaaaaagtagagaggagaagctggaaggagatgaggttgtggccagagtaaaatgtttgagtttaagatttagaggtggaatggtttcaggacatggcagggtccaggtttgagttgttgttgtggaggtggtcttagtattagaagagataatgaaattctaaggcagaaatgttaggcgagttgtgcagatggatactgaaattgctcaggaagatggtaggatttaaagttatttaagtgcctttggtcctagctactcaggaggctgaggtgggaggactgcctgagcctggggggtggaggttgcagtgagccaagatcaaactcctgcactccagcctgggtgacagagctagaccttgtctctaaataaataaataaagttatataaggcaggtgtttaagtctttgataaatacgagagataggcacaaccttttcctatggtgaacaaattaaatgggcaagaatcaggggagttccaggaatcagtaatgcatcccctagtatggtacagtgaaagagcatgggttcagactatctaggttcagacttttggccacctacctgacttttgaagtcttttttttttctctgtttataaattgggaataatgagacctgctgcaagagttttgtcattaatgagtaagaatgtttttattttttatatttatttatttatttatttatttagagatggagtctcgctctgtcgcccaggctggagtgcagtggcgcgatctcggctcactgcaagctccgcctcccgggttcacgtcattctcctgcctcagcctcccgggtagctgggactacaggcgtccgccaccacgcccggctaattttttgtatttgtagtagagacagggtttcaccgtgttagccaggatggtctcgatctcctgaccttgcgatccacctgcctcggcctcccaaagtgctgggattacagtcgtgagccactgtgcctggccgagtaagagtgtttttagaagtgcttaactaatattaacttgttagtttttattcttgactgcgtcattacttcaagatggtctggaagtggaagtaggggtgagaggcaaagatagcagaagcgaattttgaacaacataatttattcagcctgttaagtttatacaatgaggtcagcacaaatatttatgaatgaatataggtacaagcaagtactgatataagacaggattttgtaaaataaggccactgtttggctcataacaacatcatgatgctgatctacaacaaatgtttatgtaaagaaatgctttgtctaacaattttgcatgaaaattccatcatccttgggaagtagattttattgtcctggagaacagaatcaaaaccggtatgtgaaagttatagttggggtgtgaggctggtgatagcttttgttttagtttagaaaagcattttctaacagttaaagctgtccagtaataaagtagacattatagcaaagtaatgaggtccctgtcagaccttgtatccaagtggagactatgtgatttgtcagagatgtaatagaaggattcttgcatgggggcaggtatttggattacgtaattgctaaagtccctttcagttggaagatgatgccaggtgagagctgtctttacaccattcagttaacaaatagttgaaaacctcctctgttttatttgaaaggttgaaagccactgcttttcttcttctccccctccccctcctcctcctcttcctcctcctcttcctcctcctcctcctccctgagacagagccaaaaactgtgtgtttggtttgctttttttttttttttttttttgaaacagggtctcactctgttgcccagcctgaagagtaggggcacagttgtcgcacactatatagccttgacctcccaggctcaagcaatcctcccacctcagccactcacgtggctgggactacaggcacacacgaccatgcttaattagtttaaaaaaggtttttagagacagggtcccactgtgttgtccaggctggtctcaaactcctgggctcaagtgatcctcctgcctcagcctctcaaagtgctgggattacaggcatgagccactgtgcccagcccaaactttttgtttttttcgagacagagtcttgctctgtcgcccaggctggagtgcagtggtgccatctcagctcactgcaacctccaccttcctggttcaagtgatccttctgcctcagcctccctagtagctgggactagccaccacacccagcaaatttttgtatttttagtagagacagggtttcaccatgttggcctggctggtttcaaactcctgacctcaggtgatccaccctcctcggcctcccaaagtgctggaattacaggcgtgagccactgtgcccggcccaaacactgtgttttaatcattggtttgatatctccatttggaatttgaaaagcttaagcaaggtattagtggtgatgtaacaaaagctgttgttctcacctgttgggtggggttaggtcagggtccacagcatgcacctggagacatcaaatgtaagaatgtgctgttaggaagtttggcttagtgcttcaaatttttgctaaagagcaaggcattctagataatgttgaacctctaaattactttgttaaaatgttttttgagaagaatagcctgtgtgctgtgttgacatgtgagatctatgatgccataacactagttttcattcacttctctcacccagaagactgtctggctgtgaaattgcctgtatgcctatggcttagtcaactcttttcctttttgctgagcacctgtttgtgattactattttgtgtacttattgtatatttctcacattctttcagaaagttattaaaatggctttacagttgcgttgcttttttttaaagagagaagattgaaatttattttgcagctatacacttggttttggattattcaygtgtataagttatttgagctgctaccacttcctctgacctaaggctgtggctaaaatgggtttggagaagaaattcttgcctgtactggggggtagggggaggattcattcatctattaattctgaaggaatttaattcctaattcctgaaggtaagggacttgacattttgaatttgaatttgacatttgaatttgacattttgaatttgacattttgaatttgaggtatcttagaccaaaagttctttatgtattagtaattctttctgataattatgatgttgaaactcaggtaaatttaaaattgacaatatctagaatgatagtcaaagatcatagatmatgaggctatagtgaactgaagaagtttattttttaaaccttgaaagtatcttatgagtcatctaatacaagtctagattatagaagagacaactgaaaccctgtaagtaatttgaccaaagtcacctagttaatacatataggtgtatgtaggtaaactcatgtagtgtgagggaggtaagagttgtgacagcatggttgatgtccctttggaaaggagrgtttttaaaacttagaaatagaatggtgataagaagtgccgtagaatttctgatctgctaagcttcaaattggttggtttgttggtagctgatgtggaaattggcttagtcattgaatcatttattcatcaggcatttgactacctaccatattatagatgctacactagatgttggagttacaaaaatgaagaaatcgtgtccctgcgctcatggatctcttgtactattagaacaggacaagagagaaaaatttctattttgccatctttctctgtctcaaaaaaaaaaaaaaatccagtgttagcaagttagtgacctgctggttttataacccacaaatcttttttgtttatttgccttgccactttttgccttcaacaattatgctttgacctttcccaaaaggcaggggattggtgggtatggtagggcaagtgtacctggcaacttaatgaatgagtcttctatagaaagctgtaaacttggcagaatttgatcagagattgttctttactctgttattgcttccctctgacttttaacctcagaggaatgttggattggtgccaggctgtcaggttagggacatagtttctgccaaagtctgaaagaagagatctttttcagttgaacttatttgacagtcatctgtcctgtgtggagaaagacgtgtttggagtagatgtgtttcctgggttcaagaggttaatggacagagattgaatcttgttatgaaccttttgggtccccactctgctttgtggaataacttattctttaatttaatttaagttagttttttgagacagtcgctcttttgaccaggctggagtgaagtggtgtgatctcggctcactgcaacctctgccccacgtaggttcaagggattctcctgcctcagcctcccgagtagctaggattacaggtgcccgccatcatgcctggctaatttttgtatttttagtagaaacagggtttcgccatgttggccaggctggtctcaaactcctgacctcaggtgatacacctgcctcggcctcccaaagtgctgagattaaaggcgtgagccaccgcacctggcctaatactgtattttgagtaattttagctatcagtttactcctctgctagcatcaaaacactagtcaactctgaaattatccagtgtatagtaattgttcattcactcaacaaatatttattgagggccagtgtgcctagcactgtgccaagtgatacgtgcaggggatacattagtgaaggagacatacaagtttcctgctttcaagaaacatatattagaggagatggctagacagcaactaattaaaataatttgagagtattcaagtgccagtaaggaaatacacaaaggtgccatgttagagactattgcaggtggggagttctttagggtggtagcctgttgcttccttctttagtttgggtaagcaaactcatggtagaaaagcagtactcaggaaaagtacaggaaaagcatttttcagagtggtattacaggttcctggttaatgtagatgttgagatgttaatgaagagttaggaaataaaatgttactcttcataattttaaagtgctgtattttaaaattcaactgaaatgaatgagctaggatagtttccccatttggttaggaagctgctgacatgggactgtgattatcctgttccagtgtaatttgagccttatgtatttatttattcctcaggtggaggcctgaattttgatctatgttctacctacatccagctggctgaaagtacttgaggatcacatgaccctggacatggatgctgttctgtcagattttgtccgttccacaggagcagagccagggctagcgcgagatctcctagaaggtgaggagttgtaggggagaatgagaaaagagaaagtaaaatgtggtatttatcattaggatgatttggaccatttaaggtgatcaggaagatactttgtgtaggttaggccctatagttaattctaatgatatactttgtgtataacccgtcataattagaaattttaaaatccctttttcaccttgaacttactggggtagttttctccattgtcagtttatgctcaggcaatgcaagtgaaattttatattagtccattacaaacrtaattttattttattttattttatttatttatttttgagacagagtctcgctctgttgcccaggctggagagcagtggcatgatcttggctcactgcartctctgcctcccaggtccagtcaattctcctgcctcagactcctgagtagctgggattacaggtgcctgccaccacacctggctaatttttgtattttttagtagagattaagtttcacctgttggccaggctggtcttgaactccttacctcaggtaatctgcctgcctcggcctcccaaagtgctgggattacaggcatgagccactgtgcccggcctaaaagcataattttagatctgtaagacttcctctttatatagaagtgactttagggttttcatgatgggatcatccatggttttgttctttccttacataacatacattatgggtaattctatgttgagtgaatcaatttaatgttttcattttgctgcttttgtttacttatatctttatacacataagtttgaatgttctagatttttttttttttttttttttttgagacggagttttgctgttgttgcccaggctagagtgcaatggtgcgatctcgggtcactgcaacctcctcctcccgggttcatgcaattctcctgcctcagcctccggagtagctgggattacaggcatgcaccaccacactcagctaattttgtatttttagtagagatggggtttctccattttggtcaggctggtctcgaactcccgacctcaggtgatccgcctgcctcggcctctcccaaagtgctgggatttcaggcatgagccaccatgcctggctgaatgttctagattttaaggtcctgaagggttagaatcatgtccctaggattctgtttagagtcacaaataatagatgaaaatatgtaatgacacaaacaggcaggcctatggggaaggggcaagttcttagcatacataggtaatattttaaattgccagcccttagcaaggtgtgacaattagacatttgcttggctacccgtgaggagagcatgagtttggaaacagaagatcagggtttaaattccagtttagtaatttagtacaactttgtccttaatttgcattttcttttttttttctttttgagacagagtctcactctgtcgcccaggctggagtgcagtggcgcgatgttggctcaccacaacctccgcctcccagattcaagcgtttctcctgcctcagcctccccagtagctgggactacagacgcgcgccaccatgcccggctaatttgtgtatttttagtagagatggggtttcacaatgctggccaggctggtttcaaactcctgactcgtgatctacccacctcagcctcccaaagtgctggcaggcatgagccaccctgcccagcctaatttgcatttttagtttcttctcctactacttttccctatacttcctatgcagccaggcctgacttgtcacctcttggtgatcatgttaggttacttcctcagtctggagcatttctttcctctattctcctcatccttcaagattcagctcaaatgtttcctctttcataaaatccttaacctttctgcattcctcttataacatgtgttgaacacttatgagtgttcaatatgtgcaacgtacttgagatatgttattttattctcacaaccaccatacaataaagttttattatcctggagttaataattttaaaacctgaggctcagtgaggtttaagtaggatttgaatctaggcaatctggtttcagagtatggctgtaagcaattatgttacaaattattgctagcatgctcacatgtgtgcacacacacatacactcatgctgtgaaagaaacattgagggtgctgtgagagtgaagaaagaaccctaacttagatctagagtgcaggaaggccttttccgaggagtgatttttaagctgagccctgaaggacaagtaggagcagcaagacaaagggatgtagaagagagtgtttatgcagaataaacagtttatgcaagggccctaaggtgcaagagagtttggcacattggagaaactattaataatgaggtagtaagaatggtgcaaaagtggtaggaagctggtgagataggcaggaagcagaaaataggggctctagccaggtgtggtggcattcactgtaatcccagctacctgggaggctgaggtgggacggtcgcttaattaagcccaggagtttgagaccagcctgggcaacatagcaagacctcatctcttaaaaaaaaaaagaaagaaaaagaaagaggctgggtgcagtggcttatgcctgtaatcctaacactttgagaggctgaggcaggcggatcacctgagttcaggagtttgagatcagcctggccaacatggtgaaaccccgtttctactaaaaatacaaaaattagctgggtgtggtggcgggtgcctgtagttccagctgcttgggaggctgaggcaggagaatctcttaaacccgggaggcagagactgcggtgagtcgagattctgccactgcactccagccagggtgacagagtgagactctgtctcaaaaaaaaaaaaaaaaagttactaagaaaaaaaaaaaaagaaaaataaaagaaaaaaagagtgtagggcctttgtaggccatgacgaggagtttaaattttattctaagttcactaggaaactggtgaaggattttaatcaggggagtgacatgattggatttgagtttttaacaatgtacttgtagagaacactctggccagagaagaaatgattaaaacagttaggaatattgccttagttcaggtgacagatgatgatgttgcagactatggtggtagcaatagatagaaggaggtggaattaagataatttagaaggaaaaatacaaaaaacttaggtgggcgtggtggcacatgcctgtaatcccagctactcaggaggttgaagcgtgagaatcgcctgaacccaggagggcagaggttgcagtgagccgagattgcaccactgcacttcagcttgggtgacagaacgagactccgttgagttcaagaccagcctggccaagatggtgaaaccctgtctgtactaaaaaaatagaaaacttggccgggcgtggtgacgcgtgcctgtaatcctagctactcgggaggctgaggcagagaattgcttgaacccaggaggtggagattgcagtgagctgagatcatgccactgcactccagcctgggcaacagaaagagactccatctcaaaaaaaaaaaaaaaaaattagaaggggcataaaaggacctcatcctcattttctctctgttgcttgttttttcttttaaaagttaactgaggccaggtgcggtggctcacacctgtaaccccagcactttgggaggccgaggcaggtggatcacctgaggtcaggagttcgagactagcctggccaacagggtgaagccccatctccactaaaaatacaaaaattagccaggaatggtggcacgcgcctgttatcccagttactcgagaggctgaggcaggagaattgcttgaacccaggaggagaacgttccagtgagccgagatcgtgccactgcaccccagcctgggcgacacagcaagactccatctcaaaaacaacaataacaacaacaacaacagttaactgattgtatttcaataggactatttgatttttgttttgttttgtatgagatggggtctcactctgtcacccaggcaggagtgcagttgtgtgatctcagctcactgcaaccttggcctcctgagctcaagtgagcctcccatctcagcctcctgagtagctaggaccacgagcacacaccaccacacctggctaatgggactgttcaatactgataattgaaaatgagagaaagaaatcaaaagtaaactatcgtattataaagaacaaattagaaaggaaagagattaggagcagagagaccagatagagaattccttcctaaaagaccaaagactaagtaaagattatgaggacctcaaatggggcagtggcaataaaaatggataataagaaatggatttgagagatgttttaggggtacaaattgacttggtggtgagggaagaggaagagtgcaatctgaggaaacttgaggagctaaaaatgactgaagtttcagggcctggagggattgtgatgccattactgatttagggaacataggaagaggagaagcagcaagttttgggaaggaaaatgatggatactcaatttggccatgtggattgttaggaagacctgattttaaggagatttgcagacagttggaagtatagatccgatgctcaaggcagatgtcactcgttcatgcattgattcaggagaagagttatccattaattcaacaaatatttattgagtgactactgtgtgccaggtactgttctagatgctccaacaaaacaaaacaaacaaaaatacctgccttcatgttctagcaggagagagggtcaataaacaacaaatgtgataactaagtaaattataaagtatattataaactgttaagtgctatggagaagagtaaagggaatgatgaagtgggttgtgatttttaagtcagggtaggccttactaacaatgtgatgtttaagcaaatacctaaagctaatgaggagttgtctgtgtggatatattggggaaagagccttctaggtagagggaatagtcagtggaaaggccctagagtgagagtggacttagcatgttctaggaacagcaaggtcagtgatgactggaacagagtgagcaaagggagtcagaacaattggctaatgtaatgatttagaagtaaaatcatcagtaatgatttagacgtaaaattgtgagtaaaaccaaccactattctaagtgctttcaactcatctaatcttcataacagctctatgaggtaggcactgctactatcatctgcattttcacggataaggaaattgaagcacagagaagaggccagaaaagtaggccaggacatacaaagccttgagtatcaagccaaagagcctgagttttattctgtaggcagtggtaagccattaaaaatctcgattatggaactaaaatgatcacaactgtgctttagaaagattaatctcatgggattctttggaatggatcggaggtaggacagtaggtgataggaattgaattaaggtggtagtagatggaatacaacagaaagaaatgtgagcaattatacaatgcatatttgttgaataatttagctggagaaagcatcagaaaaatccattatgacaaatcttatcatttaaggtcatttckttagtagaatggtgattcttaaatttgggggaaacactgtttcctttgaaaagctgatgacagctatgaactctttcactagaaaatgcacaagcccatgatcttatatgcaggtttagtggtttaggacacactagagtacatgtaggctaagaacctctttggatctcagaattaggagacctgggcctgagtcctgctgggtctggtgtgaactagctgtgactttgggcaaataatttacttctctagactttatctgtaaaaggaagttttaattttcggttactagatctttaagggctcttttagttcagagggacaaagtttctattttcatggcacttacttaggaaatagacaacaaataagtaagtaaagacatttgataagttagattgaagtgttataaagaaaattaaagcagggtaaggaaaagaagaatgattatgtgcatgcgtatttgcatactggttttgataggatagttagtgtgatctttgtgtctctatactatggttgcacagtttgctttttgctttgtctcctgacaggaaagaattgggatgtgaatgccgccctcagtgattttgaacagctacgtcaagtccatgctggaaacctacccccatcctttagtgaggggagtggtggctccaggacccctgaaaaagggttttctgacagagagcctactcgccctccccgacccatcctccagcggcaggatgacatcgttcaaggtactggggtgactggaatgtttccgtatatggagtaggaagggaggggattgttaaatggagtcataaagtctagtgatccattggaggtgattccatttcttccccttctcccagccaaacccagactgaggtggcctcagtctgcccaggtgctgcagtccctcactgcgtctctgcatctttagtgttatcctgtataaaagccttcctcagatactgtgaaagaaatagaggaaggaggataacaatctccttgttgatataaagttcacataaaggtagaattgaaagagtcattacctctttggggggtaatttgttaatatttgccaatatctatcaaaattaaaatgcatatgtactctgacttagcaatttcatatctagcaatttatcatatatgtgtatgtgcacataagtattctctaaataaatacataaggccaggtgcagtggctcacacctgtaatcccagcactttgggaggtcgaggtgggtggatcacctgaggtcaggagttcgagaccagtctggccaacatggtaaaaccccatctctattaaaaatacaaacattagctgggcgtggtggtacatgcctataatcccagctacttgggaggctgaggcaggagaattgcttgaacttgggaggtggaggttgcagtgaactgagattacaccactgcactccagcctgggtgacacagtgagactctgtctcaaaaaaaaaaataaataaatgaataaaaattaaaaaaaagaaatacataaatgcagcatataaggatattcacagcagcattattttacaataattaaatcttgaaacttttttttttttcttgaggcaatccatctgacttggccccccaaagtgctgggattacaggtgtgagccactgcacctggccctgaaaacatttaatgtccattagtaaaggaatggttaagtaaattgtaatcatccatgttgtggaatactctgcaatcattagaaagaattaggcagaacttggtgtactgttttggaaaaatttctaaaatctattcagaagggggctgggcatgatggctcacacctgtaatcccagcacttttggagaccaaggctggtggatcacctgaggtcaggagttcgagaccagcctggcctacatggtgaaaccctgtctctgctaaaattacaaaaattagctgggcatggtggtgcacacctgtaatcccagctacttgggaggctgaggcaggagacttgcttaagcccaggaggcagaggttgtagtaaacctcttagattgcaccactgctctccagcctgggtgacggagtgagactccatataaaaaaatatataatttttttcaaaaaggtaagacacaatgcaatgtatgtagtatactctcatttgcgttttaaaagatgattttaaaagctgtacatgcatttttagtggagatggggtttcaccgtattagccaggatggtgtcgatctcctgaccttgtgatccacctgcctcggcctcccaaagtgttgggattacaggcgtgagccatcgtgcccggccaaaacctgtatatgcttctgtatgcataaaaatttctagaaggatacaaaagtttgcctctggggaagggatcaggaattttgaatgataagaagacttccttgtgaaatcattttataccttttgatggtatattgattttttaccataggcacatggtactgtttttgaggcagggtcttgctctgtcctccaaggctggagtgaggctggtggaacacagctcactacagcctaaacctcctaggctcaagggatcctactgcctcagcctcccaagtagctgggagcatgggcacgcaccacctcacctagctaaatttttgattctttgtagaaattaggtctcactctgttgcccaggtggtctcgaattcctgggctcaagtgatccttctaccttggcttcccaaagttttgggattacaggtgtgagccaccatgctcagcctacgaatacctaaaaaatatttttaaggtgggtgtggtggctcacgcctgtaatcccagcactttgggaggccaaggctggcagatcacctgaggccaggagtttgaggagaacagcctgaccaatgtggagaaaccccgtctctgctaaaataaaaaaaaaaattagctgggtgtggtggcgtgtgcctgtaatcctagctactcagaaggctgaggcaggagaatcccttgaacctgggaggcagaggttgcagtgagccgagactgcagcactgcactccagcctgagcgacagagcgagactctgtctcaaagaacaaaaacaaacaaaactaaaaaatatttgaaaaataacatcactataagataactttagacaactcagtttattttgtgtatcatatctggcaaatgttgtattaagaacagcccaacatgcttttgaaattttgccccctttggatcatcattaaatcattacataattgaagccatacaaatgaactgtaatactacattgagcaaattataatcacagtggaatatctgcttgggaattacaagtgtcatgtattcaaaacaaatgaaatgatgtggggtactatctacattattgttctctatagactgttaagaattgactgtccctataaatttctgataaatatgggtattgagagtagttgtagtaagcaatataaattaatgttattgatgtaggaagaaagttcccaaatgtgtaagatttgttgttgattgtcttttttttttttttttttgaaacggggtcttgctctgttgtcaggcaggagtgcagtggcacaatcttggctcactgcagcctccgcctcccaggttcaagcaattctcccacctcagcctcccgagtagctgggattataggggcacaccaccatgcccggctaatttttgtatttttagtagagacagtgtttcaccacgttggtcaggctgctcttgaacacctgacctcaggtgatccacctgccttggcctcccaaaggattttcttttctataatggatttcttttataatctttctagaatgaaaataccctttagaaaaggtatttcccaagaccctgagaattaccagagaggttatttgactaactctagtctagtgaaacctcacttcccttattccctctcctcccaccaaacaatgaccaaattgctaaatgaatgggtccctatcacactgggaaatatggaagtggaggaagacagtcagagggaggggaagatcaggcaaattccaaacaagggcagaaagaggaatgaataatttggtgctaatgtgagtgcctacaaaaatactgtctctatttctccaattgtatttggcttcagaaaaagggttctgaaattcagtagtcagttagacttagtttttctctgactgtaaaccctgttgagaggtaactatcaccacatcagtgtagagttctccaagtgggctgtgtatgttctaaggtgactccatttctcattgcagaaaaacgcctgtctaggggcatctcccacgccagctccagcattgtttccctggcccggtcccatgtctcctccaatggtgggggtggggggagcaatgagcaccccctggaaatgcccatctgtgccttccagcttccagatctcactgtatacaatgaagacttccgcagcttcatagagagagacctcattgagcagtccatgctggttgccttggaacaggcaggtcagtgagtgcttcctctcccacactcttccctctactctccacctacaggcagccttgtggaggggctggacttgatcgctagcttccagtttaagtgtgttatctgattgcaaagtcaggagtcagtgggataaacttgtgctgtcaaagaatggatacagattagatactttactctgggaatttcctggttgatggaagagaaaccagatacacatgtgaaaaggcctaggaatcaatacctcgaaatcaatacatgaaaaaaatacaactaattataattggccctggaacacccttgtgaacagaaatgaccartgctgtagatgatgcacagtagtgaacctatccccccaaatgtatttacgtttgtaattgtgtttatcttaaattattgttaaaattaattcttatcatagggtgaggcagctgggaattttggaaaagctaatcaggcattaaaatgcttgygtgggataagaactggagttagatgagggcatggaaaggaagcttttatttttcattttgtaaccttctatattaaccatatacatctatttgtaatttttttttaagttggtaaattatctggtctggggagtttataagccagtttttcattcagtagttcaaaaactatgctccacagtagttcaagaaaacttatgcatcactcataagatattttcctcatgtaaataatgggttggcaattgtgggatgactgcatggaattaagacttattttcttggatattttatgtactttatcttattgctcattcctttaaagtcacaccccacacgtgatgacatgctgtcatatatgcagatgatactcataaaacaccttaaatacatgctttgagttgtttttgttttgttcatgatggatttttgctgagctttgttgctgtgatacatactggtctcctgagtggagggaaggaatcagggccagtccaagcagtcaacagtttcaacttatgtccttggcctcgtcatttaacccagggtttctcaaccttggcactattgacattttggtctagataattctttgttttgcaagctgccttgtgcattatatcatggttagcagcatccctggcctctacccattagataccagtagcatcctgctaccagttgtgacatgcaaacatatcttcagtcattgccagtgtccctttgggacaaaattgaccctactcactgatctaaccaattgtgctcacaagattctgactgactagatataagtgaggaagatataaagagtaatcaagtgatggttttattctgggtaggcctcctagaggaggctgctttggagtctgtttcagaaataggaaggtggaagggcttcatggataatctccttttcctccactatcttgtttctacagggcgtttgaactggtgggtgagtgtggatcccacctctcagaggctgcttcctttggcaactactggagatgggaactgcctcctgcatgcagcctcccttggtgagtcttgaaagcagtcctccattcacctgcagaaaggaagcagttgagtcaaatctcatgtgtaggacttgatccagataaccttgatcttaggcggaaatgatggttcagagcgagattgtgcatgcttacgtgtgtgtctgtgtgtttatgttggcacaagaggaaatgggagtgagccctacctttgctagtgagatagtgaagagagcacagatattagcttgggctggctttgaaagctgaccccaggagtaatgagtaggagtaagccagcagtgtatagctagatgtgtgtatgtgtacaattctacttaatatttattcttttgttgtatgaaaaaggtatgtttttagcagtcctttgtaacacacacttactttattttatttatttatttagtttttgagacggagtctcactctgttgcccaggctggagtacagtggtgtgatctcagctcactgtgacctccacccctgggttcaagcgattctcctgcctcagcctcccaagtagctgggattacaggtgggagccaccatgccccactgtaaataggcttaatatttaaagtaagggctgggctcaatggctcacgcctgtaattccaacactgtgggaggccaaggtgggcagatcacttgaggccaggagtttgagaccagcctggccaacacggtgaaaccccatctctactaaaaataaaaaaattagctgggcatggtggcagatgcctgtaatcccagctactagggaggctgaggcaggagaattgctgaatccgggggccagaggttgcagtgagtgagccgagatcgcaccactgtactccagcctgggcaacaaagcaagactctgtctcaaaaaaaaaaaaaaggtcaggcgtggtggctcacgcctgtagtcccagcactttgggatgccaaggtgggtggatcacctgaggttgggagttcgagaccagcctggccaacatygtgaaaccctgtatctactaaaaatacaaaaattagcctgatatggtggtggacacctgtaatcctagctactcgggaggctgaagcaggagaatctcttgaacatgggaggcggaagttgcggtaagccaagaacacaccatggcactccagcctgggggacagagtgaaactctgtctcaaaaaaaccaaccaaaaaaacccataaaaaaccaaataaacaaaaaattaagtcaatttacaacttaatatattatttgcagcctggtgccatggctcacacctataatcccagcactttgggagggtaaggcaggggggtcacttgaggccaggggtttgagaccagcctggccaacatggtgaaaccccatctctactaaaaatacaaaaattagcagagtcaagctgaggtatcttaccattatgcttttttgccacaggaatgtggggtttccatgatcgggacttgatgctgcggaaagctttgtatgcactgatggagaagggagttgagaaggaagcgttgaaaaggcgctggaggtggcagcagacacagcagaataaagaggtgggagagcgtgggtgggagcgccttgtttcctaaagttaccaagctgccaaagtcactgggtgcctgccagtagaaaatatttccaagtgtttaggtcagtgtgactccccttatgatcctgaaaattggagaaaatgcagttaacaccaatggggtaaatgccttctgatgtggtcatgagaactggtggtgggcatgagacctacagagaggttatctaacattgtgcttttcccccagtaggtgctttatagcttttagtggcagtgttttgcaaaatgagttatgacaattccataggatttttgtattgttttgtttttttgcttgtaataaggctagatcaatttttaaagacttatgttttcagcccctatagaaatgtgaatggttaaaatcttttaggacatatataccatttgtttttcatatactcagttttagtttattttaaattttaaaaagcataaggaaccagcattctaatcacacacacacacaaaaagcatacctatttaattgagtctgaacagtacttctcaggagtttgtcaaatgttgaggctgctgttatataaggcagtaacaacagattgtttgtacttgccctctccaaaacgggttgcgcaaactatggctattttgtaagaaaaaaaaaaaacaaaaaaaaacaaaaacaaaaaaaccttttatcagaatacagccctgggcatttcttggatgtttacacgtgtaactgctttcttcctccagcagcacagtagtaacatgtggcctgcacagcccatacttactgactacctggccctttacagaaaaagtttgctgattacttcccttcaataatgacattatgcctttacataaaaataatgaggctccctatttccttttcctgtgattctgtgctatgtttatatctcctgctctttatgtatatctattttttttttgccatgttatggctggatctttctggcatttagtatggcaatatctcttcagaaactttcctttttcatccacctttctttttttctcattttattgctgtcataacttgacaatatagaagagtttttttgttttagttatttagaattttatatcctgaagatttaatatgtaagtagaacatgctatgtttcttcctcaaaaacaaataatccagttgttaaaagtagatgatattaagatcagaatcctctccttgagcagccagtcttccccagaagattcctgagggaaataaacccacaggggcaaggccacataagtacttgacattcttttttagcaccaaaagcttggctggatctcgtggaaagcttttgcctgagctagagctagcctagaatttagaatccagagcaaatcagtagtcagttttgtggtagtcagctttgtcctcttcactgttgagttcagataataccggaaccttaaccactgcagaggcaagaaaaggccaaaccagaacatgccaactattaagtagaaatgacagcaacacccagaaaattaagtgtgcccaattccagttattaaagcaattagttattattctaaagatggggttagattataatggtatttagccaggaaacccagaaatacccacgttctatccttggccagccagcctttccctctcaaagtcagcctttccatctgaaagtccccaacatgcatagagaatagtggctagtaatggagcaatagttttagtccttttgctcagcacagtgaaagttcatactgaaaatgtggctttcataattgtcttagcttagaccattcatagcattattacccaccttgggagtgggaatggtaggaggaggataatgaactggggaagcttcctttagctccccagtaccaaaaccacactaaataagttttgatttcctgggcttccttgttttatgttgaaattggtggtgaggctcagtaatagtttcttaaatgttaaggctagaagttgtacaccacctagtggctgtgtacattaaaacaggaagcagaaaccggccaggaagagggagccggatctggatgtgtctattggagtgactgcagcactccatatagaacctgggcattgctctctttatttttaattgaagtaaaatttgtgatagcattttacaaattgaaaatagctgtgtcatttaaaaaattcccattaaatttgttcccagtacccctcatgtttccagtgatttccttctactctgtcagtgtgcggttaagccgtatagactcattttaatactaatgtcagccaaataaaattaataagttaaacttatttcccttatcattatatacatcctaaagccaatgtattttaaaattgcttgtaccattgcctgctctcctttgataaaaattgtagtttcacttagcatatgtttattgattatagtcacaaaatagaccttgggtgtattgcataaaacatgatcctagcatagaggaggagatggacatgtaaatacataattgcaacaggttataacatgtatgactcttacaatagacgtctctatagcagttaatgctggccggatgcggtggctcatgcctgtaatcccagcactttggaaggccaaggcaggcggatcacctgttggtagttcgagaccagcctggccaacatggtgaaaccccgtctttactaaaaatacaaaactagccaggcatggtggtgtgcacgtgtagtcccagctactccggaggctgaggcaggagaattgcttgaacctgggaggtggaggttgcagtgagccaagatcatgccaccacactccatcctgggtgacagagcaagactttgtctcaaacaaacaaacaaaaaaacaacaacaactctatagcagttagggagagaggatacaaaggaaggagtggttgatctgccaagggagatttagaagactatttggaggaatgatacctgagttctgtcctaaaagttgagaaattgttcacaaggttgacagaaagtgagctactccaggcagaaggaacagcttagacaaaagctcagtggtataaaacaacatggtatatttcaggaactacagctgattcagtgagatatatctgactagagaagtgggtaggggccagaaagtaggctttgtatgcagcacttctacttgggaggctgaggcaggagaattgcttgaacccgggaggtggaggttgcagtgagctgagatcgttccactgtactccagcctgggcgacagagtgagactctgtctcaaaaaaaaaaaaaaaaaaaaargaaggtatccaggtgtggggtgggtgaaagaaagaaaggaatattagataattccttggttttgagcttggatgtttgggtgatagttggtgctattcactaaggtaggaaaataggaagaagagtgggtttgggaaaaaacaggagttctattttgactttacagagtttgaggtagccatgggcaggtggcagtctccagtaggtagctggatatatgaatatagaaattaagaagtctaggctgagtgcagtgcctcatgcctgtaatcccagcattttgggtggctgagacaggcagatcaccaggtcaggagttcgagaccagcctggccaacatggggaaagcccgtctctactaaaaatacaaaaattagctgggcctggtggtgggtgctgtaatcccagctactcgagaggctgaggcaggagaagcatttgaacccgggaggtgaagtttgcagtgagccgagattgtgccattgcactccagcctgggtgactctgtctcaaaaaaaaaaaaaaaaaaaaaaaaaaaaggaaagaaagaaaaagaaaagaaattaagaaatctgggctggagatagatggtatataccatacagatggtagtggatgagattatggcagtagaagagatcacccagagggaaccaaggtgaaaatcattgacacaccactagtattttgggggcagacagaatttagaggaatagaaagtaattttatggacgctaatggcaaagaaaatttaaagaggaaaataacccatgtgaaggctaagatgggaaccagggtccactgaatgtggcaattagaaggtcattgttctttgccaaaatcaggtaggtgaaatgttatgtggcaggtgggtgagcaggatggagggcagaaatgggacagattgcagtaggtcaaaaagaatggatgataaagaagtttaatagtcatagactattagttcatggatcttgactgtaaaagagataagagatttgactttgtagtacaatttgtaaaccaagtgctaagggattagggagtaagtaacagtgaataaggtggaataggtattgcctcttagaacccagcctctaattgcccaatgtcccctgcctgtccttcacacagtcagggctggtatacacagaagatgaatggcagaaggagtggaatgaactgatcaagcttgcctcaagtgaaccccgaatgcatctaggtaccaatggagccaactgtggtgggtaagtatggctaagtaggggaggaggaaacctgcatagagtcctcactgggcttccacagyccagtgtctagagagctctgtgctaagaggatattagaaggaaagaggggaactatgctaagggcacaaaagtgtgtaacaacatgatatgtttaggaactacaggtagttcggtattgaactggaatataaagtagcccatctagactttggaaacttcaggacaaatgacccagtatcttcagtaagtaaactgcaaggaaaataaaaagggaccaggaacttgtaggtttaaatggactaaaaagacatatcaggccgggtgtggtgtctcacacctgtaatctcagcactttgaaaggctgaggcaggaggatcgtgtgagcccaggagttcgaaaccagcctgggtaacatagtgagaccccctttctttttcttttctttttttttcttttttttttgagacagagtcttactttgttgcccaggctggagtgcagtggtgtgatctctgctcactgcaacctctgccttcagggttcaagtgattctctgtttcagcctcccaagtagctgggactacagatgcatgccaccacgcccagctaatttttgtatttttattagagacggggtttcaccattttggccagggtgatctcaaactcctggcctcaagtgatccacccaccttggcctcccaaagtgctgggattacaagcatgagccaccatgcctggccagtgagaccacatcttaaaaaaaaaaaaattagccaggcatggtggtgcatgcctatagtcccagctacttgggaggctgaggtgggaggattgcctgagctggggaggtcgaggctgcagtgagttgtgacagcacccctgcactccagcctgggtgacaaagagagacctctgtctctaaaagaaaaaaaaagacatcaaccagttgggatgtgtggacatcataagacaattaaggaaatgtgaacaatgtctctgtgtttgattattgttaaaattataaaatgtgatattaatggtatagtggttgtttaaaaaggtagtcctggccaggcgcagtggctcacgcctgtaatcccagaactttgggaggccgaggtgggcgggaattcgagaccagcctggccaatgtggtgaaaccctgtctctactgaaaatacaaaaaattagctgggcgtggtgctaggcggctgtaatcccagctactcgagaggctgaggcaggagaattgcttgaacccaggaagcagaggttgtagtcagccgagttcgtgccactgcactccagccctggcgacagagtgagactccatttcaaaaaaaaaaaaaaaaaaaaaaaaaaggtagtcctttatgtttttagagatagaaactgaaataaaataaaaatggatgaaattatataatgtccaggatttgcttcaaaattctctggtggtagccccgtgatgggggaggtaggtaaatagatctgaggtgtagtaaaacaagattgaccaagtgttgaagatggccaaataggaacagctccagtctacagctcccagcatgagtgacgcagaagagggatgatttctgcatttccaactgaggtaccgggttcatctcagtagggcttgttggacagtgggtatagcccacggagcgtgagccgaagcagggcggggcattgcctcacctgggaagcacaaggagttggagaattccctttcctagccaagggaagccgtgacagacggtacctggaaaatcgggacattcccaccctaatactgcccttttccaacggtcttagcaaatggcacaccaggagattatatcccgtgcctggctcggagggtcccatgcctgcggaggcttgctcactgctagcacagcagtctgagatagaactgcaaggaggcagtgaggctgggagaggggcgtccgccattgctgaggcttgagtaggtaaacaaagcggccgggaagctcgaactgggtggagcccactgcagctcaaggaggcctgcctgcctctgtagactccacctctggcggcagggcatagctgaacaaaaggtagcaggaacttctgcagacttaaacgtccctgtctgacagctttgaagagagtagtggttctcccagcacgcggtttgagatctgagaacggacagactgcctcctcaagtgggtccctgacccccgagtagcctaattgggagacacctcccagtaggggctgactgacatcttatacagccgggtgcccctctgagatgaagcttccagagaaaggatcaggcagcaacatttgccgttctgcaatatttgctgttctgcagcctccactggtgatacccaggcaaacagggtctggagtggacctccagcaaactccaacagacctgcagctgagggtcctgactgttagaaggaaaactaacagaaaggacatccacaccaataccccatctgtatgtcaccatcatcaaagaccaaaggtagataaaaccacaaagatggggagaaaccagagcagaaaagctgaaaattctaaaaatcagagtgcctcttctcctccaaaggaacgcagctcctcaccagcaacagaacaaagctggacggagaatgactttgacgagttgagagaagaaggcttcagacgatcggtaataacaaactctgagctaaaggaggatgttcgaacccatcgcaaagaagctaaaaaccttgaaaaaagattagacgaatggctaactagaataaacagcatagagaagaccttaaacgacctgatggagctgaaaaccatggcataagaactatgtgacgcgtgcacaagcttcagtagctgattcaatcaagtggaagaaagggtatcagtgattgaagatcaaatgaatgaaatgaagtgagaagagaagttcagagaaaaaagagtaaaaagaaacaaacaaatcctcaaagaaatatgggactatgtgaaaagaccaaatctatgtctgattggtgtacctgaaagtgacggggagaatggaaccaagttggaaaacactcttcgggatattatacaggagaacttccccaacctagcaaggcaggccgacattcaaattcagggaatacagagaacgccacaaagatactccttgagaagagcaactctgaaatacataattgtcagattcccaaagttgaaatgaaggaaaaaatgctaagggcagccagagagaaaggtcgggttacccacaaagggaagcccatcagactaacagcagatctctcggcagaaactctgcaagccagaagagcgtgggggccaatattcaacagtcttaaagaaaagaattttcaacccagaatttcgtatccagccaaactaagcttcataagtgaaggagaaataaaatcctttacagacacgcaaatgctgagagattttgtcaccaccaggcctgccttacaagagctcctgaaagaagcactaaacatggaaaggaacaaccgataccagccactgcaaaaacatgccaaatttaaagaccatcgatgctaggaagaaactgcatcaactaacgagcaaaataaccagctaacatcataatgacaggatcaaattcacacataacagtattaaccttaaatgtaaatgggctaaatgctccaattaaaaagacacagactggcaaattggataaagagtcaagacccatcagtgtgcgatattcaggagacccatctcaggtgcagagacacacataggctcaaaataaagggatggaggaagatctaccaagcaaatggaaaacaaaaaaaagcaggggttgcaatcctagtctctgataaaacagactttaaaccaacaaagatcaaaagagacaaggccattacataatggtaaagggatcaattcaacaggaagagctatcttaaatatatatgcacccaatacaggagcaccgagattcataaagcaagtccttagagacctacagagagacttagactcccacacaataataatgggagactttaacaccccactgtcaacattagagagatcaacgagacagaaagttaaaaaggatatccaggacttgaactcagctctgcaccaagcagacctaatagacatctacagaactcttcaccccaaatcaacagaatatacattcttcttagcaccacatcacacttattccaaaattgaccacatagttggaagtaaagcactcctcagcaaatgtaaaagaacagaaattataacaaactgtctgtcagaccacagtgcaatcaaattagaactcaggattaagaaactcactcagaactgctcaactacatggaaactgaacaacctgctgctgaatgactactgggtacataatgaaatgaaggcagaaataaagatgttctttgaaaccaatgagaacaaagacacaacataccagaatctctgggacacattcaaagcagtgtggagagggaaatttatagcactaaatgcccacaagagaaagcaggaaagatccaaaattgacaccctaacatcacaatkaaaagaactagagaagcaagagcaaacattcaaaagctagcagaaggcaagaaataactaagatcagagcagaactgaaggagatagagacacaaaaaacccttcaaaaaatcaatgaatccaggagctggttttttgaaaagatcaacaaaatttgatagaccgctggcaagactaataaagaagaaaagagagaagaatcaaatagacacaataaaaaatgataaagggcatatcaccaccgatcccacagaaatacaaacttccatcagagactactgtaaacacctcaatacaattaaactagaaaatgtagaagaaatggataaattcctggacacatacaccctcccaagaccaaaccaggaagaatttgaacccctgaatagaccaatagcacctctgaaattgaggcaataatagcataccaaccataaaaagtccaagaccagatggattcacagccgaattctaccagaggtacaaagaggagctggtaccattccttctgaaactattccaatcaatagaaaaagagggaatcctccctaactcattttatgaggccagcatcatcctgataccaaagcctggcagagacacaacaaaaaaagagaattttagaccactatccctgatgaacatcgatgcaagaatcctcaataaaatactggcaaaccgaatccagcagcacatcaaaaagcttatcccccaagatcaagttggcttcatccctgggaggcaaggctggttcaacatacgtaaatcaataaacataatccatcatataaacagaaccaaagataaaaaccacatgattacctcaacagatgcagaaaaggcctttgacaaaattcaacagcccttcatgctaaaaactctcaataaactagatattgatgggacgtatctcaaaataataagagctatttatgacaaacccacagccaatatcatactgaatgggcagaaactggaagcattcctttcgaaaactggtgcaagacagggatgccctttctcaccactcctattcaacatagtgttagaagttctggccagggcaatcaggcaggagaaagaaataaagggtattcaattaggaaacgagaaagtcaaattgtccctgtttgcaggtgacatgattgtatatttagaaaaccccactgtcttagcccaaaatctccttaagctgataagcaacttcagcagtctcaggatacaaaatcaatgtgcaaaaatcacaagcattcctatacaccaataatagacaatcagagagccaaatcatgagtgaactcccattcacaattgcttcaaagagaataaaatacctagaaatccaacttacaagggatgtgaaggacctcttcaaggagaactacaaaccactgctcaatgaaataaaagaggacacaaacaaatggaagaacatttcatgctcttggataggaagactcagtatcgtgaaaatggccatactgcccaaggtaatttatagactcagtgccatccccatcaaaccaccaatgactttcttcacagaattggaaaaaactactttaaagtccatatggaaccaaaaaagagcctgcattgccaagacaatcctaagccaaaagaacaaagctggaggcatcacgctacctgacttcaaactatactacaaggctgcagtaaccaaaacagcatggtattggtaccaaaacagagatatagaccaatggaacagaacagagccttcagaaataataccacacatctacaacaatctgatctttgacaaacctgacaaaaacaagaaatggggaaaggattccctattttataaatggtgctgggaaaactggctagccataggtagaaagctgaaactggatcccttccttacaccttataaaaaagttaactcaagatggattaaagacttaaatgttagacctaaaaccataaaaaccctagaagaaaacctaggcaatacccttcaggacataggcatgggcaaggacttcatgactaaaacaccaaaagcaatggcaacaaaagccaaaatagacaaatgggatctaattaaactaaagagcttctgcacagcaaaagaaaccaccatcagagtgaacaggcaacctacagaatgggagaaaatttttgcaatctacccatctgacaaagggctaatatccagaatctacaaagaacttaaacaaagttataagaaaaaatcaaccccatcaaaaagtgggcgaagcatataaacagacacttctcaaaagaagacatttatgcagccaacagacacatgaaaaaatgctcatcatcactggccatcagagaaatgcaaatcaaaatcacaatgagataccatctcacaccagttagaatggtgatcattaaaaaagtcaggaaacaacaggtactggagaagatgtggagaaataggaacacttttacactgttggtgggactgtaaactagttcaaccattgtggaagacagtgtggcgattcctcaaggttctagaactagaaatcccatttgacgtagccatcccattactgggtatatacccaaaggattataaatcatgctgctataaagacatatgcacatgtatgtgtattgtggcactattcacaatagcaaagacctggaaccaacccaaatgtccaacaatgatagactggattaagaaaatgtggcacatatacaccatggaatactatgcagccataaaraagcatgagttcatgtcctttatagggacatggatgaagctggaaaccatcattctgagcaaactatcgcaaggacaaaaaaccaaacaccacatgttctccctcataggtgggaattgaacaataagaacacttggacacagggtggggaacatcacacaccaaggcctgttgtggagttgggggaggggggagggatagcattaggagatatatctaatgtaaatgacgagttaatgggtgcagcacaccaacgtggcatatgtatacttatgtaacaaacctgcacattgtgcacatgtaccctagaacttaaagtataataaaaaaaaaattgtgcaggagcagcaagcagttcccatgctactctagatctgaggagtagctttgggtgcattcctgaaagtgcaggctagaatctgtttattgatcaatttagtactgacacaagcctgtaatatgctgtaataaactttctgtttaaaaaaaaaaaaggttgaccatgtgtttataattgttaaagctgggtgatggatacatgagtgtttagtatattatcatttctagtattgaatatgtttaaaattttgaaattttccataatggttaaaaattataacctatgcagattttattgtacataagaataatctgggagagttatttaaaaagctgatttctggacctccaccccagaaaagtccagttgagttggacagaggtaaggcccagaaatccttgtttgtaatcagcatccaatattgaataaaattgctttagggggtggaagccattgaatattgagtatgtgaatgacaggagcaaatttgtccctccgtatttgaacacgctgactccagtggataatgaagtggaaaggagtgggataagatgcagttgtagtaatccaggaaagggccatggatgaacagtgtggtagactaaagataagcccgggagacagataaaagaaacacacaggaaggccaggcgtagtggctcacacctgtaatcccagcactttgggaggctgagacgggcggatcacgaggtcaggagatcaagaccatcctggccaacacggtgaaaccccgtctctactaaaaatttaaaaaattgccaggcacagtggctcacgcctgtaatcccagcactttgggaggccgaggcgggcggatcacgaagtcaggagatcgagaccacggtgaaaccccatctctactaaatatacaaaaaaattagccaggcatggtggtgggcacctgtagtcccagctactcgggaggctgaggcaggagaattgcctgaactcaggaggtggagcttgcagtgagcccaaatcgcaccactgcactccagtctgggcgaaagagtgagactccatctcaaaaaaaaaaaaaaaaaaaaaaaaaatccaaaaagtacaaaaaattagccgggcgaggtggcgggtgcctgtagtcccggctactcgggaggctgaggcaggagaatggcgtgaacttgggaggcagagcttgcagtgagccgagatcgcgccactgctccagcctgggggacagaacgagactctatctcaaaaaaaaaaaaargaaaaaaaaaaaacaaaaaaacacacgggagatggaattggttaaatcacgtgactactggaaggtgagagataaaagcacaataaatatttccaaatttctgattatgctactggatagatggtgaagctgttctttcagtgaggaaaggaacataggaaaggaattgtgtttggctgtttttgtaagacatgagtgtgatgtgtgggtggctgtagtatataaaataagtaggatgaagctatgcagttgtgtattgagctactggatgaagagaatggagagaggctattgaacaggaagaatattaagagatagggattacctccaaattcctaacactgctttaaccctagagccttcaaatctcttttcttggatttccccatctgtgaaaacggaggtagaaacagccatggtagcataaaataatcagctatatcagtggcagccttaagattggaaaaccaggaaaggacattcttcttttccctttctgcagaactggtcttcagggtctcctgtttctactctctcatttttactgcacccttttcactctctcccttcccgtcgttccagggtggagagttctgaggagcctgtatatgagagccttgaagagtttcacgtctttgtccttgctcatgtgcttaggaggcccatagtcgtcgtggcagacaccatgctgagggactccggaggggaaggtgagtcagccagtcagtcctcactccatgctgagcacccccttttgcaaagccttaggctragcattggaaggaaggcaggaaaggggatatatagacccttggggaaaaagcaagttatcaattagaatagtgcaaaattctcaagagattctgagtaaagcagttgggattagttgacagggcttcttaggaaagaattattaaacatgttggaatgaaagcagggagggactcagttggcagagtgggatgtagggattgtccactaggcasaaacacagccttcataataatcttcatgrcttcctgcagcatttgcccctattccctttggaggaatctatctgcctttggaggtcccagccagccagtgtcaccgctcccctctggtgctcgcctatgatcaggcccacttttctgcactcgtgtccatggagcagaaggagaataccaaggaacaaggtgctgaatgacatgtcttttggtctgcattattttcacttgaaaaaattgaatgagatctaatgtaggaggaaagaattaagtgacatgcaagcccagacagcacatgttgatactgttttattaagccagaagttacgccagagttttcaaattaaaaaaaaaaagggttgggagaaaagcaagacctatataccctcttctggagtaaaggcttatgattaaggtgtaagagcttctaaatgatgcttttctaatttgtcttaaattatgactgaattctctgaatatacattaactggaaagaacatcatgagagttagttgactgactggtggggactcagggagatttgtggcctaaaacatatgctgcgtggtagcgggaaaactagccaattagttttaataccggggtaattcacgtgtaagaattgagaagtgactacaattaaagaccttagtatgattttagtgaaataagtctgtgttcagttacctttctctcttaaggagattccttgatgatatgtttcttcctctccagctgtgatcccacttacagattcagagtataagctgctgcccttgcactttgctgtggaccctggaaagggctgggagtggggcaaagatgatagtgacaatgtccgattggccaggtaagccaggcctagtcttttcatctattttgtgctgggatttcttccacatgtggcatccatctcccagggatttttcctcagctcaggcaagacagtcacaagctaagatgagttttgggaagatggggaggtagaggagaggttgggcaccaggactctttcatggtgcagctgctttttctccctgtgaaagagatgggaatcctagcatctcaacttgttcttttcttacaataggaaaagtgttcatacactgattcatctctaaaacattgatcagaaaatcaggataatcaggccgggcatggtggcttatgcctgtaattccagcactttgggaggctgaggtgggtggatcacgaggtcaggagttcgagacaagcctggccaatatggtgaaacctcgtctctactaaaaatacaaaaattagccaggcgtggtggtgcgtgcctgtaatcccaactactagggaggctgaggcaggagaatcgcttgaacccaggaggcaggggttgcagtgagccgacatcgtgccactgcactacagcctaggcaacagagtgagagtctgtctcaaaaaaaaaaaaaagaaagaaagaaaatcaggataatcaaatcacatgtcttagcccaagtgagaggagttttaaagagttgatcaaggctgggtgcggtggcttatgcctgtaatcccagcatgttgggagaaaccaccatcagagtgaacaggcaaccgaggcaggcagatcacctgaggtcgggagtttgagaccagcctggccaacatggagaaaccacgtctctactaaaaatacaaaattagccaggcgtggtggtgcatgtctataatcccatctactcgggaggctgaggcaggagaataacttgaatccaggaggcggaggttgcagtgagctgagatggtaccattacactccagtatgggcaacaagagtgaaactccatccaaaaaataaataaataaatacgtgataaaaatagtttgctctgagtttttgcctttctggaatttaatagcaagaaaaatatgttccctaccctctcagcccccactctacctccctgtggcttgttaagccttccttctgcctcctgcatcaacttcctgatggagagtgtatgaatgcaaaagctcctcccttagcacttacctagtgcttcactctctgggctcctgccactgggtcccagctaagagagtttgattttaaaatccagagtttatggctttttaaaaataacctctcacctatttatcaaaagctccttctaaataatatttacaacaacaacaatgataatggctactatctagtatttcccattttccagacactgtgctgggctctttccaaacactgttttaatctttacaacaaccctacaggatagatattatctatacccattctcagctgcagctgagtttcagggaggttgaagtgacttgctcaaggtcataaagcttattaattggtggagaaatagttcaaacccaaccctatttgagtcctaagccatgtagccctctcccaccctttctcccaactatatcaaattgctttgcttttaaaaggtgacagtaatttgttttttctctttttcatagtgtaattctgtccctagaggtcaaattgcatctgctgcatagctacatgaatgtgaagtggatcccactgtcctctgatgcacaggtgaagacttctcccacatctaccctggtgtgtcttcatttcattttcagtgacagaacaaggagatctgggatggtttccttctgaatctattctgagtggtggcttacaattcaaggttagaagtaactagaagatgtcagataagttccaaagacaatttttcctgtttttattgtattttttatttttatttttgagatggagtcttgttctgtcacccaggctggagtgcaatggcacaatcttggctcattgcaacctccgcctcctgggttcaagcgattctcctgcctcagcctcctgagtagctggtattacaggcatgcgccaccacgcccagctaatttttgtatttttagtagaggacaggtttcaccatgttggccaggctggtctcgaatgcctgacctcagatgatctgcccgcctcagcctcccacagtgctgggattacaagtgtgagccaccgcgcctggcctttcctgcctttttttttttttttttttttcagaggaagtcttgctctgtcagccaggctgaaatgcagtggcacaatcttggctcacagcaacctccacttcccaggttcaagtgattctcctgcatcagcctcacgagtagctgggattacagacgtgcgccaccacacccggctgatttttgtatttttagtagagacggagtttcaccacgttggccaggctagtctcgaactcctgacctcaggtgatccacccaccttggcctcccaaagttctgggattacaggcatgagccaccacacccagccctttcctgctttttaaaaaccgttagtctcctgttttccacatctcctctccagccagtctctgttatctgatactaaaacatatatatattttttgagacggaatcttgctcttgatgcccaggctggagtgcaatgacacgatctcagctcactgcaacctccacctcttgggttcaagcgattctcctgcctcagcctcccgagtagctgagattgcaggtgccygccaccatgtccagctaatttttctatttttagtagagatggggtttcgccatgttggccaggctggtcttgtgatccgcctgccttggcccccgaaagtgctgggattacaggcgtgagccaccgcgcctgacctaaaacatattattattattattattattttttctttgagatggagtttcactctttttgcccaggctggagtgcaatggtgcgatctcagcttattgcaacctccgcctcctgggttcaagcgattctcctgcctcagcctcctgagtagctgggattacagacatgcaccaccacgtccggctaattttgtatttttagtagagatggggtttctccatgttggtcaggctggtctggaactcccgacctcaggtgatccacccacctcggcctcccaaagtgctgggattacaggcatgagccaccgtgcctggcttaacatattctttaagaaaggttttctggactgtttgttgaacttgagatgatcattatttcgtccaaagtcttctgtagatagacctctgttttgggcactaggagacggagtagcttaaagagctcctaattcagtgggctctgagttagaacaggagcacaggagtagggtcaaattgataactccaatgcagaatgtataaaagttgaggggatgcaaagtggctagacttggttagttttgattagtcaagactttcttgagattagtttcgagcagaatttggcatagagaaatgtataataaagaacattctaatgtctgggcctctcacccggaagccacgtatcatatggttgctcattgttctaaatgaacagtaaggctttattctactatctccttattacagaagggagtcagattgcagtgggggagaaagctgactgactggaacccaggaaggacagtgccatcctgggtgacccttccctcatcatgacagaagcccttctctggagcaaggcagtcactaggcaatcactcagaggacggagttcataggtgtccatccttttctacctggctaatttctatagccatggctgcagggagctccctgagccagatggatgggctagaggtccctgggggattcccccaccccaggctgctgggataactgtcaacagtgttcttgtctcttccaggctcctctggcccagcctgagtcccccaccgcctcagctggagatgagccccggtccactcctgagtctggagactcagacaaggagtcagttggcagcagttccaccagcaacgagggcggccggcggaaggagaagtcaaagcgagatcgggagaaggacaagaagagagcagattctgtggctaacaaactgggcagctttggcaaaaccttgggcagcaagctcaagaagaacatggggggcctgatgcacagcaagggttcaaagcctggaggggtggggacagggttgggaggaagcagcggcactgagacactggagaagaagaagaaaaactcactgaagagctggaagggtggcaaggaggaggcagctggggatgggcctgtgtctgagaagcccccagctgagtctgttggtaacggagggagcaagtatagccaggaggtgatgcagagcctgagcattctgaggactgccatgcaaggggaggggaagtttatttttgttggaaccctgaagatgggtcaccgtcaccagtatcaggaggaaatgatccagcgctacctttctgatgctgaggagagattcctggcagaacagaagcagaaggaggcagagaggaagatcatgaatggaggaatagggggtggccctcctccagccaaaaagccagagccagatgctagggaagagcagccgaccggtcccccagcagagtccagggcaatggcattttccactggctaccctggggactttactatccctcggccgtctgggggcggagtccactgccaggaaccccggaggcagttggcagggggtccatgtgtcgggggcctaccaccatatgccaccttccccagacagtgccctcctgggcgaccctacccccaccaggacagcatcccttctctggagccaggcagccactctaaggatggacttcacaggggtgccttgttaccacccccctaccgagtggctgattcctatagcaatggctacagagagccccctgagccagatggatgggctggaggtctccggggccttcccccaactcagaccaaatgcaaacaaccgaactgcagcttctatggacaccctgagacaaacaacttctgttcctgttgttacagggaagaactgaggaggagggagcgggaaccggatggggagctcctggtgcacaggttctgaaygggtggaacactgaagggcaaggaggctaaacaaagttaagctcaactaattggctcatcaagaacacagtccccatgttgagggggaaaatgcagtaatgtttgtgggagcctggctggaaacttttaagtgtgtgcacacaggagtgctgccaggctggcaagagcaggtcggggctggatggcacctcaggggctgtactattcctctgcagagcttgacttgatgaggtttgaggtacaaggggaaaagatggcgattctgtcttataacctcctgggtcccatccagggacctaagagaaagtagcaggggaaggtttggtgtgtgggggtgggaggtgggcagaagtcttggggaggaatgggcaaaggaggttctcagtcaataaaaccaaagttctttaggttgggaaaaagcacatggtggagtgagaagtgtggaggggaagtgggaaattggacacatttgctattgatttgaattaagctagaaattaaggttggataaattcttccccttgaaggatctggaaagacaaggcagtaatgtgtcctcatgggtgcctgttaggaggtgggggtagtttaaatccgtttgtttagatgggaaagggaggaacttaagagggaaatccttttcctcttaaggtttatttccttccaagcagtcatatgtcatctgttacagtttgagaagagattgctgattaccccctgtcttttcctcatctaagtctttaattgtatttgtttaaagggaagagtgtggtgagaacagccgtcatgtgtgttgcattttctccaggtgaattggggcagagctgatctattttttaaccacagcaataaccatacgttggggtttgagtgcaccttgggaggggtgggaggacagacattttagccagaggctgtttcaaacaaaaccaaaaacctaagtagagcattacaggcctctgtggctgctgcgtttctgtagaaagcaacttattttattgacttttttttttaaggaaaagaaataaaaagaccccagcaagcaaaaacatttaaaaaatgattttttttcctcctacttaagtggttctttctccctttgctctacttttggagaatgaacttaacatcccggcttcttttgttaagccatagctgaccttaatctgtggttagtttattaaaataattaaaaatactttctaagaagagatatttttgatattaggactgatgttgaaacatataggggcaatttataaaaaggtagttagagaaatatattttagtgaactataaccacagagcacagatgactcccaatgagctgatctgtctttaggtttctccctttccctgacccttccctgttctctaggggctgggagtggggatgyygacacagtagggggagctccttcgcattttgcacaaagcacaagtctgaacagcctatgctctggccagagccatttctaagagctttaaaccggaagacctatcctgggccaattttcctttttctttatatttttttccgggaaaaaaagtcaactatgcaattgtatacactcccgggtgcatgtgaagaaggggaataagtgtacttatgtgtccagagtattaactggggctgtttttctgtgtttggatttctcttttgaggtatgtactcataacccatcccttggaacgtaatccccacatttgatctaaagcacttgagcgtgcatgcatgtgcgtgcgtgcatatgtgtgtgtgttttcctcctcggtagccagtcaagattgtccttgttggaaatgctcacggtttataaaggttattttctcctcaacaaactcagaagtcacctattttccaaatctgatttaataatttcctatggctattaattcttagggttttctttgaaaatagatttgtgttaaggaagcagtgagattccaaaggaagggatgtgtatatgtctaggcaggtctggaacctggtatgagatgagcactcccctaagttgcaaaatttaagggttactataaaactcattaatcaagatactataaaaaatgcagtatttaaaaaaattaatgcaaaaaatttatgttggataaaatagcgaaatcttacaggatctgacaggactgagattaggaggagggaagtgaggctgaattgaataagtatggggatgaatccttcttatttaaatttttgatacattgtccatcatagactttttacattaattgtgattttttaaaaatgttgcattaaaatagtatttatcttggttactgggttttttggcactccttaaattttgtgcccaaggtgagtgctttgctcacctcaccctagttacgtccctgtttctgtgatttgaacactagcgagaacaccactgtgtgcgcctccacccccatcacacaccaaacaacaggtggctcagacaccctgaatttgcacagctcacctagctttcctaatttaggccttcatatcatagaatggtggcctggaccaataggaatgaaaacagaccaggggttttcccagagaataaagccggaaaagttttgattctccactggactgctgtgtttggatttgatctgttgttagattctagttaacacttttgtttttaaaaactaaggacaaatgaacaaaaaaccttgtatcatgtttgtttttatttataagttagccaatcccaattcygtttgctttattttcaaataaaaaaagatggaaattttgaggggtggtctaggggtgaatatggtaaaatggggctttaggccttatagctttttattaagaaataaattattttttttatttgggagggtaactatttattgaggcattgaaaaacctctccattctaaggatgagagaccctgagacaatggatattttttataggagatagtgaagtttgttttgcttcattctttcggggagggtcttggtgggatggggggaggtgaaggaataatgcctgggaaattaatatagattcagcttggtttgtggtattttgggaagatgagggaatagaagaggcaagcccatgtcgttactgggttggggagaaggaaagaaggggcatatggcctgcactcgaaatgggcagaaaaattccttagttaaggaggggtgtgtgagtgaagggggaaggtagaccctttaaccccaagtgagggatgatatcatctctcaggcttaaatttaagtgcacttagttcctttaatccagggcaactggggtacctactgaagtttttaatggagaggggagattttcagggttcttgtttttccctttttgatgttagacagtgctactccctccctgctgtgctctctgccccatctccaatggagtaagtattactgtaggataggcctccgcttctcccttaacctatgctgcatttattgaaagttacaagatttaaccagaagtttttcctccatactggtttttatcaacaaaataaaaagattatatccaaagattttttaaagattcagtctttttaaggagtggagatggtgttaaactcagtgctgtagagggcagtggaagggaagtaccttccctctattagctcagtttttttttttctatcaagcgaaactaaggcccacagacaaacaagaattagcagtgacttcgtgttgtatatctgcggggtgatactgagcccaaaagaataaagctggttttgaatgtgttctgagaacctagcttttgccattcttaactccttttagccatgtgtccaaggttccagtcacatttttttttctcaataaagagtatttcagagatgattgtctctgaattactcagacacctctggactctgagtcttctttctttttcctttttctttctttcttttttttttggtttgagacggagtctcgctcagctgcccaggctggagtgcagtggtgcaatctcggctcactccaaccaccgtctcctgggttcaagtgattctcctgtctcagcctcccaggtggctgggattacaggcacccgcaatcatgcccggctaatttttgtattttagtagagatggggtttcaccatgttggccaggctgatcttgaactcctgacctcaggtgatccgccagcctcggcctcccaaagtgctgggattacaggcatgagccaccgcgactggcctctgtgtcttccttctccaatgagtcagtgccccagacatatagccacaggtgagaagacagaattagaagccccttcccggcctggaatcacctgcactccagatttttctaatttccttctttccctccaggcctttcaactatagatctggatgagtcatgcaggcattctgtctcttctactttgcagacagccagtctgcaaatcacagggtattttgccaccatacatcagttgggtaacaaaatattacgatgtccccatgtagactttctctgtgccatctcttgcattggccaagtgggtaaggggcagtacaaaagagcaacggaagctggctggcagcagttaagaggagtaggggtgggaaggaccttggcctctttctgtgcttataactggatctgtgactcatcttgtgagtcactcagctccacctccctcctccggctgcccctcccagcagcctttactcctggcacaaacctgcagccagaacaggattctgaaaatggaaaaatctgatatagccccttgcctctccacccttcccttcatctagtgcttctactgggggtgtgtggggtggtgagaggcagccttaaccctcagctcctgcccactccattcctggttaagtattgatccaaatcgcccaattcttttctcctcctgatttccccccaccccgcttttttttttttttttttttgagacagagtttcgctcttgtcgcccaggatggagtgcaatggcgcgatcccggctcactgcaaccttcgtctcctgggttcaagcgattctcctgcctcaggctcccgagtagctgggattacaggagcctaccaccatgcctggctaattttttttttttttttttttttttttttagtagagtcgggggtttcgccatgttggccaggctggtcttgaattcctaacctcaggtgatccgtgatccacccacctcagccttccaaagtgctgggattacaggcatgagccaccacacccctaccccccgattttttttctccgtgttcctccactgtctccacacctcaaagtgctaaagaatagaatgaggctcttgaatgaaggatggtggtgagaaggaaagtggataatgggatttaaaagttatggtacacacctcttcctatgcttttttttttttttttttttttttttgcgatggagtcttgctctgttgcccaggctggagcgtagtcattagatcttggctcactgcaacctctgcttcctgggttcaagcgattctcctgcctcagcctcccaagtagctgggattataggtgtgagccaccacgcctggctaatttttgtattttcagtagagatggggcttcatcatgttggccaggtggtcctgaactcctgacctcaagtaatctgcctgccttggccttccaaaatgcttgggattacaggcgtgagccactgcgcctggtccctattttctttttacaacagaccttgggaaatattttcttcccccaagaggttgaggcccatggaatgcattaggggcaggtggggtggtggtgctctgtagcctttaggacttctagaatcaggcttctgggccaccttcttagcaggtgtatacctctttgttccagactgactttctgtctcacaatatcttcactatttccacagttgcagccaagacaggaaactgaaagctgaggccagaagggtggtgtactggggggaggggaaaattgagtgtcactttggaaaactggggcccccatctaaggattgctgcctctgtagattcaaaagcaataaaacagcagctcattaactcttattttgtattttattttctgtctttttcatgtctaaataaagatttttgctttgctgtccccaagtccccctcctttaaaggagctgcagctccttctctccttgttcccagctttccttacccatctttgcttctagggttgcagatgggagggacgggggatggactgctgagctgaagagaggtttccagccctcacctgtgaaagtcctgaacatgaatcattcatttggagatctggtgtctgggttggaggggtggagtcacatacgggaatgggcacttattgcctattggttgtgtatctacgtgatgggcaagattaactggtaagatctttttgtcccacccacatccccaagacttgcacacaaactgtacttgtgtctgcatcttggacacatttccatctctttttatacttctccactgcagtcttcacatgatgtctgtgtcatgccctctagagaaagatatgcaaaaccactttaaccagtttccctgcttcctcacctaattcttgggcctctgctgacaaaaatccccccaggtctaattttcattttcttctggaagaggcggcaaggaggcttgaaccactttcacattcctacccctctccccgccccaaacccctttgagaagacaaaagaacggagcttttaagggaagtcatcactgagacactccagacaggtagcccagatgattccagcttcataatcaatagaactgctcccctcaaacggtctccagtactcatgaacaggaagagaacagggtctgggattggggtaaagaagggagtcgtttttctctcagtccccatttcttccccacccgtccgtctcagactccaccgtttcctctccacttttccagaattgtgtgtattctcctttaaggggttgggcatctctcccgccctctccagagtcgactgaagtttccgaggagacttctcaggctgggctggacacacctttccaaggacccccaaactctgctccgtgcacgtcaaatgctcctttcccttgtgtccaaccccctacccctctccctaacacccctcttctcaacaagactcagcctctccccgaggtgggtgagcatccttgaggtttcccacccttaactgctgtgtccccggatggagccagagaaatgtggtgggggggccggggccagagtttcaacattgccccccagaaggaggagccagagatgggggtaaggagaaggaatttggggggtgtcggcaagagggtgagaacggggatgaggtggagataaaagggggaagcaaaggctctagaggaggaggaggagggtgtgtctgtctatcagcttctgctgatggagcctggtccgtctttctcagtctcaagttcgttgtctcattatccattaaccagcccctccctttactgtttaccagccctgttaggtctggagctccccacagacactgatctcagtttcccccgagagtgtgagtgtaggcctctacaggcagctgcctctggggagttggggagcctaggggttaactctagacccccctcaaccctctggaccaaagtctgtccaggaaaataggatgccggagcccaggagtcgtcagcctagcagttgcctggcctccagatgcctcccaggtaataatgccctatcactctccaaagacttccaaatttcatcctacgccaatcttgtttcatgccctcaccaaagatacccctgtgttcctctcgtggctcgaagtacgtctgcctgaggctcgctgtcctccctgacagcctctagagctggctgagagctggaccttgacattccttctgtttccttgaccctgttaccccttttcaaatttacttattcgatacatagttagtgcctgctatgtgccaggccttgttctaggctctgttctagttacagaaattaaaaaacatttatctttcctcataagcttacattgtagtgggctttggggaggattttaatcttccctatttagatctccctttcttggaggggtgggtgtatccaagtgtgggcaacactgggaacagtcataacagggcttcccttcttcccctttaggggagcagatcctagcatgggccccaggggtgaggaagggcctggaaccagaattgtctggaaccctgatctgtaccaactttagggtcaccttccagccctgtggatggcagtggaatcaggtgagatggttggggccacagaaatgacagctagtgggaaatgggtaggggagtctagcaggatttagacaaacattatgggttaagggctgtcttttgaatgtatcattgataatcagtgggaactctctctagggttgttgccccctagaaggggttggggctgccagggtaggaaaatgagggcgatttcagatgtctacccagtcacgtgtttcgtctaggacactcccttgaacagtgaatacgattttgccctggtcaacattggacgattagaggctggtaagttgggggggggtttggtgaaggggttcactggggttgttggaactccctcctcatccttcctctgttctcagaaaacagcagggatggagtgggatgggctgcaagagtcccttctggagagactctggtccatggttacactgttctgtacctcttgacttcagtgagcggcttgtcccgagtccagctcctccgtccagggtccctgcataaatttatccctgaggagattctgattcatggccgagacttccggctgctcagagttggttttgaggctggaggcctagagcctcaggcttttcaggtaagaggcccctaacctgaggctttctcctcacctcagaaccttgggatcctctccctgacaatttctgagactcctccagcccctgggatcctctcatcattccccct

SEQ ID NO: 98029 - DNA, 48420 bp, Homo sapiens
ggtttcaccatgttagccaggatggtctcgatctcctgacctcatgatccgccctccccggcctcccaaagtgctgggattataggcatgagccgccgtacctggccctccttaattcattctacagcaaaggaggagataacagggtcatgaatttattaccctaaaactgaaggtcaaaggtgaaatgatttgccccaaagcccaaagttaatagagaaccaaattctgatttcacatttccatgctgcctcatcagcaattcagaaaagaaaaatctcaattatgctacttacctgacaaacaaatttgacatctggtgaggatctattgaagggtttcgggaaaacatagaagttaaatgacttcgttatatacctgggataagataaaaggagacttaggaggtgacattgtgccacaaaaacggaattcccaacgtttgttaacacaacctactttgaatctgtgtagtcatacttaaaagtgcaaaggccaaactgaaatagcaaaaagtccatggaatgctggaaaagggaaataaaacatctgtcacaaaagtgctgcatattccatgtgagcatagcattctcaaacaggtgggctttctgaattactcaatgagacttcagcagaatacttccaattagaacagattacacatatgaatcagaagcattattaatttgtatacatttcataatacttttcccatttaaggacctatttatccatcatccaaagaatcatattaggtctatttccaaatgattaaaataactgcctcatatttcctatgaatcaaattaacactgaaaatgctaaactttccccaaaatattttccagcaaacaattatttttgctgttttaaatatcattaaaataacactttaaggccaggtgtggtggctcacacctgtaatcccagcactttgggaggctaaagcaggaggatcatttgacgccagaagttcgagaccagcctggtcaacaaagtgagaccgatctctacaaaagaatatgtaaaaattaaaaaaaataataataattggctgggcacagtggcttgcgcctgtagtcccaactacttgggaggctgtggcaggagaatcagttgagccaggagttcaaggctccacagagcagtgatcacgccactgcaccccagcctgggtgacagagcgagaccttgtctctaaaacaagacaaaacaaaaaaaaaaatcacttcatggctaggtttgaggagaaaatactgcacttacaaaaccttaatgcacaagtttagtaacaatatttatcatttaacataaggaagactaacatgagaaagaaaaagatttcctagcacatccacttgcctttttaagcttctgatacctctcttctggagtgtcaaaaccatttgttaatgcagagactgaaggtccatcactgattcctagattttaagaaataaaaatttttagcttactaataaatactaacgtaaaaatgccagtcaatcattcagtgcctctataatgtcgtatcacgaattaaggttacttggaagcactccctaacttacttttttaaaataagcattaatttcagtggccaccaggttaaaccctctaataatgaacttagagatgcgaatgtttcaacatgagaataggcagttccagcgtctaaaacatgacttaaaacacagtaatcatgtaagaaaacaatctctatgcttgaataagttttgctgctttaaaagattcctgtataaacagacatcaataaatccctaagtatattattgccagagttccagtcttggtcaagagtttggagtggttaatatctatgcaaagaatgtatcttcaagattaagagaaaattatttctctaagtgaaaactcttagcttcctagggaagtgattccaactagacactacctaaagccaaggatactatttacccctgcatggattccttcatgattcaaacatggaaaatcagacagcaaaaatggatatccatatcaaagggagtgaaccgttcatattgacatcagcaatttaaaaactagtctttgctccccctaaaaaaggggaaaaaaaatttgcaactttaagtgtcagtgaagtatttcctgtatacacacctgttgaggcaggcaatgaacacgtccactaatgcataaagaaatatctcatttatctgcaaaaacctgaccctagccggtcacaaaagggcaaatattgtaagattccacttatatgagatgttaagggcagtcaaattcagagacaaatggcggttgctaaaggctgggcgaaaggagaaatggggagtttaatgtgtaaagagtttcagactgtgaagatgaagaagtcctagagatggatggtgatgtttgcacagcaatgtgaatgtacttaatgccacttaactgtaaagccacttaaaatggcaaatttcatgttatacctattttacaatcaagaaaaaaaacagtctgaccctaatcctcaagctctctgcaatgtacacgccgcactgttttaagcagcatcaaaaccatcatctctatctgagatcctgagtccaatcacaaacctacggcgtatcttcatttctttcgtgcttttgaaacgtttaaagggtaacactgagacctgtgaaacccgcccaaggctactaacagcaagaggccaccaccaagcataagaagttgggggctgggggattgaaggagccttggctatgcactgcaaagtgctagcctgagcttgcaagggagggatacctgaaaactccccatcgatggcgaagaagtcggcctcctctatggcctggtacactttgtgaagattactcttaaaatctgcggagaaaccgaaaagaggctcagaaccagtggcctgaattcctgctaaggggagagggaaggagggccgaggagctcccgaggctgagagccggaaggggaaaagtcccggaggtgtgcaccggggcgaggggaatcaagtcctcgaggggtgcatgggtcaggggggacaagccccggggggtgcccggcccggagaaggacaaggccccggatggtgccggggttggaggagtaagtacaaggctcctagggtgcacggtccgcagccggaaaagaccccaagaggcgcaccggcttaaggagggaaaagccctgaggggctgcctcagccccaggcccagccaaacacgccggccatggtctcggcctagcaggccaggggcagccgggtgtggggaggcggggaggtgtacggcggacacgcactgctcctgattatctccattctgcagagtggccggaaccttggccccacccgggcccgcgcccgcctcagcggttctactcgccgaattccgcggcgactgcggcagtagctgaggcagccgcagcggtgacgccggccgcgacttccggaaacagcgcgcgcctgctgcgcttgcgtcagcgcctgcgcggcggcgggggcggggccaaggctgggctcctttccctccttatagggacaggggaggggcgtggctatcgaagtccccaaggcgtggcctaatttgtgcgggctttcacttcagtagaaaaaatgtgcatgtctcgacatccagtcgaccaggaaatactgactgggtttctgtgatatgctagccactcttacaggggtggagatacagtgatgaacaggaagacgtgctccctgccccattgtagcttaaacttggggtaaggggaaattcaggcaggagtgaaacttgccatttggtaacacatgaaaatcgctattaagaaaaagagcggggcgatgtaatagagaataatgggatccgggtgcggtggctcacgcctgtaagcctaacactttgggaacccgaggcgggaggatccgttgaactgaagagttcgagaccagcctggacagcatagtgagacctgtctcttaaaaaaataaaattaggccggacccggtggcttatgcctgtaatcccagcactttggaaggccgaggcgggcggatcacgagatcaggagttcgagaccagcctggccaacatagtgaaaccctgtctctactaaaaatataaaaattggctgggcttggtgactcatgcctgtaatcctagcgatttgggaggcagaagcgggcggattacctgaggtcagaagttcaagagcagcctggccaacatggtgaaaccctgtctctattaaaaatacaaaaaattagccgggtgcagtggtgcgcgcctgtaatcccagctattcgggaagctgaggcaggagaatctcttgaacctgggaggcggaggttgctgtgaaccgagatcacgccactgcactccagcctgggtgacagaacgagacttgttttcaaaaaaaaaattaaattaaattaaaagaataataggggttgttacttaggtgatcacggaaagcaaagctgagacccttagctactgcattagcctctgggaatactatgtcgagtgcaacatatgaggcccggccctaatggaattgtatgttggtttggggttgctgttctccaatgcctagcactgggctgacacgtagtagacactcaataagcatgggttgaatgaatacattcaggttggtctttcacaaaagccaactatgaaaagttggttagtgccggatgcgatggctcacgcctgtgatcctggcactttgggaggccgaggcaggcggattgcttgaggccaggagctcgagaccagcctgggcaacacggtgaaaccccatctctactaaaatacaaagaattagcctggcgtggtggcgcacccctgtagtcccagctactcgggaggctgaggcaggagaactgcttgaacccgggaggcggaggttgcagtgagccaagattgtgccactgcactccaacctgggcgacagagcgagactccgtctccaaaacaaacaaacgaacaaaaggaaagttgattagaagacctattttcaaaatctatctcagccacttattagttctggaatgcattaaaccttcctaaacctcaatttcctgggattgtattgaggctcagtggtgctaatgaatgtgaactgggaagcagcgtattaataaatctgtataaataactgtttaatgggggcctggcgccatgactcacacctgtaatcccagcgttttcgggggctgaggcaggagaatcgcctgaacccaggagttccagaccagcctggggaaaagagcgagaccctgtctccataaaaataaaatgaaattttaaaatgagccaggcgtggttgtgcacgcccgtagtcccaactattcacgaggctgaggtgggataatcgcttgaacccgggaggcggaggttgcagtgagccaagatcgtgccactgtacgccagcctggcgggtgagagtgagactctgtctcaaaaacaaacaacaacaacaaaacaaaaccaaataatcagcataagttctagacgctgtgacctagacgctgggaaggggcgaaacgtggtgataagaaaaccatttcaagctgtacgaggtggctcacgcctgtaatcgcagcactttgtaaggctgaggcaggaggatcccttgacgccatatgttcaagatcagcctggaaaacgcagcgagaccccatctctacgaaaaaaaaaatattttaatagaaataaaagtcatttaattccgattcttaacaccgtaaattgaacgtatagtcctgtgattttctacataaaatgtgaaggcaaaaaataactgtagagagtacggtgcggccttgtaatattttaatttctaggcaaagcttgtatcctccggatacaagaacagccgcccaggaggagcggaaactgacacacacccgtcaccccttgggctgtgactgccgagcccgggtactcggtctctgggtgaagaggaaggggcgggaccggcggtattacgcatgcgcccacttcctccggctgggagtggccgctctaggcagcggggaggtcgcggggttgaggggggttgtgaaaggagagcggcctctcctctatggtcacggggccggggcacgcttcccccactctgtcttgttacttccggtagcgaagcctctccctcttcctctgctcccgcggggtctgtgctgagaataatggcccggttggcccgggacgagtggaatggtaagccgcgacacggctggggggtgctgagggggcgactcgggcttgatatcggggagtgatgtggaagacggagcgggaatcccttctgcggagcctccccagccgggtcgtaggaggcgcgcggggcctctcctcacgcaggcccgagtcctgagcatccccactcctggccgcggggttcggaccccagcttggccaactgcgctatcccttcccgagagccccacgtccgcacagccggtcgctgggcctcgcctgcgtcctttcgggggtcagggtcagagccactccctcctggggctccctagggcgggaaggaggaggggtcgcttccaaacaccttggaggggaaccacggggcgcctgcccgccaggagcgcttgccacaccctgcaacagccggaccagaattgatgaggcttctgatagtcgccacgctgagtttacggtctaattgtcgaggcacgttcctggcctaaggcggagcgattgtgcccattctttaaagtagggtgaccgaagcgcagaagggagaaagtgaaatcccaaagtcacactggggccaggcaagaactcggctcttctgattctgcgacttgcggctcggaaataacttaggcaaaagagaattttcttttttttctttttagagacggagtcttgccctgccgcccaggctggagtgcggtggagcaatctcggctcactgcaacctccgcctcccaggttcaagcgattctcttgcctcagccttctgagtagctgggattacgggcccgcgtaaccacgcccggctgatttttgtatttttagtagagacggggtttcaccatgttggtcagactgttctcgaactcctggcctcaagtgacccactcgcctcggcctcccaaagtggggagattacaggcgtgagccaccgcgcccggccgagaattgtcttttattaaaaaagccggcgggagggggcgacagatgagagtcaggttgtgtctaaacggggacctttggaggggcaggaggcagcatcccagcttccgcggaaaacagagtgagagcctagacgctgttaagccctcaactgtcgccattgggtcctccccgccgaagcccattggtcggtcctttgcaaggggggtggtcttgatgtcatgctccaaatcgccaataggaaagagctttactctcttcccaggacacacccccgagccggcagggactgcacgtgctgatggggttgttttgtttgttcttgtcgctgctgttttctcaacatccagcctgggtgtatcctgacaggtgtgctctgcatttccctatatccataaacttgatggagacattgtatttctccagggcagttctttttgtttgctttttggttccagcgtttggcagtgccactaagtaggtagccatcactcaataaatgctgctattgataattctgttaataatgccgatcagccccacacagcaaactttgagtacctgtagatagtttgtcatctaaacctcacagcagggcggggctccgcagctcacgcctgtaatcccagcagtttgggaggcagaagtgggagtatcccttgagcccaggagaccagaccaacctaggcaacatagggagacgctgtctcttaaaaaaatttttttaaagtaaacctcccaacagcccttcgaagttgacatgattatcctagacggatcagtgggaaataggaagtttaggaagaataaatcgtgacgcgatttggaacccagatcagtgtcactcctaagaccatactgtttcaactctaccagcctaaggaaattataatccaggagatgagaaaacgtacacaaataaaagttatgctaatgcacagagacaagaaagattaatttgggtgttgaggagttagtcattaaagactttcaagtgacagttgatttgggtctttccagttggatacttttgacccagcgatgttgtgaagttgtgttacaggtgaagggaacaatgtgaggataaggaaaaatgtccaaggccaggcacggtggctcactcctgtaatccctgcactttgggatgccaaggcgggcagattgcttgagctcaggtgttcaagatcagcttgggatacatggtgaaaccctgtctctactaaaaatacaaaaattagctgggcatggtggtggacgcctgtagttccagctacttgtgaggctgagaaacaagaatcgcaggaacccaggaggcagatgttgcagtgagccgagattgtgccactgcactccagcctgggcgacagagtgagactcagtctcaaagacataaaagattgaaaacaaacaaaaaccaatagttaaagtgcgtgtaacttggtaactacccatagttttttatagctatctgagttactgacttggtaactaaccatagtttttgatagctgagttactgaacatctacagagtatagtacaggataggtccttgcatatatgccacgagaaatgaaagagggcaggctccagcgagagccaggatagccttctcagcccgccttcgtcttaccctacaccacctagggcaataaatcacagggctttaaggtctaggcagcaagtcagcatctagaggagctagtcacctttgctccactggtttctgaccctgtccagaaaaaaaatctagttggagtttgaaaactcaatgttttatacagtaagtgactggaaatgcttctctctctttttttttttttaagatggagtcccacacccagctaattttaatatttttagtagatacggggtttcaccatattggccaggctggtctcgaactcctgacctcttgatccacccgcctcggcctcccaaagtggtgggattacaggcatgagccactgccccggcctaatgcttctcttatgttaatgggagagccggcttttgtctgttctgtttgcggttcctgaaccttgccttgcttacatttgagcacgttttaattttgtagtcactataaatgggtgtgcactctagatatttaataatttctgtagtattctgctggtagttatagtgatgtctccaggaatggacctggagtgtcagaaataggggtttcccccatgaaggggtgggttgcccctccacacctgtgggtgtttctcgttaggtggaacgagagacttggaaaagaaaaagacacaaartatagagaaagaaataaggaggcccaggagaccagcgttcagcatatggaggatcccgccagcctctgagtttccttagtatttattgatcattcttgggtgtttctcagagagggggatgtggcagggtcaggataatagtggagagaaggtcagcagataaacatgtgaacaaaggtctctgcatcatagacaaggtaaagaattaaatgctgtgctttagatatgcatacacataaacatctcaatgccttacagagcggtattgttgcctgcatgtcccacctccagccctaaggcggttttcccctatctcagtagatggaacatacaatcgggttttataccaagacattccattgcccagggacgggcaggagacagatgccttcctcttggctcaactgcaaagaggcatgccttcctcttatgctaatcctcctcagcacagaccctttacgggtgtcgggctgggggacggtcaggtctttcccttcccaagaggccatatttcagactatcacatggggagaaaccttagacaatacctggctttcctaggcagaggtccctgcgggcttccgcagtgtttgcgtccctgggtacttgagattagggagtggtgatgactcttaaggagtatgctgccttcaagcatctgtttaacaaagcacatcttgtaccgccsgtaatccatttaaccctgagttgacacagcacgtgtttcagagagcacggggttgggggtaaggttatagattaacagcatctcaaggcagaagaatttttcttagtacagaacaaaatggagtctcctatgtctatctctttctatacagacacagtaacaatctgatctctctttcttttccccccacccccacccattcctacccctatttctattgtaaatgtctctgcatagtcaccctaacagctaccagctagagttcatgttccaaaatgctgtgtggtcaaatgctagtttgtttttctcagctgtgcagtagcatctctatgatgtggcctagatgataaaggagtaaatcagtcctttgaactaataaccgttattgattactttatcaggataatggcgtattaggaagacaggctttaagtcagaccatgatttttttttttcttttggtgtttccgcctggtttccaaccagggaccagaccatgatttaaaacatggctctgccctttactagttagaactccattttctcatctgtaaaatgaacatggtagtaatgcttattccatatgattgttatgtccttaatattataaggcctccgtaaatattaataattgtcgcggggtgcaatggctcacgcctgtaaatcccagcactttgagaggccacggcaggcagatcacctgaggtcaggagtttgagaccagcctggccaacatggtgaaaccccatctctacgaaaaatttagccaggcatggtggcgcgtgcttgtaatcccagctactcgggaggctgaggcaggagaatcgcttgaacacaggaggcagaggttgaggtgagccaaaattgtgccactgcactccagcctgggtgacagagcaagactccatctcagaaaaaaaaaaaaagtcatttttttttcctgcaatgtattttatttccaatgctgtattttccctgctgctagagaagtttaatttctctctttgattttttttttcagtttgtaccctggaaaaataaggtgataaatacaggcaatcattgcgaagtaaagaagtcatctattgtcagttaatatataacgagagaatttagcctaaccagaggcccatggaagccaaaatctttctattcttacactgaaccttcttgctgagaaacaattgaggtcagctgggctcatgccataatcccagccctttgggaagctgagaccagatgattgcttgagcccaggaactcgagaccatcatggacaacttaacaagaccctgtctatacaaaaaaaattttaattagctgggtgtggtggcacatgcctatggtcccagctacttgggaggctgaggtgggaggatcactggagcccgaaagttcaagcccacagtgatccatgattgcaccactgccctccaggcctgggcaacagagtgagaccctgtctctaaaaaagaagaaatgattgaaatcatatttttcaggctggacttccaataaagtagcccttaaaaggatcattcttaaaatattagccatatacaatggtcataataaatgtatgttgagtgaaggggtgcaaccatgatcatatactgctgaaccaagtggtttaaaaattacgatttctttattttccctgtgattctggataaagattacaatttctaaagagttaacaatcattacatcacaagatctttataagtaagggtataaaaattcttagcctgggtgcagtggctcacgcctgtaatcccaacactttgggaggccaagatgggtggatcacgtgaggtcaggagtttgaaaccagtctggccaacgtggcaaaccccatctctattaaaaatacaaaaattagccaggcatggtgctgggcgcctgtaatcccagctactcaggaggctgaggcatgagaattgcttgaatccaggaggcggaggttgcagtgagccgagattgcaccactgcactgtagcttgggcaacagagtaagacttgtctcaaaaagaaaaaaaaaaaaagaaaaattcttaaactcagaattaatgatttctctttaataaacgcagtaagaatgattgtattaattgactttcctaagtgttaattggacagctaaagaagcaaacagggtgccactgcctcctggagaatagccctctggatagatccatagatgatcattcaaattcaccaactcagaaaaacaagttcctttgtagagaccgggtttcaccatgttgcccaggctggcaggctggtaggctggtctccaactcctggaatcaagcagtccacccgcctcagcctcccaaagtccagggaagaatagccacgttcatcccagcaccccagaactaagaaataagttcttttttttttttcagacagagtctcgctgtgtcacccaggctggagtgcagtggtgcaatcttgtatcactgcatcctccacgtcctgggtgcaaatgattatcctgcctcaacctcctgagtagctgggattacagtcgtgcaccaccatgcccggctaatttttgtatttttggtagagatggagtttcaccacgttgaccaggcttgtctcgaattcctaacctcaggtgatccgcccacctccattttggtagacagagcctcctaaagtgctaggattacaggcgtgagccaccacgccaggccagaaacaagttctttagttacatgcatcattgggagattgtgtgtgttcccagtctttccttttcttttagggatttaaagataattatactttgtcagttaggcatgtcttcaggaaaacatagagaaggtcatgttgattatatatcttggaattgtccagatcctcagagattatgatattggtttcctgtcagttgtgccaacaatgataagtaacgacctgacgtgaaatcaagagagaggaaagctctggtcaggcacagtgactcaaacctgtaaccccagcattttgggaggtcgcggtaggcagattgcttgagtttaggagttcgagatcagcctgggcaacatggcaaaatcccatctctgcagaaaattagccaggtgtggtggcrcacacctgtagtccaggctacataggaggctgaggcaggaggatcacctgagcctggggaggtcgaggctacagtgagccatgatctcaccactgcattccagcctgggcaacagagtgagacctagctccaaaaaaaaaaaaaagaagaagagagagagagaggaaagctcgaagctgacagaactccaaaagctaactagcctaaagccaagctgcctagaaacaaccatatatacccattagtacacttggaagaaggcatcacattatgggacaggggatgaaagctcgggggtcaggcaggtaacagaactgaaatggacaggtgggagaggagtgtagcaagctgacgctggcacggctgctgagttcctctgctcgagctgatcttgtcatgcgtgatgcgattccagtattgccagatctctgggtttttgtttttgttttttttcaagagaagccaggaatctagatttttatgtcatatcagatttttttttgtaaatgctggcacctcatttaacttagaaaagggagaaaaaacaccaggtgaaggaaagcctccctacaggccaggtgttgccctggtagggcggtggctactggtggtgagactgttccaggacacggaagatggatgatgatgttaataatgatgcgtcaccgtggtgaggctcacctgcttccttataaccactgcaagaggcagaagtgtgtcgcacattaacaccctcttatcccagtagatcagcagtagctcttaaccgcctctgggagttggccccttctgagagcctaataaaccctatagactgccttctagaaacatggacgtaccatacacaaacgcaagcgtggcacagaattcagacttcccgaggcatctctccagataccagttgtagacccaactttttattcagaaaccttagctcttcagagtgactcagtgcctatgggaactcctgaggttttgctgtcctcttcagttctaaggtgttcagtctatggttttaaacttgtttgtttgctgttttgtagatttttccaaacccagtcattcttcccattcgtttttgaactaagtaattattgcttctcgcccttttggctaagatcaactaaactkggtaaataacagttatgatttcctaaacacaagtgtatccatatgaatggagcaccaggggtaggaatagaatgattctcctccccgcaatcctgcccctacccccttgtctttggagccttcaagatggagaaaacagtgaagagaagagtagctgagagctgcttctaacgcctgcagcctgctgctgacagctagccatatgtgcagagaacaactgtaaacatccttaggaggtggaggccttctcaaagaggcctttaattattaattagttaataattaataaccagcattattgctggtgcaggagggtgtgaacccaggaggcggagcttgcagtgagtggagatcgcgcccctgcactccagcctgggcgacagagtgagactccatctcaaaaaaaaaaaaaaaaagtatactatagaggccggacatggtggctcacgcctgtaatcccagcactttgggaggctgacgcaggcagattgcccgaggtcaggagttcaagaccaacctgaccaacatggtgaaacccccatctcgactaaaaatacaaaattagcagatgtggtggtgcctgcctgtaatcccagctacttaggaggctgaggcaggagaatcgcttgaaccccaggaggtggagattgcagtgagctcaggttgtgctattgcactccagcctgggcaaaaagagcaaaactctatcactaaaataaaataaaaatcaagtgaattgttaccatttatggtagacttaccatgtgccaggctctgtactaggcacttgactcgaattctcttctttaatgctgcaaaactcccactatggttaagtgctgtcattgtccctcatctatatggtgagcaagctgagcctcaccgctggtaaatggcagaggtggggtgagaacccaggcagcccagccatgggacctgtgttcctaaccactgtgcctccagagcatgaagcgtgagcccttccctgcatggccagtgtgggcggcggagagcaattttcagtcttttccttcacaatagcaagattgagaaactcaccagaaatagtatgaataatcatttctatagcgcgtatttacaccatacaaattttgagccactttccttcactgtctctaatcctcacaagaaatcttgatggtttgtgtactgtgaccaccatttcacagttgaggaaacttgatcagagagcttgagtaacttctgcagagtcacagagctagtgacttgggggagttaagagtccaactccaagatctgtgtcatactacttctcaatttaaaaaaatttttaaaaatgtctcctaaaacccagatgaaaacaagaagagaatggtcctttgtcatttgcttaccttttgtcatttgcttattagtaatattagcatttctgtggcaccaagctggctggatccagagggcatgagatgcattttttgggttgatttggagggaaagggtatattgagccatggcagatttggcctggcacagctagaaaatgaggcttcactcacttcttggaattgctcgcattagagcctctgaagtcaaatgtttataaaataatgattgcctaatgagaaggcagatttgtgtgcacaacaagtgttatttacaggaagcatatctgttgttaccaaccccagacattttactaggccaagaagctggtttatttaaagtcatagacctggaaaggtctttgggaatttaattgaggccaggcatagtagctcacacctgtaatcccagcactttgataggccaagactggcagatcactcgagttcaggagttcgagaccagcctggccaacatggtgaaaacccacctctactaaaaatacaaaaattaaagccagatgtggtggctcatacctgtaatcccagcactttgggaggctgaagagggtggatcacctgaggtcaggagttcaagaccagcctggccaacatggcgaaaacccgtctctactaaaaatacaaaaattagctgggcccaatggcacgcacctgtaatcccagctacttgggaggccaaggcagaattgcttgaacctggcaggcagaggttgacgtgagccaagatcacaccaccgcactccagcctggctgatagagtgagacttcgtctcaaaaaaaaaaaaaggaaatttaattgagaacactgagatcagggaaatttcattttctaaggaagttagtgaaggagaatgatccagaaatctctgcccacatccttcgagtctatggaaccttccactacacatattattttgctttactacatttgaaaagtataacaaataggccagaaagaaattgaatgctgattatgtggtttatggtatgtggattttaataaatcaaatttgtcactttaaaaaattagagctccagcctgggcaatgtggcgaaactgcatctctactaaaaatacaaaaaattacccgggcatagtagtgcacacctgtagtcccagctactcaggagggtgaggtggaggatcacctacctgagcctgggaagttgaggcggcagtgagctgtgattgcgccactggactccagccttgttgagaatgaattaattaattaattaaaattagagctttagtattacaactcctttacaatttgtctagaaggttttctggtctttatcagaaagcctcccccacccccaccaaaaaaaaaaaaaaatcaggctgggcacagtggctcatgcctgtaatctcagcactttgggaggccaaggcaggcagatcacgaggtcaggagatcgagaccatcttggctaacacggtgaaaccccgtctctgctaaaaaaatatgaaaaattagctgggtatggtgggttgcacctgtagtcccagctactggggaggctgaggcaggagaattgcttgaacctgggaggtggaggttgcagtgagcygagatcacgccactgcactccatcctgggccagagagcaagactgtgtctcaaaaaaaaaaaaaaaaaattagcgcttcaatagaatgtcaatacttttatattaactgctcttcaaacaactactatttgccttatttttgtctctgttttttttttctagattaatgatgttttgcagcagttttctacgtctgaaattttttatgtctctggaacccagaatttgctaagagatggaggaacctcagaaaagctatgtgaacacaatggaccttgagagagatgaacctctcaaaagcaccggccctcagatttctgttagtgaattttcttgccactgctgctacgacatcctggttaaccccaccaccttgaactgtgggcacagcttctgccgtcactgccttgctttatggtgggcatcttcaaagaaaacagaatgtccagaatgcagagaaaaatgggaaggtttccccaaagtcagtattctcctcaggtaatgttcagcctatattggtagcacaaacagcccataaaatgtggtttctctcttgcttttttttttttttttttaacagagatggcgtctcgctatgttgcccaggctggtctcaaactcctgacctcaagtgatcctcccacttcagcctcccaaagtgctgggattataggtgtgagccaccatgtccagccagtgggctttctcttaacaggaacagcagtgtttgaaaggtcgcacacttggagcccacctccttgggggtggatcttctggaatatgagtcagggagctcaaggaactggaaatccagattctcttcctcataggtgaccatgactttttaaattatttattatgaatgaaggaaagaaagaaagtctggttagcagaccgttgctggtaatcctgtcatataaaggccagaccagtggctcacgcctgtaatcccaacactttcagaggctgaggtaggaacattgcttgacaccaggaatttagaagcatcctgggcaacacggtgagtccttatctctatagaaagttttaaaaattagccaggtgtggtggtacatgcctatagtcccagctatgccagtggctgaggtgggaggattgcttgagcctgggaggtcgaggctgcaatgagctcacaccactacactccagcctgggcaacagagcaagaccctgtctcaaaaaaaaagaaagaaagaaagaaagaaagcaaatggtataactgtataattgtgaataactggtttgttgctgattttaataatctttagataaccccagttccagttatcacattaatagagtttctcatgtgtagcatcacagtgccaaagccacctttcagatagcttgttattttctgcttctttggctcataatgtacctgtgaaggctctgaggcttaaatcctcttcccctcttctattgtctaacaatgtgtgtgcccttcttgatttcaacagagtactagaaagttccatgaacccaaccttttctttttcacaaaagatgtgtttacactttgctcttacctgtcagtcttgatttagctgaaggttaaatttaatcttaaattaaaggagggttctttgtgtataactgaacatttaaaaagagccctacaatttaagctgacagttggtcttattactgaattttgcttttttcccttcttataaactgattttaataacataagatacatatatatacacacacatacacacacatacatatattcattgtttatattctttgagacaaagtctcactctgtcgctcaggctggagtgcagtggtacgaccttggctcactgcaacctccacctcctaggttcaagtgattctcctgcctcagcctctggagtagctgggattacaggagcctgctaccacgcccagctaatttttgggtttttttgtttgttttttgttttttgagacggagtttcactcttgtttcctaggctggagtgcaatggcgtgatctcgacttaccacaacctctccctctcaggttcaagcagttttctcctgcctcagcttccctaatagctgggattacaggcaactgccaccacgcccggctaattttgtatttttagtagagacggggtttccccatgttgatgaggctagtctcaaactccttacctcagatgatccgcccaccttggcctcccaaagtgctgggattataggcgtgagccaccgtgcctggtgaatgtttgtattttcagtagagacggggtttcacagttttggccaggctggtctcgaactcctgacctttagtgatccgcccgtcttggcctcccaaagtgctgggattacaggcgtgagccactgtgcctggccaaatgcccagctaaaattttttttttttaagatggagcttcacccttgttgcccgggctggagtgcattggcaaaatctcggctcactgcaacctccgcctcccaggttcaagygattctcctgcctcagcctcccaagtagctgggattacaggcatgtgccaccatgcctggctaattttgtatttttcgtagagacagagtttctccatgttggtcaggctggtctcatactcccgacctcaggtgatccgcccgcctcagcctcccaaagtgctgggattacaggcatgagcccccgcgcccagcctctttttaaaatattggaaaattactgataaaactaaagatccttttgaccccttattttcccatcttagaatcctttcctttttccttagaataatttcagttatgacttagttgtgcttttgttcagatttttttaaatacttttttttaactttttagtagcgatcaggtctcactatgttgcccaggctggtctccaactgctgagctcaagtgaacctcctgcctcagcatcccacagtgctgagattacaggcgtgagccactacacccagcctcagatttttcaaaatactcttttttgagacagagtctcgctctgttgcccaggctggagtgcaatggtgcgatctcagctcactgcaacctcctcctcccaggttcaagcgattctcctgcctcagcctcccaagtagctgggattacaggcgcccaccaccacacccggttgatttttgtatttttagtagaaacagggttttaccatgttggccaggctggtctggaactcctgaccttaagtgatctgcccacctcggcctcccaaagtgctgggattacaggcgtgagccaccacgcccggcttaaaaatacttctaaacatacatgtgccaggctgggtgcggtggctcatgcctgtaatcccagtaccttgggaggaccgaggcaggcggatctcatgaggccaggaattcaagaccagcctagccaacatgaccaaaaatacaaaaattagcctggtgtaatggcgcatgcccataatcccagctactcaggaggctgagacatgagaatcacttgaaggacacggaggttgcggtaagctgagatcatgacattacactccagcctgggtgacagagcaagactcttgtctcaaaaaaaaaaaaaaacaagtgccaatagaaaatgcaagtattttctcacatcattgatgtgctctctgcatggttctgcagtttactattttaaatcaattatgtacgtcttaaatttctccaccttgacacatttagtgatccagcaaatgcatttaaaattgtgatacttcattgtatgaatataccatatttcatttagccttttacctagtagtaaatgtatatcatcaggttggtgcacaagtaattgcagtttttaccattgaaagtaatggtaggctgggtgcagtggctcatgcctctaatcttagcactttgggaggccccggtgggcagattgcctgagctcaggagttcaataccagcctgggcaacatagtgaaaccctatctctactaaaaatacaaaaaaaaagttatccgggtatggtggtgtgcaccggtgagccaagatcacgccattgcactccagcctgggcgacagagtaagactccgtctcaaaaaaacaaaaggagaaagtaatggtaaacaacctaatagattatttcagattttttgcttttacccacaggactataatacatttcttgtcagttctcctagggtagctatatattattagatgttgactatcagggcttttttggcctctaaacatgatatttagtcaaacaactgtcttaattttttttttctattctccatagggatgccattgaaaagttatttcctgatgccattagactgagatttgaagacattcagcagaataatgacatagtccaaagtcttgcagcctttcagaaatatgggaatgatcagattcctttagctcctaacacaggccgagcgaatcagcagakgggagggggattcttttccggtgtgctcacagctttaactggagtggcagtaagttgatcactgtgttcctctgtgcccccccacacctcaccccccgacccctgatttccactgaagtcagttctgttgaaatcactgaaataattgatgatgtgactccatgtaatttactacgtacattgaaatctgctgggttctatgatttcctcaggaatgttgcttactcaggtagatcagatcatagtacctagtaaatggagaaaggtggtagaactggaattcaagaccatgtctgccttggtaatacaatctttttttgttttgttttgtttttgagacggactcttgctctgtcgcccaggctggagtgcagtggtgcgatctaggtaaaaactttcttttagggtggtgaaaatgaactaaaaccagctgtggtgatgatgacacatatttgtgaacacattaaaaaccgtggattgtgtgcacttcaaatgtgtgaattttatgtggattacatctcttgctctttttttttttttttttttttttgagatgaagtcttgccctgttgcctaggctagagtgcggtggcatgatctcggctcactgccacctccacctcccgagttcaagtgattcttctgcctcagcttcccaagtagctgggattacaggcatgcsccactacaagaggctaatttttgtgtgattagtagagatggggtttcaccatgttggccaggctggtctggaactcctgacctcaagtgatccacccgcctcagactcctcaagtgctgggattataggcgtgagccaccacgcctggacctccttggtaatacagtcttaagaacccaccagtttactaacttccaatgtggagactattttcttttaaagttctgtgcataaaaaatctaaatgtttttccagtagaaaaggcacaagtcagttatgttgagcaagttgatggagtcaaggcaccacctgctcccaggtgcctgagataagtccttttctcgcctctgtgccctcactgccacgcaatcagcagagagaggcacccgaggagagctgtggtccccagttctctgtggccgtggcgttgccctgcttttgttgccctgcttctgtgtacgggctccgcatcattccctgtgagctcagcctcttcctttccccacctcccacccgcatatttagaaactggcatctctgcctctccatggtttaaagtccctgtcacttttccccaggtggtcctgctcgtctatcactggagcagcagggaatctgaacacgacctcctggtccacaaggctgtggccaaatggacggcggaagaagttgtcctctggctggagcagctgggcccttgggcatctctttacagggaaaggtttttatctgaacgagtaaatggaaggtgaggagcaaagtcttctgacacaccgtggacattttagaaaacagctttcttgagatataatccaggccaggcgcggtggctcacacctggatcccagcactttgggaggccgaggcggatcgatcatttgaggtcaggagttccagaccagcctgaccaatatgatgaaaccccatctctactaaaaatacaaaaaaaaaaaattggccaggcttggtagtgcacaccttgtaatcccatctattcgggaggctgagacaggagaatcacttgaacccaagaggtggaggttacaatgagccaagatcatgccactgcactccagcctaggcaacaaggcaagactccatctcaaaaagagagagagagagatgtaatctacataaaattcacacgtttgaagtgcacaatccatggtttttaatgtgttcacaaatagtgtgattatcaccacagctggttttagaacattttcatcaccctaaaagaaagcttttacccttcagtcaatcctcatttctccccaacccccagcccctggcaaacaccattctactttctgtctttatggatttgtctattctggacgtttgatataaatggattcatacaatgcgtggtattttgtgtctggctttttcacttagcataatctttttcaaggtttacccgtgacataacatgtatcagtacttcattccgttttatggctgagtaataattctactgtaagagtataccgtattttgtttatccattcattggttgatggacatttgggctgattccattttttggctattatgaataatgatgctatgatcgttcatgtgcagattcttgcatgaacatgtattttcaatactgtcttggagtggaatgactgagtcatatggtaactctattcagactctatgtttaactgtcaaactattttccacagcagctacaccgtttaatgtccatgacatttaaatttctttgttgcttccggattatcaaattgtgtaaggaaaaattctctctaatcacaagaatcaacacagaagacttttgtgaccaaatatgtggggttctcctgcacacacccagcaggagacaccagctggatgtcctctaattcagttcccacactgtctacccagagatagtgtgagatcccacagggtgagggctctgtccccaagactgcccctgactaattctagtcagaaatccaggcttccagaatttctgacccaccagcttcaagttggggttcccatgattccctctttgggttcaattaatttgctggagcagctcacagaactcaaggaaacacgtactttcactggtttattataaaggatattgcaaaagatacagataaagagacacttagggcaaggtatgggggaaggggcacagagcttccatgctctccacgggtgcactcccctccaggaacctcacatgctcagctatccagaagctcactgaatcctgtccccyggagtattgtgtttttgtttttgttttttcagacagggtctcactctgtagcccaggctggagtgcagtggcacaacctcaactcaactgcaatctctgtgtttagggctcaaggagtcctacctcagcctcccaagtagctgggactgcaggcacatgccatcaggcccagctaatttttgtatttttaatagagacagggttttgccatgtcgcccagtctgatcttgaactcctggactcaaacaatccacccgcctgagcttcccaaaatgttgtgattataggcatgagcccccgcaccctcctcatggaagattcttaagacccacaatcagaaaggtaggaaaagattagagtgaaaggagagcaggaggtcagatgcctgtactgaggcctgacatgcccaatttttttttttttttttttttttttagatggagtctcgctctgtccttcaggctggagtgtagtggtgtgatcctggctcactgcaacctccgcctcctgggttcaagcgattctcctgcctcagcctcccgagtagctggcactgcaagtgcctgccaccacgcccggctaatttttgtatttttagtagagatggggttttaccatgttgaccaggctggtgttgaactactgacctcaggtgatccaccgccttggcctcccaaagtgctggaattataggcgtgagccaccgtgctaggcctccaacattctaacacagattggaataagggatacagcagctatgagccgggaactatggacgaaagccaatatgtaacaccacattaatatatatttttatttttttttttgagatggagtcttactctgtctcccaggctggagtgcagtggcagcgatctcagctcactgcaacctccacctcccagttttgggtgatcctcctgcctcagcttcccgagtagctaggattataggcgcctgccatcatgcgtggctaatttttgtatttttagtagagatggggtttcgccatgttgaccaggctggtctgaaactcctgacctctggtgatccacccacctcggcctcccaaagtgctaggattacacgtgtgagccaccacacctggcaaatatatatttttatttttaaaaaaataataactatgtgatattgaaagtgacatactcttgtaatcctactcttcagaaaacaatttatcttgctagacacctttccagatgtttcagtacttacacagatataaatgtgttttttttaatttaaactgaaaatatgattgtactaaacagacatgtgtttgtatgtatacatgtatatatatatttacatctatatccaccccctaagggtgttacgtataacatcacacagtgataagagcagcctctctccctgattcatttgtttcagacacccacttcacccactgcctggctgcctgactgccacccctcctactccagtgactttttctctcctctccactcagttttcagcacttgactgactctgttttgaggaaatggcatgctcctactttaattagctttatatagaaattcacctcccgcaaaattatggtataaaaatttctctacctagttagtacaatgtatttttacatagctttctagaggacaaattcctggaactggaattgctgggccaaagatagtaaatctgtacaaatttaataagcatcaccaaattacccataaaaggacgatcaatttacaccactcaaccagtagttgcatatgcctgttaatagctctccggccagcttacagtgatgtttttaaggatgaatcactgtggaggggaatttgtgttttcttgtgtgtgttttttttaatttaatttttatttttttgagacagtttcactcttgttgcccaggctggagtgcagtggcgtgatcttggctcactgcaaccttcacctcctgggttcaagcgattctcctgcttcagcctcctgagtagctgggattacaggcacacgccaccatgcccgcctaatttgtatttttagtagagacgaggtttcaccacgttggccaggctggtctcaaactcctgacctcagatgatctacctgtgcctcagcctcccaaagtgctggattacaggcatgagccaccgcccccagccagaatttgtgttttctgatgaggaaagcagatacgggatctccaattatttttattaaattaaatccctaccttaaaacaactactcttttttcttcaagagacagagtctctttctgtcaccaaggctagagtgcagtagcagtatcatagctcactacagcctcaaagtcctgggctcaagcaatcctcttgtctcagcctcccaagtaattaaaacgacaggtgcatgccaccatgcctggctaatttttctggagagacagggtctcactgtgttgcccaggctggtctcaaactcctgggctcaagtgattcttctgcctcagcctaccaaagtactgggattataggtgtgagccactgtgcccatctaagaactttttttttttttttttttttttgaggcggagtcttgctctgtcayccaggctggagtgcaacagtgtgatctcggctcactgcaagctccgccttccgggttcacgccattcttctgcctcagcctcccgagtagctgggactataggcgcctgccacgacacctggctaattttttgtattttcagtagagacggggtttcaccgtgttagccaggatggtcttgatctcctgacctcgtgatctgcccgcctcggcctcccaaagtgcgaactattcttaatgttgtaatgttttattggatttccttctaatttttcctatacatacacacagttttaaaaatagagtaatataaaaaaataaataaaaatagagtaatatgtgagaggtcagagcgtataactgaaagatcaaaggcttaggaacaaaacagacctaggagtgccttgggaaagtcaccttatttctctaagtgagttttcctttttttttttttttttttttttttgagatggagtctcactctgttgcctgggctgaaggctggagggcagtgacgagatcttagctcactgcaacctccgcctcccaggttcaggcaattctcatgcctcagcctcccaagtagctgggattacaggtgcacgctaatttttgtacttttagtagagacgtggtttcaccatgttggctgggctggtgttaaacacctgatttcaagtgatctgcctgcctcagcctcccaaagagctgggattataggcatgagccactgcacccagccaaagcgagttttctgatctacaaaagcagcataatgccactaccctgaataattgttatatggatcagtgatgacttatgaaagtatttatagattgtcactggtaaatagtaagcattcaattatttgctgctcttgatgttgttaaatgtgaaatgtctcaccatacctcaagcctacaatatttatattagtaagatggaactctsagtgtagagagtttgcttccagtatataatcgcaaaataaatctcctcctgcccctctacaggttgcttttaactttgacagaggaagaattttccaagacgccctataccatagaaaacagcagccacaggagagccatcctcatggagctagaacrtgtcaaagcattaggcgtgaagcccccccagaatctctgggaatataaggtgaacactttaatttttttttttttttttttactttttatttttattttttgttaattttttttaatttcagggttttcttttttatttttgacagtttatgtacttatttatttatttattttattttgagacagagtccttctctgtcgcccaggctggagtgcaatggcgcaatctcagctcagtgcaacctctgcctcccaggttcaagtgattatcctacctcagcctccagagtagctgggattaccctacccagctaattttttctttcttttttttttttttctggctcactgcaacctccacctcccaggttcaagcgattctcctaccccagcctcaccagcagctgggattacaggcacacgccaccacaccaggctaatgtttatgtttctagtagagatggtttcaggatgttggccaggctgatctcaaactcctgacctcaggtgatccacctgcctcctgacctcagcctcccaaagtgctgggattacaggcgtcagccaccgcgcctggcctgttttacaaataaataaggaaagagacacttacatgttttggggaccttgaattgttggaatatcactggaggacaatttgtcaataacatttcagtttaaaccgcatctgctctttaagccagcatttcactcctttgcacttggaatggaggcagcacagcacggtggtcaagagtgaggctctgggctggtcaccgtggctcacaactgtaatcccagcactttgggaggccgaggcggggggatgacctgaggtcagcagtttgagaccagcctggccaacgtggtgaaaccccgtctctactaaaatcacaaaaattagctgggagtggtggcacactcctgtaggtccatttacttggaggcaggagaaatgcttgaacctgggaggttgaggctgcggtagccgagatcacaccgctgcatggcagcctaggggacagagcaagactccgtcccaaaaaaaaaagcaaagaacagaaacaaaaagagtaacgctgtgggctgggcatggtggttcacaactataatgctagtactttggaaggctgaggtgggaggattgcttagctcaggagttcaagactagcctgggtaacatggcaagaccccatctctacaaaaagtacagacacaaaaaaaattagttgagtgtggtgatgccagccatttgcgaggctgaggctgcgctaaaccatgatcgaaccactgcactccagcctgggcaagagagttgagaccctgtttcagaaaaaaaaaaaaaggccctggcactagcctgcctgggccagctcctccaagacacaccacctgttggaacaccagcaagtacctgcacctctccttgcctgtttcctcctgggtaaataaccttagagggtcattgtgagactccaatgtttgattaacggaaagttgttaaacaagttattcacggcagcattgttggtaattgcagggagtagaaaacaacctaagtgcccctcattaggaacaagttgaataaayaaggcacacccatgtaggcagccaccggaaaaggagacaaagactttgtgttamtaaggaacaaagtcctgtaatccataaggaacaaagtcctgtaatcccagcactttgggaggccgaggcaggctgatcacttgaggccaggagttccagaccagcctgaccaacatggtgaaaccccatctctactaaaaacacaaaaattagccaggtgtggtggtgcatgcctataatcccagctactcaggaggctacggcaggagaattgcttgaactaaggaggtggaggttgcagtgagctgagatggtgccactgcactccagcctgggtgacagagtgagacactgtctcaaatgaagaaagaaataaaaaatgcttctgtaatatgtgcgtgtattactttaataactagtttcaaatattgtaaagaatgtgcgtggagctcctgaaatagaatgtttgttattttttgtgttatttggtttttgtttttgttttgttttgttttgttttttgagagggtgtctcgctctgtcgcccaggctggagtgcagtggcgcgatctcagctcactgcaagctctgcctactgggttcacgccattctcctgcctcagcctcccaagtagctgggactacaggcgcccaccaccgtgcccggctaatttttttattttttggtagagacgagctttcaccatgttaaccagggtagtctggatctcctgaccttgtgatccgcctgcctcggcctcccaaagtgctgggattacaggtgtgagccaccgcgcctgacctgtttttgtttttttgagacagagtctcactgtttcccagactggagtgcagtggtgcgaccttagctcactacaacctctgccttccaggttcaagcaattctcatatctcaccctccagagtagctaggaatacatgcaggtgccaccatgcccagctaattttgtatttttagtagaggcggagttttgccatattggccaggctagtcttgaactcctgacctcaggtgatctgcccgcctcagcctccccaaagtgctgggattacaggcgtgagccactgcgcccagccaagctgccatatttttcataggtaaatatttcagcattaatctcttaaaaaaaaatttttttttgaaatggagtctcaccatgttgcccaggctggtctcaaattcctggtcaagtaatcctcccacctcaacctcccaagtagctggggctacaggcacaggctactgaagcagctacattgcctggggaactggggtttgtcatcttgcaccaggaaaatttaggacacagacacacaagagttgagcagaggtttaataggcaaaagtaagagaaaggaaaacagctctgtctctagcaagagagaggggacttccaagaggaaaagactggcaggcagcagatgtgctggattttttagtcagttttgaggaggcggtgtctgatttacatagggctcacagattggttcgatcaggtatgatgtttccacagtgcacaggaagggtggtcaccccaccctaatcttattatgcaaaggaactttctgtccccttggctggtgctatcttgtctgctccttactgtactgtacatgtggctgacaaagagaagggaagatggagcttctgtcttgaacatgattgacataactgccagcatctgtgtctgcagttccattttacaggctgctgtttgttagaaaggaaaatgatttgaggctgcttttcattaaaaggaaaacctccatcctggctaacacagtgaaaccccatctctactaaaatacaaaaaaaaattagctgggcgtggtggtgggcgcctgtagtcccagctactggggaggctgaggcaggagagtggcgtgaacccgggagacggagcttgcagtgagccaagattgtgccactgcactccagcctgggtggcagaccgagactccatctgaaaaaaaaaaaaggaaaaccttaatgagggctcccttaccctcactatctgcctaagtaacttcttcttcactcctgtatcactaccatgtcctgcttgaaaagtaaggacttttcaaaagacaaaattacaatatcaccattgtacacccctccaccaattaatagtaattatgattttttttttttttctgagatggagttttgctcttgtcatccaggctggagtgcaatggcgcgatctcagctcactgcaaactccacctcccaggttcgagcgattcccctgcctcagcctcctgagtagctgggactacaggtgtgcgcctccatgccaagctaattttttgtatttttagtagggacggggtttcaccgtgttggccaggctgatctcaaactgctgacctcaggtgatccacccgcctcagcctcccaaagtgctgggattataggcgtgagccaccatgcccagcctgtagtatgcaatttggttttttttgtttttttttgttttttgtttttttttgaaacagagtctcgctctgcctccaggatggagtgcagtggcatgatcttggctcactgcaacctccacctcccaggttcaagcgattctcctgcctcagcctcccaagtagctgggactacaggtgcccaccaccacacckgctaattttttttgtatttttagtcgagacagggtttcaccatgttggtcaggctggtctcgaactcctgacctcaggcaatctgcctgcatcagcctcccaaagtgctgggattacaggcgtgagccaccatgtccggcctctatagtatacttcttttttttttgagatggagtctcactctgtcgcccaggctggagtgcagtggcgcaatctccactcactgcaagctccgcctcctgggttcacaccattctcctgcctcagcctccccagtagctgggactacaggcacccgccaccatgcccggctaattttttgtatttttagtagagacgggatttcaccgttttagccaggctggtctcaatctcctgacctcaggtgatctgcctgcctcagcttcccaaagtgctgggattacaggctgagccaccacgcccggtctctatagtatacatttctaaagagaaagaatctttttaaaaatgcaatcatcatcacactttttaaaaatctaacagtaagttattcatagcatcagctaaattgaatgttttaacagtttttattgaggtaaaattgatatacacctacttaaagtgtacgatgtgataagttttcacatatgcacacccatgaaagcatcacacgatgaagatggggaacatctccgtcactcccagaagtttcctcctgcccctgttaagccttccctcccagccctcccaattccaacaaggatgcagtgatctccactggacactggggatttaatttgcatttctcatttaattcacattcacatgcttatttgccatccttatatcttctgtggtaaactgctcattttattttgatgctactaagaatcaaataaattgaatcttttttctttttgagatggagttttgcccttgttgcccacgctggatttcaatggcaagatcttggctcactgcaacctctgcctcccgggttcaagtgattgtcctgtctcagcctcccgagtagctgggattacaggcacatgccaccaagcctagctaatttttgtatttttagtagacagggtttcatcatattggtcaggctggtctcgaactcctgacctcaggtgatcctcctgccttggcctcccaaagtgctgggattacaggtgtgagccaccgcactcggcctttttttttttttttttaaagaaacgaggtcttacgccaggcgtggtggctcacacctgtaatcccagcactttgggagaccgaggcaggtggatcacctgaggtcaggagttcgagaccagcctggccaacatagtgaaacccagtgtctactgaaaatacaaaaattagccaggcgtggcattactcacttgtaatcccagctacttgggaggctgaggcaggagaattgcttgaacctgggaggtagacgttgcagtgagccaaaaatgcaccattgcactccagcctgggcgacagagcaagactctgtctcaaaaaaataaaaaaattaagagactgggtcttgctttgttgctcaggctggtcttgaactcctggcctcaagcaatcctcttgcctcccaaagtgttaggattacaggcgtgagccaccacgcttaccctgaataatctattcagttacttttataataaggaagtaaacattcactgtagtaaaacttgatttaaaaaactgaagaaaatgaaaatggctatgtgaattccatgttaagtatctgctgtaactgtagatttcactggtttcactattacactcagtgtagtactaaacatcttgtatataaaatctgtatttcagattatttgcattaagtggtgcccacttacagactgattgaattaaacaattttaagactctttgatacctttttcaaaatagctttttaaaaaggctatattctgcaagcagggtgcaagagtatgcttttcacccctccccccagctagagctagagattggatcttttttttttttttttttttttttttttgagctggaatctcactgtattgcataggctggagtgcagtggtatgatctcggcacactgcaacctccacctcccaggttcaagcgattctccagcctcagcctcctgagtagctgggactacagggcatgagccaccatgcccagctaatttttttatttgtagtacagacagcatttcaccatgttggccaggctggtctcaaactcctaacctcaagtgatccgtccacctcggccttcccaagtgttgggatttacaggcgtgagccaccatgctccgccaagatcgaatctttatacaatgtaaccccaaatgtggatcacttggcctcttcttgccgttcattcattcatgcattgtgtgtaccatgcaaaaaggctgatggcaacaagcgagagatgggaaggagcgtgggtgggtagctggccgccatggttgtaatgtggccctgtactcttctcctctgcaggctgtgaacccaggcaggtccctgttcctgctatacgccctcaagagctcccccaggctgagtctgctctacctgtacctgtttgactacaccgacaccttcctacctttcatccacaccatctgccctctgcaagaagacagctctggggaggacatcgtcaccaagcttctggtaggtctgcacagtgcctggaataaagttattccactgtcaagttatttgcagagattgctacccaccatgggtgccatgtttcttcagtttgacccatgaactccttcagaatgtctggtaggtcatttgagagtaatatcctttgctttgcttctcttggggccagtacttctgacctgttcatatcaagtcacatgcatagaggaatcatcaagtatcatccacacccataaataataacacagaattttgaaatctccagagatcctttttttcccccaaagacccttgtaaacactacaatcaagtgctggctaactggtttcagccttgaatatagtctgaagcctgctaatcggctcccttgcacattcctcccctaattacccagtctccacttgctgtttacctcaccagactggctgtgcagagaccctgacctttaattttatttattgattgattgtttgagattgggtctcattctttctcccaggctggagtacagtggcacaatcacagctcactgcagcctcgacctcctgggctcaagcgatcttcacacctcagcctcccaagtagctgggactacaggcgagcaccaccacccagctaattgttgcattttttgcagagacagggtttcaccatgttgcccagcctggtcttgaactcctgaattcaaaccatcctcctgtagcaggaagagctgcagacaaaacccctcagacaccgagttaaagaaggaagggatttatttgtccgggagcgtcggcaagactcctgtctcaagagccgagctccccgagtgagcaattcctgtcccttttaagggctcacaactctaagggagtccacatgagagggtcgtgatcaatggagcaagcagtgggatacgtgactgggggctgcatgcgccggtaatcagaacagaagagaatacgacagggatttttacagtgcttttccatacaatgtctggaatctatagataacataactggttaggtcaggggtcgatctttaactaccaggcccagagcgcagcgccgggctgtctgcctgtggatttcatttctgccttttagtttttacttctttctttggaggcagaaattgggcataagacaacatgaggggtggtctcctcccttactcccaccttgccctcccaaagtgttgggattagaggcgtgagccactgcacctggcacccagcccttcaattttaacgagctccaacagcctctgcctgttcatcaggctaatttttttttttttgagacagagtctcgccctgtcgcccaggctggagtgcagtggcgcaatcttggctcactgcaacctccatctcccgggttcatgccattctcctgcctcagcctcctgagtagctgggactacaggcgcccgccaccacacccggctaattttttgtgtttttagtagagatggggtttcactgtgtcagccaggatggtcttgatctcctgacctcgtaatccgccctcctcagcctcccaaagtgctgggattacaggcgtgagccactgtacctggccatcatcaggctaattttttatctgctaatatgtgtaattgaaaagcttctcctcctgccatcacaaaaaaaattacctttttttggagggaggagggagtgtttgtaattttcccagaaactaccattattctaccatagccaatgttgaatttaggaaatggttcaagctaccatttgggtagcttgatgggagaataactggttaatttaaatttatttcaatgtattcataattcatgcttttttttttctgagcttccacaattatatgacaagcatttcatttcaacctttttgctaacatttacttaatttgagattaattacggccgggtgcggtggttcactcctataatccaagcactttgggaggcagaggcgggcaaatcacctgaggtcaggagtttcaagaccagcctggccaacatggcaaaacctcgtctctactaaaaatacaaaaattagccgggcgtggtggtatacacctttaatcccagaagcactgtctgtgtcttggatggtagcgagacaagatggtggatccccagactcagggcttgtatacatagggaaggggcatacatgcttcagaagggatgtgcagaacaattgcttagggtcgggatttatggtaagtacgagaacatactcaggaggctgagacaggagaatcacttgaacccaggaggtggaggctgcagtgagccgagatggcaccactgcattccagcctgggtaacagatcaagactccgtctcaaaaaaaaaaaaaaaaaaaacaattacaagatgagttgatggatggaaatttcattttagattgttggatgtgtgtgtgtgtgtggtaatcaatgtagaactcactgtgatcatcacaattttttttgagacasagtctccctctatcacccagggtgaagtgcagtggtgcgatctcaactcactgcaacctgcacatcccgggttcaagtgattctcttgcctcagcctctagagtagttgggattacaggcacacaccaccacgtctggccaatttttgaatttttagtagagatggggtttcaccatgttggccagcctggtcttgaactccttacctcaggtgatccgcccacctaggcctcccaaagtggtgggattacaggtgtgagccaccgtgcctagcctgatcatcacaatattttgtgtaaaagtcagtcctcatgactttttgcgtctgtgtgttattttttaaggatcttaaggagcctacgtggaagcagtggagagagttcctggtcaaatactccttccttccataccagctgattgctgagtttgcttgggactggttggaggtccattactggacatcacggtttctcatcatcaatgctatgttactctcagttctggaattattctccttttggagaatctggtcgagaagtgaactgaagtaagtatgttttaatggttgtcacaacaggggatgggaaagaaataccaagtgagagaaagatcctcttttatttctcacacttgaaataaatcctccatccacccagacccttcagactctgctttgagaaacctagcttaagcagtgaataggacaattacctgtgttttgggggtgggggttgtggtgctcattgttaaaagtattttcctatatgtcttatctctatgcaataatataccatttaatttcagggggaggggggcaaaggattgtaataatcaaggaataagcaactgaatagaaaagggtctgttttaaggtaggcaggcctgtgcaaacctatcccctaaatcagaggaagctgaggggctgaaggaagaagctggcaaattcagtttctcagaaagaaacacttaataaggccttgccaacagaagccctgtctgtgtcttggatggtagcgagacaagatggtggatccccagactcagggcttgtatacatagggaaggggcatacatgcttcagaagggatgtgcagaacaattgcttagggtcgggatctatggtaagtaagagaacatcaaggctgtttcaccaaagggcaggatttacgtgatgtacgtgctcttacacaagaaacattagataaaaccagagatcttagaggcttcccccaaaccggagttagtgagaagtcaatatggcagattagcatccaatatagagttgctttggcctccacagggtgctttatagaaaatgcagtaaggtagagcataaagagatctcatgggaaattctgtaggcatgagttctaatcctgatctgtaaccaactaggataataataacttaggcttcaagcatgactggaccctgagacccaaacgctgtcaccagtactgactctttctctgtccctcacagcactgttctttcttgtgttttctgcctcaggcatctctcttcatgtgggggcccttgtcttctccactccagactttgatctgtgcagcttaacaaacctccagaaagaaagcacttccttccctgtggcactggaaaaggtctcagggctcacatgcctttgttctgatggacccaggcttgaggcatgagttcaccccacaaccagaggctggtttcagccctacccagaccacatggaaaagaacaaaggagagagaatccccaaaacttagaggctgttgccaggtgcagtggttcatgcctgtaatcctagaactttgggaggccaaggcaggtggatcacctgaggtcaggagttcgagaccagcctggccaacrtagtgaaacctcatctctaccaaaaatacaaaaattagccaggcgtggcggtgggtgcctgtaatcccagctactcgggaggctgaggcaggaggatcgcttgaactcagagaggtggaggttgcagtgagctaagattgcaccattgcactccaccctgggcgacaaaacgagagtccatctcaaaaaacccccaaaaacttagaagctatttccagaagaaagggacaggcagaagtaacactgccacccttgcagccttttaccttgacattctgactcgcagccttatgaatggttctgagaacctaacaatctccctcacctttccaatggtgactcactaggtaaaaataaaaaaagaatctccctcatttctttccatttagcaaactcacttatttatatacaatatgcatatttatgcccctactgtactcctggttctctcctgggcatggcagatcttttggtaaagaagacagtctatagtgtgaggccctacagcctagcaaagaaaatatgtacgttaaaaaatagatggtcaggcaccttggctcatgcctgtaatcccagcactttgggaggtgagaggattgcttgagaccaggagttcaagtgcagcctgggcaacgtggcaaaacctgtctctaaaaatacaaaaaattaactgggcgtggtggtgcacacctgtagtcccagctactcgggaggttgaggtggaggatcacctgagccgaggagtttgagaccagcctgggtaacatagcgagaccttgtccctacttaaaataataataataataataataatawttagccagatgtggtgatgtgtgcctgtggtcccagctactcaggaggatcacttgagacctggaggtcaaggctgcagttgagccacatttgcaccactgcactcccaggctggacaaaggaatgagaccctgtctcaaaaggaaaaaaaaatatgtaaatgtaacaaagtgatgaagcaggtgaagttgaggctgtcacagggaggccttgcccagtgtgggggcaaagaagctccctgtaggtcatgtccttgagagttaaaagatgggttgagtaggcagaggtctcaggcaccggggacagaagacaaggacattcagcacgggcagccatgctcttcccagcacccagaaaaggcccagggcccggactcctgggtgtggtcatgagaagcgcctccgattcagcctcttctcttcttgtttcaggaccgtgcctcagaggatgtggagccatttctggaaagtatcaacgcaggggctttttgtggccatgttctggcccctcatccctcagtttgtttgcaactgtttgttttactgggccctgtactttaacccaattattaacattgatcttgtggtcaaggaactccggcggctggaaacccaggtgttgtgactggcactgcccaggctgagactcttcaagtcccgctgacgtctgagctttgatgcttaagaggggtgaggcagggagcggacttcctattttctaccctcagtaaaacaaggtgctgctttgtatatcaaaagctccaaccatgtcctctccccctcagcctgtgggtggcacgagcaaggactgacatccgcacagggaggattgtctgtttggctgacacagcagcagcccttcccacccagccaccttcctcacagggactaggaggctcagtccccaacggctggcaagactcagggtcctcagtggacatggtgtgggtgacatcagaagggtgccacatcagtcccctccccaacctcagtgactgacagaggatccggatctcagagcctgagaccaggtttattggggcctggcctgtcctctaagtcaagtttaggaaaacaaggataagattctgtcataggcatagagagttgcacataaaaaataccgaagaaaacccaaaattcaatcaacaattctgtcttattgaagagttgctaggattcagagtaaaactcaaaggattcagtttgagcctagaatgatggttagacttgtagtcactgggcttttgttttgctttatggaaatcattgaaggtctggatccctttctctgaatggagagattgagagggatgtcgggcagttcccattagatttagtggccttcatgttattcagaattgttttggtgatacctcacccctgtaatcccagcactttgggtgggtgaggcaggcggatcacttgaagccaggacttcaagaccagcttggccaacatggtgaaacctcatctctactaaaaatacaaaaattagccaagtgtgatggcacatacctgtaatcccagctacttggaattggaaatcgcctgaacccaggaggcggaggttgcagggagggagactgcaccactgcacttcagcctgggtgacagagggagactctgtcttaaaaaaaaaaaaaaaatcatctgtaaaataaattccgggatagtcgttttgttcaaggaaatgttttgtaaattgagctcacactatataatctttattgtcctatcctgatgtataatacagcaggtataattacaccaagcgctatagttataaatatggcatgaagtgaactatggccttttatttccttccagtgtgaacacagcaggtgtgagatgtcatcttggaagacaggccttgcagaaataggcctacatccaaaatattatcttgtgactccatgaaccattcattaaccctttgtatctttgagtgaaaattttactcaaaagttgcatctggaagttcgaagaaattacttgaaataaaaataaagatttctatatagataaaacctatatgtagagaaaaagcaattgtctagaaaacacaaaacttctgcattgccggatagaatcttctagccatgggccgagcgtggtggttcgcgcctgtaatcccggcactttgggaggccaaggtggatggatcacttgaggtcaggagttcaagaccagcctgacgaacatggtgaaaccccgtctctactgaaaatacaaaaattagccaggcacggtggtgcgcacctgtagtcccagctacttgggaggctgaggcaggagaatcacttgaacccaggaggcagaagttgcattgagccaagatcatgccactgcactccatctgggtgactgagcaagattccgtctcaaaaaaaaaaaagtcatctagtcagtctagtcatgcttaaatcccccagcctgacgcagatactgagccgaggagccaccctaagggaaaatgggttttttcctgctcgtgtttgcacatcaagccccagggttgcttgactttacctatttaatgcttgtgacctcccatggacactcacatggcagtgtttgcatatccctggtctcatgccacccaggggttgccagtatcctttacaggtgaatagatggaggatggctggcaaaacaccaagttggcgctggctggctttggcagagctgggcctgggccatccacctccaccccatggcctctcacattgtcgccacctgctcccacaccctgcttcaaagatgagtaatacccagatttgctcagggactggggcaaagccatggcgtagagcaaacaggctgggcaggaccttactccttatcaccagcaggagggacgggcacactcagatcaggggccacaggctgcctctacctcttcttaccaatcatagcaggatgggtacatctaaagggggtgtcttaaaatagtccaggctggatgcagtggctcatgcctgtaatcctagcactttgggaggccgaggtgggtggattatctgaggtcaggagttcaagaccaccctgaccaacatggtgaaaccccatctctactaaaagtacaaaaaattggcagggcacagtggctcacacctgtaatcccagcattttgggaggccaaggcagggtggatcacaaggtcaggagttcgagaccagcctggccaacatggtgaaaccccatctctaataaaaatacaaaaattagccaggtgtggtggcgtgtgcctgtaatcccagctacttgggaggctgaggaaggagaattgcttgaacccaggaggtggaggttgcagtgagccgatatcacaccattgcactccagctctgggcgacagggcaggactccatctcagggggaaaaaatacaaaaaattagctgggtgtggtggcagtacctgtaatcccaactactcggaaggctgaggcaggagaatcgcttgaacgcgggaggcaaaggttgcagtgagccgagattgccccactgcactccagcctgggcgacacagtgagactctgtctccgaaaaatgcaaaataaaaataaaatactcagacccggctgggtgtggtggctcgcacctgtaatcctaacactttgggaggctgaagtgggcagatcacttgagcccaggagttcgagaccaacctagacaacatgtggaaacctcatctctactaaaaataaaaaaactagccagatgtgagtgtacgcacctgtagtcctagctacctgggaggctgaagtgagatttgcctgagcccaggaggtcgaggctgcaatgagctgaggttgcaccactgcactccagcctaggtgatagcgggagaccctgtctcaaaaaatattcagatcctttgatccaaaaatgccatttctgcaaatctgggctaaggaataggttatggggaagggagtggtgaagatttatttacaagcatcctcatcaagcaactaatggaaacagaaaatagctccaatatccaaaaactgtcaatctataaaatggtatctaatacagatatttatttatttatttatttgcgtcaaggtcctgttctgttgcccagactggagtacagtgatgtaatcatagctcactgcaactttgaactcctaggcacaagttatcttccctcttcggcctcccgagtagctgggacaacaggtgcatgccaccatgccttactaattttttttgttttatacagatagagtcttgctctgttgcccaggctggtcttgaactcatgtcctcatgtagtcctccctccttagcctcccaaagtattgagattataggcatgagccacctcatccaaccctaacacagacattttaaatgaagtttccaaagattttttatgacatggagaaaagtttataaacatcatacagtataatctgaactacccttttttttttttttttttttttttttttgagatagagtcttgttctgtcgcccaggctggagtgcagtggcacaatctctgctcactgcaacctccacctcctgggttcaagtgattgtcctgcctcagcctcctgagtagctgggattacaggcgcgtgccaccacgcctggctaatttttgtatttttagtagagacggggtttcaccatgttggtcaggctggtctcgaactcctgaccttgtgattcacgtgccttggcctcgcaaagtgctaggattacaagcgtgagccacagcacccggccttgaactacatttttaaaactatagatcctaacagattattctgaattgtgggaattggagtgatttttctttctgctctatatttctctgcactttcatttttttaagaagcaacaagtatgtaccacttttgtaatcattgtgctgggcttacagaaatgagccaacgctgcaggacagcaaatacattttaaggtgtagtgggataagggaatactctttcttaagctaacagctactggacttgaacttcaccgggtgggtgttgtatggccatcttgttgattgctgcagcctagaacatagaacatggccaggcacacggtaggtgttcgttcacatttgactaccagccatccaagcaggttagaagacaggttatcttttcataaagatggaacctcaaaaatggaaccgaccccaacacagtgataaacacagtcatagttttataaaataggtgcaggacttttggcctttaactgcaaaccacatgggctccagtcctgagttctgggattgggagggaaagcaaacacaaggttgtggctttatcacttggcttcggttcccttctgcaaataactgaatgctgttgttcattactgagaggacgctttatttccttgtgcaaaagagcatttcaagtcaaggtagtcagtcacacttgggcgagtccggctcacataggaactgggggtagaagaggtactttaagttgtactcagtttgggctaagcagttagcaatctcctggtcacacttgcacaacagttcttggcatttgttctctgccggtcctggaagaagtggggaaactgagattagagcagggacctggagagactcaagggaaaccagtaaagcaagaggcaggacgggtcataaattacatttctgagacacttgacagcccaccacgtgatctccatctgcagggctccccaggaagcaggtgatgtcagccccattttacagaaaaggaaattgaaagtttcaaatggagagtccaaagtctgccatactgctcttctgcatcaatattacacgatttcttttttcttttctttttttttttttttttttctgagatgggggcttgctctgtcgcccaggctggagtgcagtggtatgatctcagctcactgcagcctccgcctcccgggttcaagtgattctcctgcctcagcatcccaagtagctgggactaaaggcacaggccaccacaccgagctaattttttttgtatttttagtggagacagggtttcgtcgtgttggccaggatggtctcgaactcctgacctcaggtgatccacctacctcggcctccgaaagtgctgggattacaggcgtgagccaccatgcctggcctgatattacacgacttcatttggggattcctttatttaaaaataataatagtaattatttattttttgagataaggtctgtctctgtcacccaggctggagtgtagtggcaaggttgtggctcactgcagcctccgcctcctggactcaagccattctcccacctcagcctcccatgtggctgggactacaggcccaccaccatgcccagctaatttttgtatttttagtagagatggggttttgccatattgccaggctggtcttgaactcctgagctcaagtgatccacctgcctcagcctcccaaagtactgggattacaggcacgagccaccactctcagcccataataatattttttttaaagaaacatacttctcctcaatatactaggcatagaaggaacatacctcaaaataataaaagtgatagatgacaaacccatagcccacatcatactgaatggggatgagttgaaagcattcattcccccaagagctggaacaagacaaggatgcccactctcaccacttctattcagcaaagtattggaagtcctagccagagcagtcaggaaagagaaagaaataaagggcatccaaatgggaaaagaggaaatcaaactacctctgccaatgatacaatcatatacctagaaaatcctagagactcctccaaaagactcctagatttgaccaatgaattcaataaagtctcaggttacaaaccagtagcactgctatacatcaataaggactaagctgagaatgaaatcaagaactcagtcccttttataatagctggaaaaaaaaaaaggaaaatagctaccccaaacctagtaatatacttgagcaggaaggtgaaagatctctacaaacagaactacaaaacactgccgaaagaaatcatagatgacacaaacaaatggaaatacatcccatgctcatggattggaagaatcaatgtaatgaaaatgaccatactacccaaagcaatctacagattcaatgcaattcctatcaaaataccaacatcatttttcacataattagaagaaacaatcctaaaatttacatggaactaaaaaagagccaaataggctgggcacagtggctcacgcctgtaatcctagcactttgcaaggccgaggtgggtggaacacctgaggtcagttcgagaccagcctggccaacatggtaaaaccccatttctactaaaaatacaaaaattagccaggcatgatggtgtgtgcctataagcccagctgatcgggaggctaaggcaggagaatcacttaaacctggggggcagaggttgcagtgagctgagatcatgccccctgcactccagcctgggtgacagagagactccatctaaaaaaaaaaagaaaagaagaaaaaatctgtaggcatcactacccagcttcaaattatgctacaaggctatagtaaccaaaacagcatggtactaatataaaagtagatacatagaccaacagaacagaatagaaaacccagaaataaagctaaacacgtacaactaactgatcttcaacaaagcactcaaggccaggcgtagtggctcatgcctgtaatcccagcactttgggaggccaaggcaagcggatcacctgaggttcagtgtttgagaccagcctgaccaacatggagaaacctcgtctctactaaaaatacaaaattagctgggcgtagtggtacatgcctgtaatcccagctacttggtaagctgaggcagaaggatcgcttgaacccgggaggaggaggttgcagtgagctgagattgcaccattgcactccagcctgggcaacaagagtgaaactccatctcaaaaaaaaaaaaaaaacactcaaaaacataaattggggaaatgacaccctattcaa

SEQ ID NO: 98030 - DNA, 19114 bp, Homo sapiens
ggagccaattgtgtctcagagaagacagaggccctggcctccaggatgtgaaggcactagtgcctacccctagggctgatgtgacacctgcactcccagatctcaccacctcagcccctttgccaggttggacgcctccctcagccccactcctctagtgtgtctgccctggtagggaggaggagacggcaatggtatgaagagatctgacctgccccaggaagtttccatctctaggccacctgtcctgtcctgtcccggtgaaatctagccaagggcattcatctaccccgatcatgctatgggttctgcggcaggccaggaaacctgccattagtggccatccactcctatggcagtcccagctcaacgtcagtttgtttttttgagacaggatcttgctctgtcacccaggctggaatgtagtggtgcaatcacagctcactgcagcctcgacctcccaggttcaagcactcctcccacctcagcctccttagttgggactgcaggtgtgcgccaccacatcctgctaattttttgatttttttttttttttttttttatatagagacaaggtctcaccattttgcccaggctggtcttgaactactgatctcaagcaatcctcccacctcagcttcccaaagtgctaggattacaggggcgagccaccgtgcccagccctcagtgttggttctggcctggcgtgtctgtccacggttttagaagcgcttgctggacggtccaccagagctgcgggtcttcccgcgacgtcctccgagcctgagctgctgccgagacaccctcagcgttcggtgattcccatagctccgcagagcctccgctcccacaggtgagctgggtgggccttgctctccgctcctggccagggccctcggctcactgacctcgcccatcggctcgctggctctgccccctcggcgcccggttcccttgctgtcgcctggccccgctccttgtggttagctctgcccactctcgcctctccccgctcctcctgtactagacctcctccctgggttcaaggggctcccgggcctcctgaagggctgggggtctgggtctgtgacgctttgtccagctcctcttcctattttcaccttagggtcctgcgtgaggcctagctcttccacagtatcccctctgggctggcaggccggaggtgggtcctgtgtgatacctagagcctggctggtggggggatgctgaggccatggctcaggtctttgcatctgggcagaatctgggggctccctggagctgatcaagtgagcgtgagctgccatccctcctgctggcaggtctcagcctatcccagagctctcagcatgtcgggcctgtcacgacaagtggcctgaatgccgtgtccggagtcccttccacccttggaccccccgcggttccaggagaagacccttattcctcggctctgggaccccgagtggcctgccttaagggacagtccgtctcttcccaggttcaggaccttgaaaggaggctccgcagttgtcctgcaggctatattcaccgtgagctactcagggccggcctccaccccatggccctcagtccggggctgggcttcccccacagatgttccttatcacagcatcactcaacttctggagcctgatgttcccacagaggcgggggcggaagagggcagggaagaacagaggatcgcctttcccaaatgccttcccttggaagaccctgtgaaactgaggagatgggggaaactgaggcccagaaatggtgccgcttggccagagtggctgtagtagagccatgcatagacacaggccactcactccagtgcagccaccgccctcccagccaccctgaaaaaggtctggcaagactcatgaccttccgcctggcgcagtggttcacgcctataatcccagctctttgggagaccaaggcaggaggatcccttgagctcaggagttcaagactaacctgggcaacataacaagaccctgtctctacaaagcttaaaaaaaaaaaaaaaaaaagacaaggcatgctctcctccaggttcttaaagaaggagtgtcttcccctgtcctctgtccatagggctgttctgtagaacatcctgctcagtgaccgaggtaaggggtggtcctttttttttttttttttttttggaaagggagtctcactctgtggcccaggctgcagtgcagtggtgcgacttcggctcactgcaacctccgcctcgcgggttcaagcgattctcctgcctcagcctcccaagtagctgagattacaagtgccccccccaccacgcccagctaatttttgtctttttactagagacggggtttcgccatgttggccaggctggtctcgagctcctgacgtcagatgatccacccgccttggtctcccaaagttctgggagtacaggcatgaaccacggtgcctggccaaggtgatccttttgggggtctctcacgtttggaattaccttggttggggaaggggaggagcagctcccagagtgaccagcagagggcgctgggcccaacatggtcagttctgggagctggactcttggaactcgggaagactcccaagctgccttctcaaagttttgtctctggcagcgtctagaatggaggtgatgtgcactctagggtccctctaacaccttcccttgagcccctcgccttctaggctcatctgcccccaggactaagccccctccctttatttatttatttatttatttatttattgagacagagtctcgctgtgtcgcccaggctggagtgcagtggtgcgatctcgggtcactgcaacctccgcctcagcctccctagtagctggtactacaggtatgtgccacgacacttggctaatttttgtatttttagtaaaacaggttttcttcatgttggccaggctaatctcgaacttctgacctccagtgatctgcccaccttggccccccaaagtgctgagattacaggcatgagccaccatgcctggccagcctttagaaactgtctttagcaggcccctgtggactcactagggtataggaaccctgatggaaggcatgggggctgggcataccccatggacctagagccaggagacctggaaagctctggtctccaggccaccgaggggacccccagccctctcccattcatccaccatccgtatactaacagtcccgggacacatttactgaacttgtgctctgcttcatttgaacacatcactcctcttcttaactttggttgcctcccaccttcattttattttatttatttatttatttattgagacagggtctcattctgttgcccaggttggagtgcagtggtgcaatctcagtttactgcaacctccacctcctgcctcagcctcctgagcacctgggactacaggggtgtgccaccatgccagcttaatcaccttctttaaataaaatccaagctcctcactaccgcctacaggtccttctcggtggtccagcccacctctccctccatccagcctcccctttaaccatgacactctggccaagatgacctctcttcttttgttattgtttttgttgttgctttgagatggagtttcgctcttgttgcccaggctggagtgcaacggtgggatcttggctcactgcaacctccgcctcccagattcaagcgattctcctgcctcagcctcccgagtagctgggattacagatgtgcaccaccacacctggccaatttttttatttttagtagagacggggtttcaccatgttggccaggctggtctcaaactcccgacctcaggtgatccattcgcctcggcctcccaaagtgctgggattataggcatgagccaccgcacctggctgtctcttctgttcagttgtttttttttttttttttgagacggagtctcgttctgtcgcccaggctggagtgcaatggtgcaatcttggctcactgcaacctccacctcccgggttcaagcgattctcctgcctcagcctcccaagtagctgggactacaggtgcatgccaccacgcctggctaattttttgtatttttggtagagatggggtttcaccgtgttagccaggctggtctcgatctcctgatcttgtgatccacctgccttgacctcccaaagtgctgggattacagcgtgagccactgcacctggcctgtctcttctgttttttgaacatgctgtgttttcctgcctctgggtctttgcacaggccttttcctctgcctagaacagaattgtaagccctgtgggggcaggaactatgtctggttttttttggctctatagcccccaacatttatcctggtaaacaagtatgcaataaatgccagctgaaacaggtctttataagttttttttaagtttttttttttttttttttttttttgaggagtctcactctaccacccaggctggagtgcagtggtgcgatcttggctcactgcaacgtctgcctcccaggttcaagcgattatctagcctcagcctcccgagtagctggaattataggtgtcccctgccacactcggctaatttttgtatttttagtagagacgggatttcaccacgttggccagggtggtctcaaactcttgacgttaggtgatctgctcgcctccgcctcccagagtgctgggattgcaggcatgagccaccacgcccagttttataagtaattcttgaataaatgtgcctgagccttgtctattttttttttttttttttttgagatggagtctcgctctgtcactaggctcgagtgcagtggcatgatcttggctcaccgcaacctctgccttgcgggttcaagccattctcctgcctcagcctcctgagtagctgggaccacaggcgcctgccaccatgcctggctaattttgtttgcatttttagtagagacggggtttcgctgtgttagccaggatggtctccatctcctgacctcatgatctgccccccttggcctcccaaagtgctgggaattttttttttctttttctttttctttttttctgagacagagtcttgttctgttgcccaggctggagtgcagtggcccgatctcggctcactgcaacagccgcttcccaggttcaagtgattctcctgcctcagccctctgtgaagctgggactataggtgcgcgccaccacgccctgctaacttttttttttttttttttttttttttgagatggagtctagctctgctgcccaggctagagtgcagtagccggatctcgactcaccgcaacctccgcctcccgggttcaagcgattctcctgcctcagcctcctgagtagctgggattacaggtgcgtgccaccacgcccagctaatttttgtattcttagtaaagatggggtttcaccatgttggctaagctgtctcaaactcctgacctcgtgatttgcctgccttggcctcccaaagcgctgagattacaggcatgagccaccgcgcccgcccaatttttctatttttaatagagaaggtgtttcgccatgctgggcaggctggtctcaaactcctgacctcaggtgatcctcccgcctcggcctcccaaagtgctaggattacaggcgtgagccactgctggcctaaaagatgcttctggagtaggaggcattgggcctggctggaaggtttgcgtctgcaaaggcctgaagagaacatcccaggtgggagaaacagcaaggaggggaggtgtggaggaggcagggagaccctgttcttgggactactgtctgcagagggtctccagaggcaggaccccggtagggacactgatgcaggaggcgctctgcagtgcctccccccaatctgtgggccggggtgcccccagggacgcaggctgtgcgctcccacgccctgccgaagcaggacgttcccacgctggggcggccccgagaaaggctgtggggcgggccgggggcgggcgcccgcactcaggtccctccgcagcgggttctcagttgctcgctgggcagacccaggtcgcgctcccactgccgagcccgcgaggtgagtgagttgggggaggaccccgccacccaagcccgcgcgggtcaggggcgcggctcggtctcctgccttcgccgctgggtcacgccccagtggtccctgtcttagagggttggggggcttcttgtaggttagagttgaagactcctggggagtctgcatatgtgtgccatctctttccccaaatatagattacatcctccctctcttgatatgtggagctctcccacccactaatcataatcactggccggagcccctcttttccagaagtgtgggccgccccctcccacttatcacctgtagtgtgccccctccctcactctatttgttgggtgcccctctctctccctagatgtgggactccccttcttttccccagatgtgtgtctccctccctctgacccagttaagtccccatcctctaaagcccctccccaccaccatggatgccaaaccctgagtcttccctgggggtgggagactgggctcagccagactggctaagcccagtccccaccccaaccagatccagcagagcaggcctgtgtgcacgtaggcagccaattaggggggaaggggtgggggccagaccgtctgtctgttctgccggtgcaggggcctctggcccctgcagggaagagagactcaagaactgctccctctccacctggaccccacccagcttcctctggggagcaaacaagtgagcggggttctccaatctggccagactgagctggggctggcaccagaacccaagccctcagcctcaaastcttcagaccctggcccaagacttaggcctcctcccacttctcagatggtgaattgaggtcccaaaaaggggcttcaaaggtctaggacccccattggccccccgctggggatatcagacaaaattagaagggtcaagggcatgagrgtgaccttgaaacaytgggacacccctmccactaccataccagtggaaaaggatttttccatctggccctgygstttgggggcagagggtgatgtgggggcagaactcatctataccttcacgcycccagatgctccccagagctgcctggagcttggtgctgaggaaaggtggaggtggaagacgagggatgcacagctcagaaggcaccagtgagacctggactccttcctccctgcctaactccagagataggggcaggggtcccctctgcaggctgccccctttgcccttccatgccaccctgggcctgttcctaccacacttcccatgttcccatgatcccactccttggtccaaggtcaagtttctccaggaaatggagtgcgcggggtgagcagacagtggtcatctccattccaagcttccttaggagccagcccccaagcctcaggcccctagaccttttgttctgaggtggaggatgctgacagaaccttggaccctgattcctcctttccagaccctagtttcaatgctagtaagaagaaagagacctaaagtaggagagacttcagccagatagcagaagggccttgctgacccatggagaataacaaagataacatttattgagcccttactagtaccccaagctattataaacctcctttttttttttttttgagatagagtcttgctctgtcgctcaggctagagtgttcagtggcgcaatgtcggctcactgcaacctccgcctcctgggttcaaacaattctcctgactcagcctcccgagtagctgggattataggtgcccaccactgcgcccggctaatttttgtatttttagtagaggagaggttttactgtcttggccaggctggtctcgaactcctgacctcgtgatccacccgcctcagcctcccaaaatgctaggattacaggcrtgagccaccaagcccggccaccttctttattaatatagttagagatagggtgtcccaagggcagcctggactcagctccctccattgtgtctgcagcccgtggtggggggaagatgtccccctacaccaactgctatgcccagcgctactaccccatgccagaagagcccttctgcacagaactcaacgctgaggagcaggccctgaaggagaaggagaagggaagctggacccagctgacccacgccgaaaaggtggcctgtaagtgtcagggtggggctggctggagagagtgggttgggggctgactttggaaagaatggcctgtcagggatcagagggcagagagaggcccccaagacagccagaaacctccaaacacctgaggggtgaagttcatgcctttgttcgtttctttattcactcacctgtttgtgcatagcctgatgctaggcaatgctggggacatgaggtgaatcacctggatagttcctgcccccatggtgcccccggtcccrtggggaaaaccaatacagactccaataattgtaatacagaacatgtggctagggtgaggtgtgttcaaggactgtgagatgaaatcttggtggacctcccagaggagggcacattccagctggcctttaagggtgaagaggagggcactgccagggagtgggaactgcatggggaagggtgtcagagcaggagactgtggagggccctggaattgagtgatgtgggggagatgggacagagagaggcaggtgaggcggttggggaggagccctctgaccctgggaggctggagggatgtgtggtcccttgtcatgtccaccagagcatccctgagctgaccctttgaaatttggagcaccttattttcattccatgaatgggaacactcagcctgacctccaagatttcaagggattcctagtggggaaaggttcatgcttctcacattcattcattcagtcaacatcttatttggcacctactacaataccatgcactgggaatgcagctgtgagccagccaggctccgttcctgcctgtgagcttgcatttccagccctctctcagcacctttaccccttctctctctctctctttctacacacacacacacacacacacacacacacacacacacacatcttggttttttcttcatccatttcagaaattgacactcttggggggagaggggaggaatagcattaggagatatacctaattctaaatgatgagttaatgggtgtagcacaccaacatggcacatgtatacatatgtaacaaaccacatgtaccctaaaacttaaagtataataataataaaatttaaaaaaaaaagagaaattgacactctttatctgagcatggtggcacatgcctgtcgtcccagctatttgggaggctgaggcaggaggatcacttgagcccaggggagctgaggctagagtgagctgtgattgtgctacggcattgcactccagcctgggtaacaaagtgagaccctgtctgaaaaaaaaaaaaaaaaagagagagagagaaagaaatgatggacattccccaagcaagatgataatgagcaccatccctaatatgtcctgcacgcttacatgtagcaggcaccgctgtggcgttaggttgctctcgttagctcacatttgagagactgaggctcagtggcgtgcagtcacttacagtggttgcacagctagagagtggtggaggcaagatttgaaaccacatagacaggcaccaggggtttcacccttagctgctacaccacattagctacaatgaaggtttggtgggatgcttggggagtttcagtgtaacctcacagctcaaacaactttttttttttccttttctttgagacagggtctctgtcacccaggctggagtgcagtggccccatctcggctcactgaaatctctgcctcctgggctcaagcgatcctcccactttggcctcctgagtagctgggactacaggcgggcgccaccacacctggctatttttttttttgtattttttttgtagagacagggtttcaccatgttggccagactggtctcgaactcctgatctcatgatccacccacctcagcctcccaaagtgctgggattacaggggtgagctaccatgcccggctatttatttatttatttatatttctgtagagacagagcagtctcactatggttgctcaggctggtcttgaactcctgggctcaagcaattctcctgcctcggcctcccaaagcactgggattacaggcatgagccatcatgccaggccaaatgccttgagtcttgtcagacctcttccagggcaggcaggcgtggcagcactggagtgcatggcctgtgtctatgcatggctctaccacagccacactgagtggcctccactggttgatttcattgtctcagcctgaaccgcccacccaagtatcttcccaaaacctaagacagttcccttttcccaaggaattctgctgccagctttgattttcctttagatatttattttcatatttatttaatgtactgagaaaggattacacacgtagggtaattttttttttttttttttttttttttgagacagagtctcgctctgtcgcctaggctggagtgcagtggcatgatctcggctcactgcaacctccgcctcccgggttcacgccattctcctgcctcagcctctcgagtagctgggactacaggtgcccgccaccactcctggctaatttttgtatttttagtagagacggggtttcactgtgttagccaggatggtctcgatctcctgacctcgtgatccaccacctcggcctcccaaagtgctgggattacaggcgtgagccactgcgcccggacttacctggctaatttttaaattttttctagagacagggtctcgctttattgcctaggatggtcttgaactcttggactgaagcaatccacccgtcttggtctcccaaaattctaggattacaggcatgagccaccaagcctggccccctccctaattctgttagaatgaaatccaaactcttctccatggattctaacaaggtcctgtgtgaaccggctctgcctctcatttgagagagccagcctctcatttgctaaattctctctcttttgctcatttcactccagctacagtggtcctcacttcacactttccctacccacttcctgcttcagggtttttgcacttccttccagttttcaccaactttctcccattgatttttcaaacctcagctccaatgtcacctcctctgagacaccttccctggccagccaactgtttgcctgaagcatttgccattgtctccccctctaaactccacaagggcagggattttcatctggctcattcactgctgtcacctgttcctggtcatgctgtgcatatagtacgtgctcagtaagaatttgctgaatgaacagcatctgctgcagggagggggaagccgggatcacttagagtggacgcacctgaggccccttccccacacccaactgcctccagtgtaccggctccagttcaatgagacctttgcggagatgaaccgtcgctccaatgwgtggaagacagtgatgggttgtgtcttcttcttcattggattcgcagctctggtgatttggtggcagcgggtctacggtgagtggcaacacctcatctggctgcagtcctgggccatgcccttgtggtcacggccaccagacagtttcttaaaggaaccatgctggcactcatctgaagagctgaaaatttctgaagaggtgtagggtgaaggacagagcatggctgtctaggtttgaatgcaggaactttacctctctgggcctcagtttcgtcatctctaaaatgggaatagtaatgttccatctcagggtacttaagaggattttaatgagagagggctgtaggccagtgtttggctcatagtcatgaatggtgttgtaactgattgttgtgtatgaactgtgtgtttttcagtgtatatatatactgaacttctgcctccccagttcaaatgattcccctgcctcagcctcccgagtagctgggactacaagagtgtgccaccacgcccggctaatttttgtatttttagtagagacagggtttcgccatgttggccaggctggtctcaaactcctgacctcaagtgatccgcctgcctcgtcctcccaaagtgctgggattacaggcatgagccactgtgcccggtggcctgtccccatatttttaaagtgaacactcttacctacttcctactttcaaccctcttagaaagtaaaaggaattatttcatcctggaccctgcccagcaagtgggaacaaactcagtaattatataattatagtaggtaacatgtatcaggtgcttaatatttgtctaacattgtgccaacagctttggaaatactcagtccccacaatcctagtggataggacctcttttgacaggtaaggaaactgaggctcagagagatgaagtgacttgttgaaggtcgcagggcaagggagtggtwgagccaggatttggattcaggcagtcttcaaatcagtgatcttattaccacagaccacagaggtaggtgaggygactgagttgtgaaggaccttggcccagctcccacagtccttggggtmtaaggcaaagctggggtcagaacccagaggtgcctgggacgatgctmtaggagaaagtctggggtgcggggctagacagggtggagtgagctcctcagtgcaagatacttcaaccctggagtatcttgtaccgtcagccttgcgagtggctgggaggctacagggtrgctggagaccctggctggtgtaggaagactggcaggatcmtgatccaccccatgtactccctgcagtatttcctccaaagccgatcaccttgacggacgagcggaaagcccagcagctgcagcgcatgctggacatgaaggtgaatcctgtgcagggcctggcctcccrctgggactatgagaagaagcagtggaagaagtgacttgcatccccagctgtctccctgaggctccgccctggctgggagcctctggcggcccctcccctcccctgcccttaaccccagtaaagctccaaaaaaaaatttattctcttctgcctctcaccaccacttcagactttacttggcacctaaaattaggcattttaacaggtgaggggcaagaagggctcagaactcatctagtcaatgagggcttcctggaggagtgggggctacagccaaggcttaggtgggattaggaaaggcaagaagaagggaaggcattcggggtggagcaagtggcttaatcaaaggtgagaacactcttttattcagctaattaacaaatacttggccgggtgcggtggctcactcctgtaaccccagcactttgggaggccaaggagggcggatcacttgaggtcaggagttcaagaccagcctggccaacatggtgaaagccccatctctactaaaaatacaaaaaattagctgggctacttttacacccagctaatttttgtattttttttttttttttttgagacggagtctcgctctgtcgcccaggctggagtgcagtggcacgatcttggcttactgcaagctccgcctcccgggttcataccattctcctgcctcagcctcccacgtagctgggactacaggcgcctgccaccacgcccggctacttttttgtatttttagtagagacggggtttcaccgtgttagccaggatggtcttgatctcctgaccttgtgatctgcccgcctcggcctcccaaagtgctgggattacaggcgtgagccatggtgcccagcctagttttttctatttttagtagagacagggtttcaccacgctggccaggctcgtcttgaactcctgacctcatgatctgcccgccttgacctcccagagtgctgggattacaggcatgagccaccacgcccggccttttttattggtagagacagggctccactatgttgcccaggctggtctcgaactcctggcttcaagtgatcctcctgcctcagcctctcaaagcgctgggggattttattctaagtgtgatgggaagctgtgtccatttgggttctttgagaagcaaatgccaagaaggaattaaccatgtgaagagatttattgggggtgatgcctgtgagagataaaggagagaggaagcaggagtaggttgggagaatcttcagactgtggtgcagatctgacacctgtggaagaaaagaagggaagaaaggagagttgcataggaacagcctcagacttcagggcctctggatcattctgagtcccatcaggagacagaaaccacaaagcaatttaaacgggttgtttaatataaaaaaattattaatcttacacaggaaagtaaccataaagatgcgaaggccgggtgtggtggctcatgcctgtaatctcagcactttgggaggctgaggtgggcagatcacctgagatcaggagttgaagaccagcctggccaacatggaaaccctgtctctactaaaaatacaaaaattagccgggcatagtggcacacacctgtaatcccagctactcaggaggctgaggcaggagaattgcttgaacctgggggacggaggctgcaataagccaagattgcgccactgcactctagcctgagcaacagagcaagaccttgtctcaaaaataaataaataaataggcaaaggccaagcacagtggctcacgcctgtaatcccagcactttgggaggccgcagcgggtggattacctaaattgcgagtttgagaccagccagaccaacatggagaaaccccgtctttactaaaactacaaaattagccaggcgtggtggcgcatgcctttaatcccagctactcgggaggctgaggcaggagaatcacttgaacccgggaggtgaagtttgcagtgagccaagatcacgacattgcactccagtctgggcaacaagagggaaactctgtctcaaaaaaaaaaagaaggcacagagacctttaaaaggtacccaaggagagtccccaaggaaagataaacttgataaacttggaagggggtgccctccccaagtgaggctcagacctcactggagaaggtgtggttggttgcagcccactggatggcgagaagttgggtggcttgcctacggccaaagctggtccatagtcccctgcgtaagcaggaataaccctcagagggctaagggagctgagactggtgggcgggtggaattggggcacatttgcagatgtgaggcctaaagcttgaggcatctgcatcaggaggattgctggaagatggtccccgggcctgaagcctgcaatgttgctataggctatgcacactgggctcatggctggggcagatcaccactaaatgtcctcaccacactgctaagcaaccaaaaaacaggagcaagaacagcgcgtgcacacacacacacacaaacctcctctcctcctgaaagtctcttctagcactgactacttgcaaagctcagcatctcactgtcaaggagttcagttcatctccagtgtgcagagcagagtgcatttggagctgagcagtaatacattgataactggcccagcatctttcagaaagtcttggctaggccagtgggaagtcccagagcagtaatgcccgctagaggagtcctgtattgggcaaaattaatgcatccctagtgtattagggttctctagagggatagaactaataggatagatgtatctatgaaagggagttcattaaggagaatttattcacacgaccacaacgggaagtcccacagtaggccatcggcaagctgaggagaagccagtctgagtcccaaaacctcaaaagtaaggaggacgatagtgcagcctttagtctggctgaaggcctgagagcccctggcaaatcactggtgtaagtctaagagtccaaaagctgaagtctgatgaaaaacttggagtctgatgttcgagggcaggaagcacccagcatgggagaaagatgaggccagaagactcagccagtttagtacttccacgttcttatgtgtgattatttatttatttatttatttgagtcggagtctctctctgtctcccaggctggagtgcagtgccgtgatctcagctccctgcaacctctgccccctaggttcaagcaattctcctctctcagccttctgagtagctaggattacaggcatgggccaccagcctggctaagttttgtatttttaatagagatggggtttcaccatgttggccaggctggtcttgaactcctgacctcaggtgatccgcccacgttggcctcctaaagtgctgggattacaagcatgaaccaccacacccggcccctctgtctacttttaacccagctgtgctggcagctgattagatggtacctacccagattgagggtgagtctgcctctcctagtccactgactcaaacattaatctcctttggcaacaccctccaagacacacccaggaacaatactttgcatcctttaatccaatcaagttgacattcaatttttttttttttttttttttttttgagatggaatctcgctctgtcactcaggctggaatgcaatggcgcgatctcggctcactgcaacctctgcctcctgggttcacgccattctcctgcctcagcctcctgagtagctgggactacaggcgcccaccaccaagcctggctaattttttgtatttttagtagagacggggtttcactgtgttagcaggatggtctcgatctcctgacctcgtgatcctcccacctcggcctcccaaagtgccgggactacaggcatgagccactgcacccagctgacactcagtgttaaccatcacacctagtaactccattgtgctcagtccctggttgggagcggcccagaaagatcatggcctcagcatgaacactacagcaggtctgaaagtgtggcagctggaggtggtcacacaactaccctcttcatagcaggttctcttgaagaatctgagtagcacgtctccatagatgccctaggtgccaaaggaagaatttagcaaagcagttgtgacaacagtcattcaaccaacaaatatttattgtggattttaacttaatcagctatttatttatttatttatttatttatttatgagacagagtttctctcttgtcgyccaggctggagtgcagtggtgcgatctcggctcactgcaagctccgcctcccgggttcaaggagttctccttcgttcaagcagttctcctgcctcagcctcctgagtagctgggattacaggtgctcaccaccacacctggctaattttttgtatgtttagtagagatggggtttcactatgttggccaggctggtcttgaactcctgacctcgtgatccacccgcctcggcctcccaaaatgctgggattacaggcgtgagccactgtgtccggcttaatcacctcttttaaaaggtcttatctccaaatgcagtcccattctgaggtgctgggggttagaacatccacatatgaatttgggggagacacaattgagaccacaatagttgggctcagggctaggcacggtggctcacggctgtaatcccaggatttgggaggctgagcagggcagatcacttgaggccaggagttctagaccagcccggccaacatggagaaaccccatctctactaaaaatacaaaaattagctggatgtgttggtgcacgcttgtaatcccagctacttgggaggctgagacacaagaatcgattgaacccagaggtgaatgttgcagtaaaccgagattgtgccactccactccagcctgggcaatagagcgagactctgtttcaggaaaaaaaaagttggactgaaggttattctgtttgtctttttgttctgggaccagtggacacctagggcatgttcttctcatggcagaagtctgagactttggcagggcagaggaatgggtggggacactcttaaagtccaggcccaaaacaagcacacacaaaactgcaccacattccactggccaaggtattccaattatgattgctgcattacaaacctacctgagactgactggcataaaacaattattttactatgttcagagattctgtgagtcagggatttgggccgggtatggtggaaaccccttgcctctgctctagaacatccggggcctcagctggaaacactcaagggctgtgactaggattggctggaggtgttttcactcacatatgtagcacttgatgctgggaccacagctggacctcagatcaactggaacaccactttgtggcttccctccatggtcactctgtgtggactagtttggtctcccttaaaacatggtagctggaggtcgggtgaggtggcttatgcctataatccctgcactttgggaggctgaggtaggcagaccatgaggtcaatagatcgagaccatcctggccaacacggtgaaaccctgtctctactaaaatacaaaaattagctgggtgtggtggcatgtgcctgtagtcccaactagtcgggaggctgaggcaggagaatcacttgaacccgagaggcggaggttgcagtgagccaagattgtaccactgcacaccagcctggagacagagcgagactcggtctcaaaaacaaaaacagtggctgggtcccaagagagcgaaggggaagtgccttgtctttctttcttttcttttcttttttttttttgagacagagtcttgctctgttgcccaggctggagtgcaatggcgccatctcggcttactgcaacctctgcctcctgggttcaagcgattcttgtgcctcagccacccaaatagctgggattagagacgtgcaccaccacgcccggcttttttgtgtgtatttttagtagagatggggtttcaccatgttggccaggctggtcttgaactcctgacctcaggtgatccgcccgccttggcctcccaaagtgctgggattacaagtgtgagccaccgtgcctggcctgcatggtctttttatgattcagcttcagaagacaaaaagc

SEQ ID NO: 98031 - DNA, 52003 bp, Homo sapiens
attattcaattaacttggctaaacttacacacagtgtgatgcataaagaaagggcctttcattatcattcgacacttagccatgcacttttaaaagcccgcttatatggggaagaaaaaggacatttacaccaactattgtaaagcagccctgctctttgagtataatttaatcagaactggagtttgggcatgtctgcaggggtagaaccacatagtcagtaaaggaaacgcagatggggtcaagagctagagaggccacctttcctgttaagtccccaggtagctgctgtcatgtcctctgcactgtggtcttgatgggcccttcaagtccctttcatgccggagaggaaagtctgcatgccccactgttgactggcggctaataagtttctgttttgtttattataggaacaatttgcttgagtctttggttaccttacaagtccttcatcctagtacaaagcccttttgggctcttttattttaaaaatgtatgtatgtttgtatggatggatggatgggtggatggatgatggatgatgggggtcttgctgtgttgctcaggctgggccttgaactcctgggctcaagcaatcctccagcctcagcctcccgagtagcttgcactatactcgtgccatcactcctggccattccagctcttttattttaacaaaataaagataaatgaatgtatttaaaaaattgcaatcctgaattaaataatttgtcttcaggcttcttccttggaaactgagatggccaaatgtaaaattgtttatattttatttttttataaggtttgaatacattatagaaaatagggagttattttagctcagtatgactggtaataacaccctggggaaattttttttcaaaatctactcagaggtaggaaatcaatttctggaaaccagaccattgaaaacagactacttttgatgaaatgtgaataataaaatctcagtagtgacaagtctgactacctctgccctctctagcctttggctctaaccttaaactgattttacatttttttctcttgactcatttgagaagcccttatagaacatcttattttgcatagtacagtgggctcagcattcatttttattgattataattgctctgttcaaagcataataatttaggaaattgtatttttcctcaggacttggactaaagtctgatgaacttcccaatcagatgagcatggatgattggccagaaatgaagaagaagtttgcagatgtatttgcaaagaagacgaaggcagagtggtgtcaaatctttgacggcacagatgcctgtgtgactccggttctgacttttgaggaggttgttcatcatgatcacaacaaggaacggggctcgtttatcaccagtgaggagcaggacgtgagcccccgccctgcacctctgctgttaaacaccccagccatcccttctttcaaaagggatcctttcataggagaacacactgaggagatacttgaagaatttggattcagccgcgaagagatttatcagcttaactcagataaaatcattgaaagtaataaggtaaaagctagtctctaacttccaggcccacggctcaagtgaatttgaatactgcatttacagtgtagagtaacacataacattgtatgcatggaaacatggaggaacagtattacagtgtcctaccactctaatcaagaaaagaattacagactctgattctacagtgatgattgaattctaaaaatggttatcattagggcttttgatttataaaactttgggtacttatactaaattatggtagttattctgccttccagtttgcttgatatatttgttgatattaagattcttgacttatattttgaatgggttctagtgaaaaaggaatgatatattcttgaagacatcgatatacatttatttacactcttgattctacaatgtagaaaatgaggaaatgccacaaattgtatggtgataaaagtcacgtgaaacagagtgattggttgcatccaggccttttgtcttggtgttcatgatctccctctaagcacattccaaactttagcaacagttatcacactttgtaatttgcaaagaaaagtttcacctgtattgaatcagaatgccttcaactgaaaaaaacatatccaaaataatgaggaaatgtgttggctcactacgtagagtccagagggacagtcagttttagggttgcctgtatccagtaactcggggcctgtttccccgtgggtctctgggctgtcagctttcctttctccatgtgtttgatttctcctcaggctggtagcaagttctggatcttatacccaacacacagcaacatccagaaataaagatctcaggaccccccagcaagtcgttttgtgtctccttggactgagttaagttacaagcctttcttatacctgtctttgacaaagaagacgggattgtctttacataaaaccagcctgctcctggagcttccctggactcaacttcctaaaggcatgtgaggaaggggtagattccacaatctaatccgggtgccatcagagtagagggagtagagaatggatgttgggtaggccatcaataaggtccattctgcgcagtatctcaactgccgttcaacaatcgcaagaggaaggtggagcaggtttcttcatcttacagttgagaaaacagagactcagaagggcttcttagttcatgtttcccttagcgcctcagtgattttttcatggtggcttaggccaaaagaaatatctaaccattcaatttataaataattaggtccccaacgaattaaatattatgtcctaccaacttattagctgcttgaaaaatataatacacataaataaaaaaatatatttttcatttctatttcattgttaatcacaactacttactaaggagatgtatgcacctattggacactgtgcaacttctcacctggaatgagattggacactgctgccctcattttctgctccatgttggtgtccatatagtacttgattttttatcagatggcctggaaaacccagtctcacaaaaatatgaaattatcagaaggattatagtgcaatcttatgttgaaagaatgaactacctcactagtagttcacgtgatgtctgacagatgttgagtttcattgtgtttgtgtgttcaaatttttaaatattctgagatactcttgtgaggtcactctaatgccctgggtgccttggcacagttttagaaataccagttgaaaatatttgctcaggaatatgcaactaggaaggggcagaatcagaatttaagctttcatattctagccttcagtcttgttcttcaaccatttttaggaactttcccataaggttatgttttccagcccaggcatggaggatcacttgaggccaagagttcgagaccagcctggggaacttggctggacctccgtttctacgaaataaaaataaaaaaattatccaggtatggtggtgtgtgcctgtagtcctatctactcaagggtggggcaggaggatcacttgagcccaggaatttgaggccacagtgaattaggattgcaccactgcactctagcccaggcaacagaacaagaacctgtctctaaataaataaataaaaataataataataaaaaagatgttttccctacaactcagacttttcatttgaactcggtccagcaaggaaaatataacccactcgaagtctttaaaacagaggaaatttaatataaagaattccactggtgacgaaagagcagagaagcccagaagatagtgaggcaaccctgataggaacataactaggaagccaagaccactcctatggttgcaggggtgatgggaaagctggtgtacttggacccagaagccaaagttgctgcacccaccttggagacatagacactggcagtaatacctcagggagaagaaagaaatctagggaaatatcctggcttctttccttctctctctcccctagtcttcctaccagtgtctcccattagccaaatctacctagaagccagaaaacaagggaaccctggaaatgtagccccataagataaagagcaccaaaggaaatagatctgagcagacaggcagcacaaaatgcagtgtgtatggtttattcactcagtaattcctttagcaaatgtttattgaggatctactaggtgccaggtatcatgatacttgctggggataccataatgaacaaaacagacctgttctccgctcttgaggaaatcaaagacaaacacaggatatggaataaacccagaattatctcattgtaaaatgtgttaagtaccacgaggagaaatatcagggccatctgacacagctaatgatttgaagaagggtgtgacctgccaccattttaaatctagttatttcactcctgagctgtgtgtgtggaaaacttgtagtaaaaaatagaatgtctatatttataaaaagtttatgaaaagatatcaatttatttacattttgacaaactctatgtaataaggctttattacctcacggccatgtgtgtgatcatgtgtaatagcatgtgtgtatgagagagagaagccatatgtaattatgtgtaataacgtctgtgagagagaagccatgtgtgtgatcatgtaaaataacgtgtgtgagagaagccatgtgtgtgatcgtgtaaaataacgtgtgtgagaagccgtgtgtgatgtgtaataacacgtgtgtgagagagaagctatgtgtgcaatcatgtgtaatagcatgtgtgtgtgagagaagccatgagtccgatcatgtgtaataacgagaaaagccccatgtgtgatcatgtgtaatagtgtgtgtgagagaaaagccatgtgtgtggtcatgtgtaatgtgtgtgagagagaagccgtgtgtgatcgttgtgtaataacgtgtgtgagagagaaaccatgtgtgatcatgtgcaatagcatgtgtgtgtgagagaagccatgtgtgatcatgtgcaatagtgtgtgagagagaagctgtcatgtgtaataatgtgtgagagaagccatgtatgatcatgtgtaataacgtgagagaagccatgtgtgaccatgtgtaataacgtgtgtgagagaagccatgtgtgtggtcatgtgtaataaaatgcatgagaagccatgtgtgatcatgtgtaatagcatgtgagagagaagccatgtatgatcatgtgtaataacgcatgtgagagaagccatgtgtgaccatgtgtaatgtgtgtgagagaagccatgtgtgatcatgtgtaatagcatgtgtgtgagaagccatgtgtatgatcatgtgtaataacatgcatgagagaagccgtgtgtgatcatgtgtaatagcatgtatgtgagaaaccatgtgtgatcatgtgtaatgtgtgtgagagaagccatgtgtgtgatcatgtgtaatagcatgtgtgtgagaagccgtgtgtgatcatgtgtaatagcatgtgtgtgtgagaagccaggtgtgatcacgtttaatagcgtgtgtgtgagagaagccatgtgtgtgatcatgtgtaataatgtgtgtgtgagagaagccacgtgtgtgatcatgtgtaatagcatgtgtgtgtgagagagaaaccatgtgtgtgatcatgtgtaatactgtctgagagagcccatgtgtgtgatcacgtgtaataacgtgtgtgtgagagggagagaagccatgtgtgtgatcacgtgtaattgtgtgtgtgtgtgagagagagagaaagagagagggaacagtacaaaggaggatccctttagaaaagtattccaacgtcttatggagccagagggctgattcacagctgctaatctctgtcatgctttccagcaccaccccctccctctcatcataacttgtgatcttagaggcaggaaagaatttgagcccctcccccagcctgaccatctctgttggttgctcggccaggctccacgtcaaatccagtttgaaacacagaccctaggaccacgcaggaggtggtgggctcgcaggaaggttcctctcccagtggccatgggtagcaacagtgggcaggctggccgccacatctataaatccctagctgatgatggcccctttgactctgtggagccgcctaaaagacccaccagcagactcatcatgcacagcatggccatgttcggaagagagttctgctacgcggtggaggcagcgtatgtgaccccagtcctgctcagcgtaggtctgcccagcagcctgtacagcattgtgtggttcctcagccccatcctgggattcctgctgcagcccgtggtcggatcggccagcgaccactgccggtccaggtggggccgccggagaccctacatcctcaccctgggagtcatgatgctcgtgggcatggctctgtacctcaatggggctactgttgtagcaggtaagtgggctgcacaaggtgggcagacagggatatgtgtcttagtgtgtacctctgcaggaggaggatgttcatgtgtttgacctttcctagaaatttgttagaattgatctctcctaggttacaatgaacttcccctttgacaaatttggcccagattctgtggttggggagcctctacttctagaaatatcaaaataaatatgtttcattgttgtgaagatttaaaaataggattaaatttgtatctattttattaaatttgtatctattttatcgaattgaatatttttacatatttatcaattgagttactttttgagcccattatgctctatttaatactcttatcaaattgactggctgccaaatagctccataaatatttacaataagtcacctgtgtatccaaataagttaattctgttcatagttttatgtagagcgttttaataggcgtagggcataagcccatcagctcaagaggacctttctggcattgcaaattctggacaaaagcaaacctgagggtaggcattttttctagccattaatcagctaccaattaatcagtaattgatggtagtacaataaagttgcattgcaaaaaggatcgctaaaaatagcacacatttgtagatcattaactctcaagctagcagaatcggtgattatgaggcaggataatcaattatcatttgtacatatttgaaagaaagcgtaaatgtacaaatgtaggatatttccaggagaatgaacaaaaagctgataagcattgttgactctaaggaggattactgaaggacaggaggtgagaagtggcgggtagacttattgttcatttaattttatactgcaatttttaaaacgtgtatataatctatgctattcttaagtttaaaaagcaaatggaaacaagagaaacaacaatgtrtcttttataggagattgggtaaacgattacagcgtatccgtagaatgaaaatccagctgttaaaaattgtgaggagctgaaattatatgaagaaagttggttactgcatcagtgctgttcaaagatgtggcctctgacctgcccctcagcatcagcagagaccgttagagatgcagtttcycgggcccccttcaggcccaccaattgaatcagagtcttgggaaatggggccagcaatctgtgttttaacaagacatacaagcgatagttcaatatgccagactttgagaagcactgcgtttgactaccattgtacacgtgtgtcygtatgtgcagaagtgcgtaaaaggaggccttaaagcctgacctttgctggggctgggattggaagcatctccctcagcttttttaatagaattggaattgcttgcgataagcatgcatacttttttatttaaggagatattttacataccagaaatttcactaattaaaagtgtacaattcagtgcctttagtatgttgtgcaaccattaccactctctaattctacaacattttcatcacccccaaaataaacccattaccatcaatagtcacgtccacttttcccctatgcaccagccctaagcaaccactaatttactttgtgtctccatagatttgtgttttctggacattcgcttgcataatttttaaaacctgaaaaaaaatgtaaagctatttttatttggaaaaaagcaaaataaaagcaaggaagatgattttatggcaagaagtttaggtggaaattacaaaacgyggatgattctaaaacaggatttaggagaccaatgtttatttttcttttagctttgattgctaacccaaggaggaagctggtttgggccataagtgtcaccatgataggtgtcgttctctttgattttgctgccgacttcattgatgggcccatcaaagcctacttatttgatgtctgctcccatcaggacaaggagaagggcctccactaccatgccctcttcacaggtagggaatattccagaaagtctctccttcagctccccagacaatgaggcacttccactaaagccatccagtgtctctacacgtggagttttttgaatgaacgggtcagctgatgggctgctcccgtcatgcgggcactgtctccccgtgcatttctctgaacagtcagcttgtgactagtgctgcagtttctgcaaaggaagtttacagaagagctttcttaagaatgctttgtggagacaattacaactgaaatggaaagaagccttgtggattgtacttttgcattagagcagaggatctcaagcatcagcaatgtagcatccacattccttagaaggtcattgaaaatacagttgcctgggctccttctccagttattctgattcagtgagtctaaggcggggcccagacatttgtattttatttaataaagaccccagatgattttgtggcaggtttaaaaaacaaaaagagaaaacaaaccaagcaaacaaaaaactcaacgtcttagaaatttcttagttatgtaaaaggttggcatttcctcaaccttgtggtttgaaaaagttcatgccaggaggaaaatgggagctctcttgatctcttgggactgttgccagcctactttggttactgttggtcaattgtttagagcaatgctactcagagcaccagttaggactatgctagaactaggcattgaaatataaggcgacaggaggatcctggcccaagaggatttttatatctaagagggggactctatcagcccaccttatttgattgtctttgtagcccagccaatgcctttatttatgttttgatgtattctctctccttccatggccaggtaggtccatgaaaagcaagatttcaagttttgctcatagtttctgtctctagagctaagactgctgcctgcccatggaagccactggagccaatatttgtcatttgagcaaacatttgaatagttgaaaacatgaaggagtgaggccgttggagcacagttggtagatcctcctctgtgtaaggaaggcagaggggcaggagtgcagccccgtctgtcactggcccctgcccactatgtctccaggtgtttaaaggcacctaagacatggccagggcttgagacttcccctgcctcacctttgctcttggcttcccttcccactgcactttccacgtgtgtctcctcactcgggtgctcccaccccgctggcgtccttctgtctctggggtcagcccagcccatcatacctgccccagggtttggcatgagctcttgccctgcctgggacacccttccccatataatcccatagtcatgcctttattccactcagatttctcatcagatatctctcatcagtgaggtctttcttggctaccgtacctggcatagtatgaccactcctctttctcctcatccttattgggtttgatttttctttctagtgcttatcaataccagactaactgactggctatttatttatctatcatctgtctctctctctccttctcttttttctttctggttgtctctcccatttagaacatcaatcccagctgagcagacctgttgttttgttctctgatgaatcttcagttcctggaagtgtctgctgcatagtaggtgctcagtaaatactgaacaaacatttctcaaataccccatgtatgataataaccatgtattaggtattttctcttacattatctcgatcctgacaatggccatgtggaagtggtgtgattcccatttttcagatgtggaagctgagccttgaaagcagtggtgtgcttacagctggctcatgctggcttcttgagaatcaattgtcaaattttaggaattcagtgaacttgttgacatcatattgctggcttgaaactggccatgatggcagtattaaaactctagaaattggcaaagctataaatcatggttttttttttttcttggaaagccagttgttaaatatttacctgaagtccactgattggagtaggaggggggttcggtgattaagtcacttgcccatagtccatagccggaaagtctcadtgaatagattccaacttcattttcctaacttgaatctgacaattccttctgttttattataatttgttgaaattaattacaaggtcatgggagactttctggcttttgaactcgatattaagagtttattgatctacaggacattggacaatgtggccaccacttcccagcttacaattgtattagatgtggctaaaagacccatgctttgctgccttgatattaaaagacaaaactctgtgttagggaaacttttccaaggccaatacatgatagtattgtaaaccagaattaaaattctaacccccagctaactgaaggacccttcctctcggccaaggtcatcctaaagtaaatctgaaatactagtttaggccatgatgggaatgggtggttggacatgcctcattatacctctgtccctttggaattcaagcacaattgatcagcattaacattaaagcagagactttaaaactgacaaaacagactgtttgtagcaattaggtattaacatgataacatagcaggccctgaaagaaatagaagtatttcaccccaatatacatttatttgatatattttgaaatggccctgaaaagctgtctcttatggggaaaatctaccttctgtactcctcactcttccctttccagttattttcctgatttaggatagaattaactaaagtatctggcacctttttaagtctgataggaaacgtttacagtctattctctctgaagcctgctacatggaggcttcatctgtataataagaaccttggttgccacaaccccttattttaacccagacgctctcttctattgcttccaagtctatagataactctttcaaccaattgccaatcaggaaatctttgaatcttcctatgacctgggagccccactttgatttgtcctgcctttccagaccaaaccaatgtacatcttacatgtattgattgatgtctgatgtctccctaaaatgtataaaaccaagctgtagccctactgccttgggcacatgtttcaggatctcctagagctgcgtcacaggccatggtcttcatatttggctcagaatatatctcttcaaatattttacagagtttgactcttttcattgacagtatttttatgagtttcagacaatatatcccttttgagattttctgttgatattagtatatggtatggtgccagcaaacatcaataattttaatattaccttcattcaggctcttagtacatctcatctgagctttagtactgttgatggaaaaaaattaaaatatttgaagaagtttattctgagccaaatatgaatgactatggcttggaacacaacctcaagaggtcctcagaacagttgcccaagttgtttgagttatagcttggttttatatattttagggagctagaagttacaggcaaagatataaatcaataaatgtaaggaatacattggttcggcccagaaagttggggcaccttgaagaggggggctcacaggttataggtagagtcaaaactttttcaattggcaattgattcagagttaagctttgcctaaagagttgaagtcaacagaaagaaatgcttgagttaaggaggattgtggaagccaaggttcttgttatgtagatgaggcctccagatagcaagtttcagagagaatagatggtaaatgtctctttttgagtcttagaaggtgtcaggctctctaaaaaaaaactggtaagggaaggaggttctctacaggaaaaaaaatcccccacaaaagatggctttgcagggccattccaagatatatcaaagaaatatattttgggtaaaatgcattaattttcttcagggtctgttatctgtcatgtgatggtataccagagtcaggttggaatttggcatcctattgctatgaagagtgttttgtatggcagtcttaagatctctattttaatgttaatgctggttaattctgtctaaactccaaagggaagggttataacagggtatgtccaacacctcccttctcatcatggcctgaactaggttttcaggtttctttgggatccycttggccaagaagggtgtccactcagtcagttggaggccttagaattttattattggtttgcagtactcatcctttaactgttctccagtctccagtttcttcccactccaattgagccaactgatagcttccagattcatatttttaaaagccagccgtgatcaggacactttcctgcttgatgagcttcagtggctccctatgtgcctcatgggtaaataatattttcctagacagaggttcaaagctgccacaatctgttcccatcctactctccaagctttacttcccattactccttccacattctctgtgctctgaataatttttcatcatgtttccaggagcagcrggcaggtctgttttattccctgcatccctcactcctctaccactgccttgcatattgtaggtgttcaaaataaataccaatgggacaaatgaaggagccagcccttccttcttcaggttctgggtctttgctcacatcgaaagtttctttctccttttctgcctgtggagatcaaagctgcttggaaatgctcactcattttctaggaacaagggccctcattctcttcgaaactgcaggtatacttaatttctaacttggtcggggactagatccacaaaataatcaaagcacaaaagtttattgagtagatgaacatgaaggtgccagtgaggtagataactccatcaggaagagaccattgaggctgcagttgatcacacatacatcctgaattttcatctcctcctggggcctttatggtctgtttgggctgccatgccagaatgtcactgactaggtaaacagaaattcattttcccacagttctggagtatggaaatccaagatcaagaagctgtcagggttggtttctggtgaggcctctcttcctggctggcagacagccgccttcttgctgtgtcctcatgtggcctttcttctgtgcacctgcaccctcactgtctcttccttttcttacatgaacaccagtcctattggatttgaattagggctccacacttacagtctcatttaaccttaattacctctttaaaggccttgtcgacaaatacagtcccattgagggttagagtatcaacacaggaatctggggagtacagggacacaattgagcccataattgagccctttcacttttacccttgttgccgctgagtccagctcctgaagcttggatgggatgtggatggagcacacatgcttttctctctcttccctcctccccaatcccttttgttttccttctttgcataatgaagatattctagaattttcaaataaacaagaaaaacacaaaaggtctttttgtgttcataagagcagttatggaactggagtattgtgttccaatctagctgttctcaggttctcatgcagaatgctccctttaagatcttctaaaatccctccacccctgtcctgcagggaggggaaaaaaatctcccccacccccctcacccctccaacctccaccccatccttggagggaggggcagttggtggcaaagggaaagttggctcacaccctgaggaaaacattttaccacctcccagcttagataaacagtccagccctaaagggctactttcttatgtctctttcttggcctttgccattttccaccttccatgttagttatttgaatacatttctaatcatactcattacaccataaacttcttgagggaagggggctgtccagaggtaacatacgtgtgaatgagtgagaggataagggatgtgtgaatgagagacaatgttatatgcactttaatgatctttttgggggactggtactgccacccaaaaatccaggttgatttccttcagcccttccccgtgttctcggccccttccctatcagcacttggtatatgcttagggaatagagtgattaggaaggggttgtttgcaagtcactaacgcccacaaaacagtggcttcaaggcagatgtttatttttcttatgtaacaaaaagtctgggagtacgtgtctgctggctttcagtgagctgctagatgtcagagccaacaatttaatgtttccttggcagctttaaggatgtwttgcctcctggatgcaagacaattgctacgggtccatagctcttgtttgtttcaagacargaggaggggagargagggtcagggagaaggaagggggaatggggaaagagcctacattcactctttaaatgaagaaagcaaatctgccctagaaacctcccctctcccagagctctgcttgtttctcattaggcagaattgggttatgtgagcattcagtggcctaaggaggttgaaaagtgagggttttgctgggagttggtcatgtatctccctaaaccacattggggttttattagcaaaaaggaaggagcaattacaattgaatagacaaagctggtagctatcacataaaatgcaaacacagttgaatgttagcttaataagaataattaaagaccaagactattataagaaaatgaattagagcttttaaagtcccatatatgagtaaataattaaaggataattatattttggagtgatatacatgcctgctcgcaattttacctgatctgcacatttgttcactctctcccctgtattgtaatttacaaggtatttatctacccctcctgcaagattcgtaaactctcccatgagggtttacctgcaaattccccatggcttctaattcattgccttgctgttagcaggcacttaaacatgttagttgtgtaaaaggagacccgagggttacataaccctgtttataattcatggttttaaatgacacgacaaattgcatcaattagacaaatatgctcatttaattactttgtctcatgaccagcactgaaccccgaacctcagccgactgtctcccgtgcatgtctttgctcatatggaagcagcagaggttgtgtggatggctcagagcaatttctttccccaactagaaaaacaacttaaaacatcttcctcttttaggacagtgcagtggagtctctcactttgtttaaggcttagattctaaagtccccaactcagtgacaatgacaatcgacattattcgtaaatatctctcagattactcataaaatacaatatgctttgttttgtgtgtacaaacctgcacatatatatatgcagatttgtctctcctttaatgtttactcctgaaattaatagaattacccatactatttaaaatgttactcttgtctttcttgcaatctctctctttctccctgtgttcaaagtgtgaatagttgaattctggtgagttaaatgtgggatatgtgatcccactgtggtatcctcactctgaatgaaaaactgcattaaaagatgagtgaaaataacaagcagggccttgtccctctgccctgtctttgcatacatrccaaactttttgaatttacatgcccttgacaaagagataactacagcattccacttgaagcaaacgttttccggcagaggcatgttcagtgtcagggcccattttgatttttcatcaacagcaaaatattattcacccaaggaatccaatcatcccagtaaactgaaattctttttttttttttgtttcactgctgtggttctgttccagcatttccaaatgcttcataaataagcatccaagggttcattaccaaaatatttcccagcatatttctgacatttttttgggattttctagagaaaagactgtactggctcctagggagacatttaattcctctagcttctatctttcatatttaaaggcaactctatcctcctccatccctggcatatgtggtagccatggtaggtttggtgggtccacccgcatcttctcaccacacagatccttcactcctgggtgcacctgaggctgtggaaccgagtgagctaacagagtggtactcaccagggaagactggaaatccttttgtgcccagggagtctaaccaagcgtatttctgctacttgaacccaagactttgctgttcttagcagtgggctttcttgcttggcgggaggctgggatcaggcatgacaggaaaggccagccctgttcagctcctggttcctcctattcactgcagagtagcctcagcatttctgagctttcttcattccttcacaggcttgcaaatctctgcaccatgttagttaatactaaaggatttcatctaacccaaagagatgaaacgccaaatgtttatatttacttgatttccgctatcctcactacgcctgcaaacattttatttgtaatgactcagtgagaaacttgccccattacatccttggaagaagaatgggtaacttgtcagatatcaacttcttttaacttttgtcttttaatacttcaaagtatgcacaaaaaatgcgaacatgcaacaaatgctctaaatagcaaataattaagggctaagaaaagagtcttaaaaacgaaattgaaacaagagactctttgactaaaccttttacacagaggaaaggagtcacttcatgtttgagactgttttaaccttttctctttttcatctttagatgagtggttttgtttcatcaaacaaaacctttgaagttccacccatggtagactttcacatctcctcattcaggcagcttggaaaggatatggccagggcagaaaccaaggatacagggatttcagcttgtggataaaaagggtgatttatgcaatttagggtgattaagtctccaaattgccatctcttttccattcaaatgggatcaacacaactctcaaagaatctccaagtcagattagagaagtgggaatctgggggactttgtcctccctgtttcctctgctcgaaagtgctttcccaggtaccaattggcarttggcttttggcctccttgctttgttactctgatcgcaaacacacacccccagccctgactcccrtcacagaggtacccatcattacttgacactgtattattttttcatttatttatttctgtaggtctgaatcaaacagattttattcaactttttagaatgagggaaacaaatgatataaaataagtcacaaaaatgctttcttatcctactacctcaaaccattttcaatgttttacaaaatgctcacctagcaaatacgaaaagtttcaacacattcttctcttgtaacttctgctgcaataaatgcgatattagcaaacatacatacttccatatcagtcctaaaagttggattactgaattattatactaatttgtatgatgttactcatatttttattcatacacttttaatgagatcattggcaatacgtatagtattttctttaacttcactttcacattaagccaatgtcttttatatagccatcaaaaagtaaattacacaggtttatagttcaatttaagctctagcgtcttagaatcagccactttctaacctttcatgatgccttcctgctttgcaaaaccatgatcagcatgaattgcaaacatacctccttcagtacaagcatttctcaggtctcctccattaaagtcatctgcaaacttcacaattactccataattaatttcaccatackttgtaaggggacttgcatggattttcaacgtgtctaatcttgctcgttcatttggcaaatcaatatgtatttttttctatctaatcttcctggatgcagcaaagcaagatcccgtgtatttggtctgttgtattttaactctgcgcagagtatcaaatccatccatttgattcagtaactccattaaagttctctgaatctctctgtcagctgaagtacccttggaaaaccaacaaccatcaatagcatctaattcatccataaaaatgatgcatggtggatggtccctggcataattaaacatttctctgatccaatgagccctttcaccaatgtgcttgtctacaatagaactagatacaacctttaagaaattgcagtcctggccaggtgtggtggctcacacctgtaatcccaacactgtgggaggccaaggcaggtggacctgggcaccatggtgaaaccccatctctacagaagatacaaaaattagctgggtaactgggtgtggtagctctcacctgtaatcccagtactttgggaggccaaggtgggtggattacctgaggtcgggagttcgagaccagcctggccaatgtggtgaaatctcgtctgtactaaaaacacaaaaattagccaggcatgggggtgcatgcctgtaatcccagctactcagaaggctgaggcaggagaatcgcttgaacccagaaggtggaggttacagtgaaccaagatcacgccactgcactccatcctgggcaacagatgagactccgtctcaaaataaaaaataaaaaataattaattaactaattaaaaattagttgggcatggtggtgcacacctgtggtctgagccactccggaggctgaggtggaaggatcacctgagcctgggagatggaggttgcagtgagccaagaccacagtactgcactccagcctggacaatagagtgagaccctgtctccaaaaaacaaaaaaaaaggaaaaaagttgcagtccagctggccagcaatagcttgtgtgccaagagtgtttttcctgtttatggtggtccacataacaaacagccttttggaggtattattcctacaagttggaataactgggtttgtaagtggtaacccctcaattcccacatctattctgatagccctccaatctcagaataagaaacatcccaggatcctcatgagacatgttataaatcagtggctccacctctcttggtaaatatctcatgatagttagtgtagccctatccaaagcaactcttgttcctggcttcagctacttttgtgaagctgtcgacgacaactcccaacacatcttggtccatctgcagctttaacaatgaatttttcttcagttaattgtttaagcatgttactcacaatctgcccaacactttttagggccttcagatcattttcagacttttcatacggtttggtaaattctttgaattgttcccttagctccttaagatggygcccatctccatgcactctggcagcttcttgctgtagtcctgaaatatcttatctctagggtccaccatgatgagaagtgctatttgtttattgtttattgtctgtctctctaaccatcayataaactcctcaagtacaagaacattgtgtttcctgttcattgaccaccactatcttgaatagtgcttggaatatggaaggtgctcaaaaaatattggtgrgatggatattcagttttaacatcttaattttattaatgattaagctgtgttgttgagaggtaaagtggctaacccaaggtcacacagctggttagtggtagactaggggtaaaaccaaccaaccaaccaaccaaccaaccaaccaacaagccagtcagccaaccagctaaccaaagatgtggttcatgagttagtctggattcctctaaaagttgaaccccagaggtttgtatacagatagtttatttgggaagggattctagagagcaagagtaaggaaatggtggacaggaacaggccaaacaataagcattacagagctggctctgaggaggcttaggaagggcaccaaagaactctccatgtaggggatgaatgagggaagattaatccagtctgtactgactgactaagggtggtaccatgggttttgtaagccctgaaccccagctgtttctgtcttccctcagtttaggcaccatccagatgcacctgtccagtgcaaagctggccggagctggcttagatttggtcactgcagcagctgctggagcaagggaggcaggtggggaccgagaaggtttgcagtggctcacaggggctgtctaactcagctgatgacttctagtctgcagctttttcattctagcatttgtgccctgtgctccctggtcaccactaggaggagttaaagcattttgcaaaacgcttcacggtgtgctgagccattacaacttagaactggaaatattagttctgtaaactttaagaaagctcaagacagccataaatggctccagaacgaggccaatyaatgcctgacctcctgcacagccttttcttcctgggattcttactgcctccatggggtctgaccaggaaatgaggcacctatcttcttgctcttggatccctcaagccttccaggggaggctctgctcctctcttcccaccctccaactctagctaggcccatcaagcaggcagcaagaccatcgccgcctaagggatttaccaatatgtgtgcacccatcatgaatgctctgtctagcctgggaagcctggttcttaaagcacattttctaatgaatctactctcgatgccttcgcagcctaasggctttyggaactctgaagcaagacaaaccattcttatttctctgctctctactgttacatactgtcctcaargcaacgaggcatcctggcccagcttaaatgtgaaagaagggcccaatgagagaaagggatgccaggattagaggtaggtggatggaaacagtgagcaatattttaaatatattatctcagcatctttgaagagaaaagttgctttgtaaacctaaagaaatatcagatcagcttgtctggtcaagctggtctttgaccagagcatatgtatcattttttttttattttaatttaaaattttttttttyttttcattgggaacacaacacatgtatcattttgactgctttttctgtactcagcctccaagagggcagaggtcatgtctgtcttgctcattgatgtatctcaagtgtttagcacagttcctggtgaagataggtgctctaacaatttctattgataaacaaatgggtcaaggacaccacacacacacacacacacacacacacacacacacacacacasagagagagagagagagagagtagctggtacttatgttaactgtccaggatttagtatgtacctggtgggaataagtaggaagcatgcacctaatctgacactttcattgctatttttttcaacatgtagaaaagaatcagaacgactttctcatgaaccccatgggaagatgggagttctttagtctgtcctccttcagaggtaaagtagcaaacagcacatagctagctctcatgacttgagctgtgtcagccctggtgctgagcttgccaagccacayacctgatgcctgcaggcaattacaggcagatggtaggtgcagagtttgatttagatggactctcttgagtttcctttcatcctttagattccttggtactgacagtttaccaatttcccattttacctatcatagttgtggactaaagacaattttttacatatttctatatatttggacttcttccagtatgggccactgttcaagttgcatcattagttatgaaatatgacatctgtcttctaaagccatttattctgctgagtttgacaacacagcctggcttggtgaggaaggggccagctggaccacttctggcccttctttgtaaaagcttgttatctaatgtggcagcagatgtcctccgaatgctctggcttatggcttgcccaatagcctggtgattgattccagtggcctcacagaggctgattttggcagcagaggtaaatacagtctggatgtaggtgtgggaggtggtaaaatggtaaaactatcagcctttatcatagcgcaattaggttttgttggggagattgtctttgaagataaaacccttggcttaagcagaagaagcaaaagaaaggcctttaatgaattcctgcagccctctactggccctcatcatatctgaggcagcaaatagataaagtttaaatatttttttccagtgtcttaatattctgttaggataattcccccagtggcccactttgctttcctggcatgtcgtgttgtactattstaacttgcagctacaactacttcaaaacagtagctttgggacaaataagacagttcttccctttttttttttttacccccttccctaagataagagagtgctaataattctctaagttatagattatgtcaaggttttaaattaacacattaataaaggaaccaatggggaagatataagaagagtttcscccaggttcttgcaggaaatgtgtgtgtgtgtgtgtgtgtgtgtgtgtctagcaaaataaaaaatgctagactaaatatgaacctggttaaccttctacaagacaaggggttataaaagtataacccctctgtaatacttttggagtaatttccctaccaggcaacaaaaaccctattcatatctgcaaactaccttaattttacaggactgcaaatcactgtgctttatcagttatgaattgtgggtcaaatatcctgtgacaacaaagtaccatttctcaagaaaggaagttagttagaaactgctgtcacctggccactcaaaagagtgatgcttggcccagcagcattggtgtcagtggtgagcttgaaagaaatgcagaatctcargctccaccttagaccttcagaatcagaacttgcattttaacaaggtgcccacatgatttgcgtgcacattaaagtttaagaaggctgctctagaggaatattttaaaagtcaagcagttgcaatttttacactttccaagtttgagatatattttactttcttgatacttgctacatgccacaatagggtcaggggtaagcccaggtctcagccctcagaataatccattagttctaatcactgggcctaaaatgactaaatcctttcagcaagttccaggcaggctgccttcagccagttcagtgcagtagctatcttctgcttctaggggaggctttggaattagggttactataggaagtcagcagggagctcagttttgggtctggttctgccatgstatgtgctggggcttgacgtggattatttgcattaatcctcactaaattcagatgaggaggcagcaccacccttgtttctcagagaagtgcccaagagcatgtgactagaaagcacaaagataggaatggaaatcaggcacgattccaaatctcttcttccctctgtgtggtcttccatcacagagtcactaaagctcatagctttctgatctaactcttcaaatctccttttacatccaaaatttttgaattcattgatatattgaactcttataactttcattgctaatgaagagaaatcctgtcagatttactaataatcgacatcaccttgttactattaactagcaccaataatgactctttgaaactcctctgtactctgagtacccagctctgagttctagcttatcatttattactgttttgaaagtagcttctccggtggcgggcgcctgtagtcccagctacttgggaggctgaggcaggagaatggcgtgaacccgggaagcggagcttgcagtgagccgagattgcgccactgcagtccgcagtccggcctgggcgacagagcgagactccgtctcaaaaaaaaaaaaaaaaaaaaaaaagaaagtagcttctcccattatgtgcttctcccacttgaaaccaccttctggggaaaaaaatgggaaactgtgtcttttttatgtttatatccccagaagtttgtagagtcatttacatatatttagtgttcgatacatgtttattgaactaaagtaaaccagtagacatgcaactgcatcaggaaactccccaattgtaggactccattttccaaattagtctctaatacaaatccatcattatatgcatatccttatattttttccataaaataaaactaccattccattgcacagtggaggatttatttcacatatcaattctttcaaatgagcaggggtcttctgctctatattcttccaactgaggcaatgagtaatgctcagttgaacaaaaatytgaaagatagaggcataagtgataagaaattgaatggcaatgtgaaaacccttgatctgtttacaaatgatagtttcgaaaaaggaatgtgtctgtcatagggttgacttaggtcaggggttctaaactaggggccacttttcaacctccttccctcagagatatttggcaatatctagagacatttttggttgtcgtaatgggttggggagcagacttaatacattcttattggttgattgcttggcttgacgcatgacttctgataccttctgcctctctacaattgaatagtcattgtctaataataaccagaggcactacaaatcccagaacattcttctgaatcagtcgtagagtgtggctgtttcaggaccttctctttctctcaaatcctgggcacttcaccatcatctgtcctttatctgtttatgtatatgctcatcacatataactaggccataaatttcttgcttccagagactatatgtcttacttcrctgtgccccattggccacagtttcttgtaattctgccttaaaacacttcagcattcaggacatgctaatgatgctttatttttggaatccaatgattagattgttggtcctccttaaataggctctatgttaaattgcaactaaccagaatatgaagtgaccaaaattgtctactctctcactaatttgaataaattaggattcatggtacttgacattcaggtttgtgttcttgaggtcagagtttatgtaactttagatgtttagggttagagaggaactcctttagttctattttcttccttgattctctagcttgtgaagatattgtccttatctgagaaataaaatagagacttcactcatacacacacamaaaaaaaatcaaaaacaaaaatgaaagctgatctgttcagctagataagttgtggttggtaggcatgatgggagtttgacgtttaaagaattttgacaggaggatcagtcctacataagtttgtgacatatgtagtggatgtgtccagcactcaactctttaattccctcgacatcccataatatgtccactgccccctccccaaccatgctatctccccacctttatcagaagtcactgatgtctgcaccagaaggaacatctgaggaacagttactactttggtgctgagtaatttcttgcccataccaggaacacrtgtattttaaaacagaaactcaaaaaaggaataactaataatgggattttaaatatcagataattaggattgaatagattttgaggagcctttcctcagtatccctcaagtgacacaatgtttaagcctgagaagataaaacaagcaccaaaaagacctcaggttggagtcctgggaaacgataataggatttttaaaaattcatgtttaaacttttgttctcattatttcctgttcccagctatcaactgggaacaagtaccttgagcttctaatagaggaagaaagacagcttttgagggtgtttcatctttgcaagcttacgtcatcccaggaagcttaataataagaaactgcaagtcatttaattttattgctgccagaaattggttttctttggggctttttctggtcagaaatttaagttcaaaagcagtctagagaatgcactttggaaaggtcacagtatctctgatggtagcaatacttagtaagcccttgctatgtgtctggccccatcctgaacactttctattttcaaatcatgaccctactagtaggttactcttttactattacctccatgttctgggtgaggaagcccaagatcacagcaagtaaatgctagagccaaaacttgaacccacattgcctggctgtgtgtttttcagcctcttgctgtattgcttttccaatcatatccaggttgcctctgctgtcttcagggmgttttcccactgaaggggagtgtctatgcatgaggaaaatgaacgataatttgctaaatatgctaacatagcttttcttgctttccaggttttggaggtgccctgggttaccttttgggtgctatagactgggcccatctggagctgggaagactgttgggtacagaattccaggtcatgttcttcttctctgcattggtgctcactttgtgttttactgttcatctgtgcagtatctctgaagccccacttacagaggttgcaaagggcattcccccacagcaaacccctcaggaccctccattgtcatcagatggaatgtacgagtatggttctatcragaaagttaaaaatggttacgtaaatccagagctggcaatgcagggagcaaaaaacaaaaatcatgctgaacaggtaaagatgcaacattttttctttacaagggaaaatattcttgctctttgttgttgttgtttttttaattgtttgttttgtctgtttgacgagaagagtttcatggggtctaactgaattcccaaatcccccgtagctatcatcccttggaattaaaattttatatctcaaagaaaaatgtctgcattttcctctggtcctcctgtctcttactcctctcagagcatccaaccagggaagatgaagccagttgagaaaggttaggcaacaagagaagcctaaaatcatccttaggccagaagaaatatccccttagattaggatcataaattagaaattttttcctccaaatggtagcatccttgggttggtgactgagttgggcatatcgaatttgcctgtcatgagttgattggatattttcgttcattttcagcgaactgcacagtgaattcatyagcttaaaatttgaaataaaactcaactaactgccagagaaatgagaccatgttcagatgaaatgatcagagaagagactagaattaagctgagcaatatagtagctaataatcccgtggggctatttaaattaaaataaaaataaaattagaacttcatttcttcagttgcattagctacatttcaaatgctcaaaggccccatagggcttctagctaaaatataggacgtgcagatgtaagacattcccatcattgtagaacgttctgttggacaacactgatgaaataattgcattttccttcaagctaaaattgaatgccaaaacctcagggatatagaacagaggatttcttgattgacaaaatgttgtagaagacttaagttcaaatcttggttcctctagctgctgacttgtgttattcattcagtgaatcacaaatagctacttgctrtagggtaacctaaagattaagagcacagtgcttaaatcctggctgtaccacctctggattgcatgactttgggcatttacatttgtgttaaatgataaaataattcyatctacctacaagggtttcgtgcaggttgcaggggctaattcaggtaaagttacttagagtgtttgcaaccacataataagctgttgggtttaggccttgttattttgaccctggcagaacactagagtgccttaagcacaaacagggaacacaaatctggactccaacaactttcagacaagctcagtgaatctcaccttcctgtgaggtcaacttcttttgttggcttggccagtctattttctaggattattaggatgttcaactaagataaagcatacaaagacactttttcaaacttcacataaatatatcaatacattataatcattattcatttaacaaacagcttggggtactgagtatgtgcaaagcactgtactagatatttggggaccataaaactgacaaatgtccagtctctatgcccaggaatttgcagcctaacacgtggcatatgccatttataccatgactcataatccatgatagaacatggtaaatgctataaaacaatgtatcagttcagatcttttaaaaaggcaccaagataggatttgacatgtaagagattcattggagaaaacagcatgaaagataaagtggagaaagcagaaataggaagggaaagtcttcttatgttgatgcaagtcaaacacctgtgaaaggagaaaggaaaggaaagaggatagggtaggaagcctctcagatgcagtgaagtttcaagaaagcttcactcaggccaaatgggagtcctccagccaaagttgctccttagaggagtcccaactcttgtaggaacaggctaacactaataccccccgtcttgttagtcactatctgggaacagccaggaaaggggtaactttggcaggaacaggtacaggaacagagttccttggcaggaacaggaacagtggatccagagaggcagcattcagggctgtcgatcaactgtgttttctctggtaggtgacccaaacggcacatttccaaggtggccacaaatggcaaaatagcaattgcttttagttttaaagagggaaggattgtgcytaaataaatggagaaaagcgttatggaagagatcgcccctgagttgtgccttgaatgatagttaggatttgaatagagattttgggggaaaagtacttctgacagaagagcatcagcaaagccacagacataaaaaattttttttaaagcatgaagcatatttgtagaaagtataagtggtaccatagatcacagagtttgtaactttagaaataaagttaggaaagcaaattggagacacattttggaagcttttgaatgccagcataggaactaaaattttattaggtggatgatggaggtccatcaaaactagtggggcaaaggactccttgatgttagctttttttggttggttttttgtttttgatattaatccagctgctgactacagggaataaagaggtacccaggagggtttatttgggtgaataataagatgtcttggaatgagttgcactgtgtgcttggttcattcacttgtgcattcttttattcattcaatagctattaattacacctgccagacccagtgctgagcatcagaagactagtgaacaccacagcccttgttctaccccatggagttgtcacctagaaaagtgtgcctatgtgttattttgctttcttaatcaaagtttaattagatttacaaaaaagttgcagatagtagagagagttcctatgtatgcttcaccagcttttctcttatgttaacatcatagagaaccatgtacatttgttaaaattaagaaattaacactgcttcaatactgttaggtaaacagcagacttatttgaatttcaccagtttttctactaatgccctttttttaaaaaaaatgtatttccataggctattggggaacaggtggtgtttggttacatgagtaagttctttagtggtgatttgtgagactttggtgcacccatcacctgagcagtacacactgcacccaatttgtagtctttttcccctcatcccctttccacacttaccccctgagtccccaaygtctgttgtgtcattcttatgcctttgcatcctcatagcttagctcccacttatgagttagaacatacaatgtttggttttccattcctgagttacttcacttagaataatattcttcaatctcatctaggtcactgcaaatgccattaattcattccttttatggctgagtagtattccatcatatatataaaagatacctgcacacacgtttacagcagcacaattcgcaattgcaaaaacgtggaaccaacctaaatgcccatcaatcaacaagtgaataaaaaaactatgatatatatatatatatatgtcagatgaatgtccataataaaaaaaatagatgttgacgtggatgcagtgaacaggggacacttctaccctgctggtgttgatataaacttgtacaaccactatggaaaacagtgtggagattcctgaaagaactgaaagtagagctacgatttgatccagcaatcccattcctgggtaatatcctttttctgatccaatctaggataccacattacatttagctaagcggtttacaaaatttaaaaacggtactttattttaatggtattttaaggaattttttttgctatgtatagtcagtagaaaacctcatttttttgtatacagttatgtatataaataaaagcaatacatcttagctgttagttataaaagtgtgtaagtagttttcccttgagatcaagtgcttcctccagtattgtttactctgttcatttgcttagcatttttccaaaataaatrcaaaagtaaacttcgacactgctcatgtttgaattggcaaaatggttgagtatgatctgctgaaacgaggcctcattctataaacatgactgccttcaagttgagttgccacagcgcatcaacctgcctctcgccatgccacttgataggagaatacagttgaagagagtaatctattcatctgattccaacagtagctcctattttaggatgagtgcagtgtttttcataactgtaagagtgcaacgaggaactaagaggtcattgggataaagccttcattttatctcratcacacaagtagagaaaatttgagattttaggtctcctaatgcctggactcaaccccctttccctacaccaggctgcctggaggagaatacttgtactctttgactctccttcaccaagaagccagaactctaagattactagttggactggagccctctgtgcatttatgcaggacagccaaagaatcacggaatatctatatgataacattcatgcggtcattaaaaatgtatgtttccgaaggtttactaaaaatatatcaggtaaaatatacattacatgcacaaaaccatctttttttgggagaaaacaaagctgcataacatagaggaaaaaatggaaaggaaatatacaaaaaatgaaaagtctggatgataggctcacaggaagctttaattttctatttttaaatcctgcaatacatccaaaatttctataatagataaaaaaagggaaaaagtaatcaaataatgtgaaagtgaaaattaaaaaataatgtggtgatttggggaacaaaacaaggtgcggttttactaaataaaagtatatacgtgataatagataacaccctgatagattatctacctctttgatgtccccttcgatagactgggactccccctccaagagtcgcataggacaggggtcgtcccatccactcagagkctgctgtgaggatcacatgaaatcaactgagtggaagccttttgaaagkcatggaactcccacacgagtacaaaaataaatacaacagatacaacgaactttctagtaggggccacatgaaaaatgttgtagactctgaatgatcttgttatttggtttaaaaaacaaattgagaccagtgcagtggctcattcctgtaatcccagcaactcatgaggccaaggtgggaggatccattgaacccaagtgtttgatgctgcagtgagctgtgatcatgccgctgcacacttgtcaaagcaacagagagagaccccacctctaaaaacataaataaataagcaaataaaataagacaaaaagttaaagtaagaatatagcacagagtaatgcatcttactctcaaagccatggatttgcacytctcttccaaatgtgtgccctgggaggtctccagttaagcaaaggaagtctgcacttccccagggtcagggccaaggcttcagggctgtcattgcttgccaaagacattgctttccaaaataagggtggctgtgtaatttaagaacaaatttttcttttttaatggcaagagggctgaattatttcagaagtttaaaccagatctcataaaatctatctccaattcctccatgtcgtcagttgctccctttaacayttaaatagtctccttttgagggtatgtttgtgaagttttctttctccctgatgactctgtacctttttcgcttgtaaattcatcactacccagtctccagctgacagtggtgcaaaataaatgcagtaaaacaactcccaaggtttcagaatcattgaaaggtttttaccaagggaattgatgagtcaggaataatatcccagctgggtttttattctgagttaaaatatacaaaggggctttgaatatttacactctcagcttttacagaaatactatgcacattttgaaagctcatatttatttttagaagaaaggagaaattaggctaacaatgaaagcaggctgaaaattatgtataagtcagaagcatatattaatatttagaatgaggctgagtacttgctgaccagattcgctttctcagttttgcatttttggaaggagaggaaggaaagtgatgacaaaccatttagttggaggcatgaaaaccaggctgttgtttcttgggctattgttagctgcttctttctgtggttgaggaaaaagtagtaattctgcacttcattttggttataatcatttatttttacaggtaccatattgaacttgcagaaaaacagttrttttccttcaatccagggagatgtctatagtgtttaacactgattatcagaaaatgagtatagttatggtcagtgggctagatactgcaagactgatgaattttaaaaaatcaacttacacaacaaaattaaaatgggcgaatataattttccacagcaaagaagaaaaaagcatgattatataaggttaagaagtataaaaaatatgctgttacagttaaaatagaaaatctcagtagactgtcttataaactagccagtactcaatgtcgtgattcagaataaataaaaatatgacaagaaagaccaattaccaaattgtgtctgatgtttatggtctcagtgtcttcagggaagctaatcaattaatattcccaaggtttctttcttctcttatatgacaagatgctaaaagctattatcattttttgtatttcaaaacagttgtatcaatagtttaaagtttctcattctctcaatgtttctgaaaccagaaaaactatagcttctagttttaacctaatttaaatctaaattaaggaatcggggcctatatattcattttttacatatatgtgtgtgggatgggccttcctaaagttaatggaaaaatagaattaaaagataaaaattaaaaagagtaaactttatttcttaatgtaagctccattgagttcattgcttacttttgtaagcaatgataccagccgtttagcccatccctaaagaactgggggtcctggagwtttagctatgtcaatgcagccttttttacaatattaactgaaaaaccatgggtgccctttatagattttttaagattaggaaacagaagtcagaaggagctaaatcaggactctgggattgatgcctaaagatattccatcaaaattatcacaacattgcccttgtttgatgataggaatgagcagaagcattgttatggtggacaaagacttcctggtgaagcttttgtgtgtttttctgctaaagctttggctaactttctcaaaacactctcatagtaagtagatattatcaatctttggccttccagaaagtcaacaagcaaaatgcctgagcatccccaaaaaactgttgtcatggtcttttctcttgacctgtctgcttttgctttgactggaccaattctacctctcggtagccattgctctgattgtgctttgttttcaggatcatactggtaaggccatgtttcatctcctgttacaactttttgaagaaatgtttcaggatcttgatcctgcatgtttaaaattttcattgaaagctctgctcttgtctgcagttgatctgggcacaatacttttggtacccattgagtggaaggtttgctgaaccttaacttttccatcagaattgtgtgaactgaaccaactgagatgtctatggtgttgactattgtttctgccattaattgtcagtcctcttcaattagggcataaacaagattaacttttttatttgcaaactgatgtagatggtctgccccgaggacttcatccttaacaccatctggttccttcctaaaatgagttatccatttgtaaactgctgatttctttgggacattgtcttcataaagttaaaaaaaaatcagtgtttcaccattcttctactgaagcttcaccataaatttgatgtttattctagcttcaattttagtagaattcatgttgctctgttaggggctcttttcaaactgatgtcttatccttcttagtgcctcaaactaaatcttcttcagacatgctataacaagttagtatgagtttatattgcttcaaaaaatttttggaatccatgcataattttttcataatatgcattttccattaacatattgaagaccgtgtgtgtgtgtgtgtgtttgtgtgtgtgtgtgtataaacatatatatttgagttctacattgttcttacttctaactcaatgtaaggctcattaacatgtttctgctrtcattaggattcagagatataacctgggaggagacatctggctaagaacagggagctgactggctctctgtattaatgttctaatgaataaaaaattttcacaaacttagctgcttaaaacaacatcagtttattatctcacagttctgtagatcagaagcctgggtaagctgcactaggttttctgcacagggtcttacaaggttgaagtcaaagtgttagcagagctgtattctcatctggaagctcagtgggaagagcccgcctcaaagcacattcaggatgttggcagaatgcagttccatgtggttataggattgaggtccctgctttcttgtggactgttkgcctggagttgctctcagcccctaaatgtcactctcaggtcctttcaagtggcttcctccaccttcaaagcagrcatttcttgtgctttgagttgctctgactttcccttctactaccagctggagaaaattctgtacttttcaagggctcatggaatttggttaggatcaaccaggtaatctccctttcaattaactcaaagtgagcrattaataaccttaattattaatatatctgcaaaatccctttgccatgtaacagcacataatcacagggatgacatcaggggaccaagatcatgacagacatcttggatttgcctactatgctctcacagttaagagacccaagaattataatcatctaagagctggcttatgtctgtgagctttgtccttgtgcaacagttctgtcattcagacataggatgctcaatgtctcctayaccttggcctgaagctagcaccattctcattccctttgcccttgtgtccaaagcctcattctgggcctgaaactgccaagcagccactcgtgcttaacagaatacctcctgtgagtctactccatggaaacctagttccatgtccaggaaaagtgacactttgtgtgatggctgactgacaaatacataacatgtctgtgtgttctggctcccttagctggctgagtttctgcagtgaagatcacacctctgtttcatgttttatttcagactcgcagggcaatgacattaaagtcactgctgagagcactggtgaacatgcctcctcactacygctacctttgcatcagccacctcattggatggacrgccttcctgtccaacatgctgttcttcacagatttcatgggccaggtaatgaacgtgtctgtgcacacaatcactgttacacatcatttcctccattaacacctgttgaggttcttctgggctatcctctaagattggcacagtaagaatgtaggaaagggtaccatcaagaagctgacttacagacaggtgtagaaaaatgctactataccctggacaactagaggacactacggagcctgccagtatttaatcaaatacaacaaatagttgacagtggggtgttaaagtctcccattattaatgtgtgggagtctaagtctctttgtaggtcactcaggacttgctttatgaatctgggtgctcctgtattgggtgcataaatatttaggatagttagctcctcttgttgaattgatccctttaccattatgtaatggccttctttgtctcttttgatctttgttggtttaaagtctgttttatcagagactaggattgcaacccctgcctttttttgttttccattggcttggtagatcttcctccatccttttattttgagcctatgtgtgtctctgcacgtgagatgggtttcctgaatacagcacactgatgggtcttgactctttatccaacttgccagtctgtgtcttttaattgcagaatttagtccatttatatttaaagttaatattgttatgtgtgaatttgatcctgtcattatgatgttagctggtgattttgctcattagttgatgcagtttcttcctagtctcgatggtctttacattttggcatgattttgcagcggctggtaccggttgttcctttccatgtttagcgcttccttcaggagctcttttagggcaggcctggtggtgacaaaatctgaacagacacttctcaaaagaagacatttatgcagccaaaaaacacatgaagaaatgctcatcatcactggccatcagagaaatgcaaatcaaaaccactatgagatatcatctcacaccagttagaatggcaatcattaaaaagtcaggaaacaacaggtgctggagaggatgtggagaaataggaacacttttacactgttggtgggactgtaaactagttcaaccattgtggaagtcagtgtggygattcctcagggatctagaactagaaataccatttgacccagccatcccattactgggtatatacccaaatgactataaatcatgctgtctataaagacacatgcacacgtatgtttactgcggcactattcacaatagcaaagacttggaaccaacccaaatgtccaacaatgatagactggattaagaaaatgtggcacatatacaccatggaatactatgcagccataaaaaatgatgagttcatgtcctttgtagggacatggatgaaattggaaaccatcattctcagtaaactatcgcaagaacaaaaaaccaaacaccgcatattctcactcataggtgggaattgaacaatgagatcacatggacacaggaaggggaatatcacactctggggactgtggtggggtcgggggaggggggagggatagcattgggagatatacctaatgctagatgacatgttagtgggtgcagcgcaccagcatggcacatgtatacatatgtaactaacctgcacaatgtgcacatgtaccctaaaacttagagtatartaaaaaaaaaaaattaaaaaaaaaaaaaaacttttgctcaatagaaattaacttgttagctccggcctgtatgaaatacattaaaaatgaaattcttacagcctgcaaagtcttccaagggggtaaagttccacattatatcacacacatatgcatttttgtttgctttactgtgacttggatttactacagagacctctaatttcttaaatgacttttcacttatctacagatggaagaataggacacataaatgcatcactcataattgagtgtttgtaatacctctcacatcttgaatcaaaataagaaataaaatgctgaaactacaaaaaaaaaaaatacaacaaatagggccaattgatgtgagctgtagcaatcatggcaggcttcaaaaaggaggggtggggttcaggccgggcatggtggatsatgcctgtaatctcagtgctttcgaggccaaggtggagcaatcatttgaggccaggggttcaaggatgcggtgacctatgactgtgccgctgtactccattctgagtgacagaccaagaccctgtctcttaaaaaataaaatatgataataaatacacataaaaaaggaggtgcagtatggtctgggccttgaagggtgagtaggagttagaggaatattagagagggagaaaacattccaagcaggaacaggaatggcccatgtggagatragtcagaagccgaytggctgtagcagaagatgagtggtgggattkcctaagtcaggtggggccagctgtgagatggaaggaggaatgttaaggatccaagagagtgttgttgagatctgatgcagcaagcattagatttctgataggtccttgaatgaagatgtgataggatgcgacttggtcatgacagcatcagctctgtactctagaaagggtccctcaggcagggacatttgctccccagaggtggagaagcagagtgcatgagaagggttcttamtacattgcatttgtacctcaacagcctccaatctctctttcagattgtgtaccgcggggatccctatagtgcacacaactccacagagtttctcatctacgaaagaggagtcgaggttggatgttggggcttstgcatcaactccgtgttttcctcactttattcttgtaagtctttctctctcctaaggatgtcttctaaaagtttctggtctagcacaacttggatttgatatttctatgtgtatttcctactgtttaaaataccagattctyaataaatctatggacgtcaggaaaaactatcaccttaaaaaggaccatataaagcatccttttttcatcatgaattctaggtgtcatttcctcactgattactttgctcttggaatcagtgggttcctgatcaagtttctctggaaaatgaaagggaatctttacaagatgaagtgttggatggatgagtcccagcaggttcgtgttctactggagcaagatcattggtagcatttcatagataggcttatcagatttgtagatgatacagaagagaagcaatattaatatgacaggtgacaaagtcagcatgcaaaatgaccttagctcagatgtgtaactgggtgggttataggagcaccacaccaggattggggacagctggctttccttcccaggtgccagcttttctgagcctcttaacctccacttacmtaagttgcagctgtgaagacactgaacaaagggatttctgctattgtctttatgtaagtccaggtggctgtgctataactccagggcattgcacaggctgcattgtacttgcgactgtgtatggatatctccaagctctgtatacattgagttaagtgaaaygtctggcctgaaaaatgtatgcagttctcctaattataaagagctcctataaagagctcttcttctgcaagattgtaagaataactgacccccaattcagggctctgggctttggacaggtccaggggacagcagggatatggcccaggtgaaggaagtgggaagagatggggagaatccctgttaccattctcaggaggactcactctgtcactgtcagcctgcttcttgtgaagggaaagtgtggatgyatgtgagggccccttccccttccctttacctagccatagcacagcaggaaacctgcctcaagacctcttaaaaatttagcccaattgggaaaatgggacctcatataaacatgcaagttgatgagcccaataatcacgtaacaacaacattcattattttaaaatttatgatactcaaagagtagtgcttaaagatcacatttatttagcaaactcttttcttcctcttcgagtgtgcaaactaagaaaaattccaggaggaagatttcaagcacttaaaatagaataaaagaatgttagactaaaagggtctagtaaattatccagcttaagtccttcatgatttcaagggctgaggggactatttaccactaccctcatgcttttttttgtttttcttcttttkttaagacaaagtctcactctgccacctgagctggagtgcagtggcatgatcatggctcactgcagcctcaaccttctgggctcaagcaagtcccagccctctgagtacccgggaccacaagcacatgccactgtgcctggcttattaattwaaaaaaaattttttttttagagatggggtctccctacattgcccaggctggtctcgatctcctgggctcaagtgatcctcctgtctcagcctcccacagtgctgggattacaggcatgaggcactacatccagccctaccttcatctttgtcagaaagaaaagtgtcaatctaaacttatttttcctcagggaactcctactagataacattccattagtcttgtccgcataaattttatggcatttgaaactttaaagcatattatttttaggtcccttctagttaaaagcgtttctagttacaaaagaaattattagttgaatagttttccaaagttttattaatgtataaatctatgggatccctaccattgttaattcaaatcaacattttatttataaaataccagccagctctgctcaaggattttagggattccccatgcccataggataaagtcaaattcctgagcttttcacagtttggcctagttcatactttgccctttttcactcccatatcaattaaccaccctcaatgacccactatgcagactttctcatttctgggtatttgccactgcttttagtttcttctgcctgaactgctctttctacttccccaactggacaacttctaataatatttttagacccagcttaaatattacttcctcagtgaaatcattcaagttttcttccccctgcacctcaacccactctgggcagaatcaatcctttcctttccttccagagctcactatattaccctctattttggattcatcacataacatcaggagcagattcagagtttctatccacatggaggttggcaggacaatctggctgctgaggtggagagtgctgatagggacttgtttctaagctccttttgtatacagcaggtacaggtataccaattagaacaacaacactgagtactaagatatggcctattgttcataccataatatcatacactactagtcataactggtgcttaaatctataatttcccctcagtcctgaagagaggcattgtgtgaggatatgactaccactgggtatcagacccatcagagggcaattcaagcttggccctgaagttcactgaattatctttgtgaataaagtattctttgccagactttcagtctctgtactgaagttacttatgtttccaaatacctctttgccctactttgccttctcctctgctggcatacacacttggataagagcatttccctaatgggtattgatggtatcttttaggtattgagacaccttagattacattttctgtataaatataattattaagcaagcagaaactgttctagctttattctcatttttgtattctcaaccttaacaacagtcctccagtcatggtataagtttaatagaggaagcaatgttgcctacttgtcatttccagatctttgtcttccatcagtgtgagagtgtttagtttcataattgattcaaatgtactgcaaataaggttgcttgtctacaaggtgtaagtccaataattatatgaatagatrtggaaaatgtcattcttaatagtcacgtttcaagtatctgttatttatcctctgattcttgtgttccaggagaatggggcagggaagagatgaggaatgtgtggattaaaaacgactgagggaagaagataaaaacaatttagagattttccttgccattgtagaaaaccttgtaaaatgttttaaagcagaatttttcatttttaaaaattagttctgccactatactgatataagcaagccaagttgacctgctagaagaggaacccrgttaaaagtcaactgtctccagctcagcctgtcttgttgcttaattggatgttttctacatgctaggcattaagctgggtgatttcatagacacttcatctcacttgatcctggcaacaactccaaaagatggttttattattcccagttttcagatgaggaagctggggttttgagaagtcaaggaacttgtttaccaagagttagggagccagcgatgaggagatgctgggtgctgtgggagccccttaccagtctgggaaggattggcaagtcagggaaggtgtcttcagataattgtacatcttttacctccttctcaggtgtgcagactccattcagatgggggctaagaaatcatgaatgacttagatcattctgtaaattttggttgtttcaattttccccaacctgactttgggttgtagggccaagataggcctgtgttattattttcgtcctatggggccacagcccatctgatttagaataacccacacttttcttgaagccccaggttcccatagttaggtcagattttccaccacctttctcgcttctttttgctatccagctgtctgctaaacagtgccagattcttctttgtagaaaaaaaatcagcctaccaaggcaatttcaagctgtcctttatggaaaggtctttaaaatggttccaaaagccagctgttttcaacccacagataaggggattcttttgttcctggctcagtatcaaaggatgtctaaaaaggtgaatcttcagaagaaaggattktctgaaattattaaatgttatgaggcactgccagctgtaatttctccctctcttcttcccacagactttcagaaagttttggtatcctacattggattaaagggtctttacttcacgggatatttgctgtttggcctggggacgggatttattgggctcttcccgaatgtctactccaccctggtcctgtgcagcctgtttggtgtaatgtccagcaccctgtacactgtgccctttaacctcattactgagtaccaccgcgaggaagaaaaggaggtgtgctgtcattgaacctctgccttgggtaacatccagactcatctgaaggctggggaggatttggtagcaatgtgtagagcagagctggaaaataagggttcttgaaacagcaacagtcaaatgcccaaccaactgcaaccatgatctggtacaggcatgctcaccagcccagcccagcccagctgtcctgtcctccttattctcaactcctgctcacttagggagctgtagggcaagaagtgttactcccatttttctaattagaaaaaggcttggtgaggctgagaaaccagcccacaattacacaaagacaaaaaaagggggacccaggtcttctgtaaccacctcataggtctccctggtgccacctgcagcatttctagataccgacaataagggtctccctatccccaactttcagaggtacatagtggaatttcttggcattatttgctgagggtaggaaagtcctaggcaatggagtccagattttagtaagtcagaccccatgtgtgagaaggaaagctggaatcatgggtggtaatccccactttgctgccctgagcgggacctgtgccatttaaaccttggaacgcaactagtgaacaagcgcctatgcagtgcttataacagagttggtgtttccactctaaaattaccacctcttcttatcaaaatttgcaactttcttccygtgaaaataggcttacagttccttaactggagcaatgatataaaagctacagagataactccaagtttaatccagctcagcatgaaactgcaaaaacactgaacatataaccatcagactataattctggccatgtttttcatcatttgatctggcagcagggcagaggtgcaccaggagtaaaaacctttcaaaaaagaggtgtggctttcctcatcccctggcaaacattgtcaccaaggtgggatgttgctgctaatgggagagtcatcataaaaaactgtccctacaaggagagtgttacatggtgttgggggaagaaaacctacgcttcaggctcagagaaacctggattcaaatcctgcctctctcacttggaagctgtgttacactggggatgttatttacttgtttattagttagcactyagaatgagttcatttttaggtgagataatatattcacaatgatacacaaaagtgcacactgtgtgctccctttaccatttactatctccctccagccccaacgtgttaccactcttactagttttttgttaatctttccggcatttttaaataaaaaccaagcaaatgtaaatctgttttcttattttcctttcttattcaaaggataatatgcgtttttcagcataatgctttttttttgcctaatagtgtaggaaatcatcatttaagctcgcaggccctcagtttcctcatgaggcaaatggaaagaatgttatttaccttatagaaaagcaaacaarwtagtggatgtgcttagcatagtgccccctagcacccgacaaaractcaaaatgtgatagctagtattataattgttaccatgggggtaatgataataacatgtgcatccagggaggtggtgaggttgaaatacagtaacaggtaaaaaaaaaacccaggcccagcacataagcgatacccaacaaatgacaaagttatcagccagttcggaagaaatatcaagtattaaccaaacattattatattaatcaagtagcaaccatattttgaaagattgaaatgctttttaaagttgcttctcttaaggacatcagcaattcaacatccttcttaaaatctttgaatttttaacactaagaaaggaaaagaatgggatatttattaagtatccactacattgtattgattatggcccgccacttgtttttgtacagtctgcgagctaagaattccttttaattgtttaaatgattgaaaaaaactttcaaaagaaggttaatatcttgtgacaggtgaaaattacatgaaatcaaatgctaatacccatcaatattcagttcagttccacatcaccaattcatgaaaattacatgaaatcaaatgctaataatgtccatcaatatatattggaaagccaactcagctccacattgcccctgcttttgcactacagcagcagagttgagtagttatgaccagggctgtataatccacgaagccaaaggtatttactatctggctggtcacagaaaaattttgctgacctgtgccctaaatgacagttccttgtaggtcaaatggtggttctgtgcttcctttgcagaggcagcaggccccaggaggggacccagacaacagcgtgagagggaagggcatggactgcgccaccctcacatgcatggtgcagctggctcagatcctggtcggaggtggcctgggctttctggtcaacacagccgggaccgttgtcgtcstggtgatcacagcgtctgcggtggcactgataggctgttgctttgtcgctctctttgttagatatgtggattagrtcaataaagagacaatgaccctaacctcagagacagtgaagcacatggcaggaagttaacattttctgcagctctgaatcttagggtctgcccattggacgcccactattgtgatttcagccgtggaatctgcccacctctctctctctctctctttttttttttttttttgagatggagtcttgctctgtcacctaggctggagtgcagtggcacgatcccggctcactgcaagcttcgcctcctgggttcacaccattctcctgcctcagcctctcgagtagctgggactacaggcgcccaccaccatgcatggctaattttctgtatttttagtagagatggggtttcgccatgttagccaggatggtctcgaccttctgatctcatgatccgccccccttggcctcccaaagtcctgggattacaggcgcaagtcaccgcgcccagtcccacctctcactttaaaccaatcctctgcacaacagtccccatatttcaggcaacgtttgcctggactatgcctctatgcatcggtggcaaggggtaagtgtgggtggcagcatctcggtgcaagggtggaagaggcaggagctgcttttcacagggcattacaaatcttgctgagacctcagaagcagactaattccatatacaatgcttggatgtgttctgtgaagtgatttgatttttttttttagccaggggtccatatatattggggaatcatatatttcatcaaattcacaaatattcaaaatattgctaatgatttattctctattaatttattcataatttgctcataattaattcctattactttatgatacccctgacaagtctactcaaacatctcatgctggagaattcaccactttaaaatagttcatttcattgacacagtaaaaatatttctctctagtctgcacccttgtttcgtcctctggatttgatgtgaaagtctttccaaaaaacagccccctgtttctcctatgatcttcttttctccaagctaagcagtttttctctaaccacaccccttcaactgccccatgatgaggttttcagcagccttgagagacagcatggtttaataaaaatcgtgttttggaatcagctggttttaaatcctggctttgccactcagcagtaagctatgtaatctccccaaggcacacttgctcatctatacatttgggataagaattgctatctcagagagttgtgatgattaataatatgtaacattggttcaggcatggtggcttatacctgtaatcccagcactttaggagaccgaggcagggggataccttgaggccaggagttcgagacgagcttgggaaacatagggagaccctctctctacaaaaaatattttaaaaattagctgggcatagtggtgcatgcctgtagtcccaactattggggaagatgaagtgggagaattgcttgagcctgggtgatcgaggctgtagtgagctgtgattttgtcactgcactccaccctgggagacaaagcgagtcctggtctcaaaacaaacaaacgaacaaaccacaaaacacaaaccatgacatttatggagtctttaccactattctaaatgctttaacgttaacacagcaattgtgggagtgggtgctgttaccactctccattttttagataaagaaatggaggcagaaagatataacttatctgaaaccacacaattcttaagtgacagagctgggctttgaacccagtcactttggttccgttgcttcctgtatggacagcacttagcctggtgtctggcacatgaatggaggcatgtgatccacagcccatccctcttcactgcttcccccactcctctctctacctaggcagtgtagagtccttgtgtgcatgctggcgtcagcacatccatagcctcccacctgcctccaccctctatcgctcctgcaaacgaccacccttagccacttaagggtggacagactcagtggcatggaattccctctggaggatagactcaagaaagaacccatggattccttgtaaatagactcagggccatttggacaagagattccaaggtctcacgtacccaagcataatctaggaggtgggaggactaggggggcacagattccagaaggtcctgtgcaatccttgccatgtggggaggggcaggggaagagcagggtctcctctaatgatgacacccagaccaggggccctggctgcccagggctaaggaccgtatctactgaagttggccagcctaggagcaaagagccatttgttgtcattctgtgctgcagcctccttctccttcccagcctccccaagtgtcttataaggcagtggcatccctgatatctcacacgcgctttcctcctgctgctgctgcttgggcttccactttgttgcttcaattctaccattacctcctttgtgtttaaagaacccactctctgcagctacctggttcttatacctgtgactgaggcagtgctggggtgtggagcaaggcatctgaaatgcccctgtgagtctggccacttctggtgtatatgttggggggaacaatagagggcaggggtttatgctaaagtggccacttcttcctgccccctgctcaacctcgtcacctgcagggcatgcagcttccttatccaggctcctgcagtgtgtctgtcccattctctccagatcactggtgctttccagacccagctaggctgtcttctctggcttgagcatgctcttttacttatcaccctccaagccttgctcccttctcattttctgcttcccaatcaggtcctcctgtattctattagtacattcactcccaaatgaaataatctctttctttttacagaatatatacaaaattaccccttcttctctactccaccctcccatccccctgccattatccatcctggagaaataagttaatgactcatttagagaggccacgagggaaaacacctgctcccaaccccattgtgtgggatgaggatgggtaaatgttcagaggacttcatggcacataactcttggcattaggaaagaaacagcgacaagccacctgtcttatctcccttacctgtacttggcctctgcaaggtttagaaatggaatcctctccagggttcagtgtttatttcctgtccgtttctccaaaaactgttctgatgtgtgaagatttggaaatgaatagatgggccagctggaaaggtgacccacagctaagggccatcttattgaacccccaagaagtcaaatgtagtcatccctaaccaaccacagggcacttgtgcgcgcgcacacacacacacacacacaaatatgcaaatactcattgaactcaactcccttgaggtttgaatgactaaatataatccaattttcaaagtctttaaccacatttgggaatctaagtatttgttctcagtataccaatgacatattctttctggcaaaagaaatttcctttccccagacaaataaaactagtacaaggacgcatactctcaacagaaatcctgggaaatcctgcaagagaaagagaatccctactactttgtttcctgcttccctaaccaagcatccgacattccaacatcaaagcttttagtcaccacattttattagcgttgaatatcctctctacctccgaaccaacccctgccattctgcctaaactgtgcccatatatttagacctgtctcaaatattattttgaccagaaagtctgacctcccagcaggatcaacttttccttcctttgtctttctttctttcagccttactttgacattcagctgatcattccctgtcttatcttgcttgtgctcaccgctgtctgtccttttacgtgtggaggtcagaaacgtgtctggttcgtgtacatcacctcagcaccctgcacaggggatggcacaaaacagccactcaaaaagtaattgttgattacaattgatctgaccatttcctttggtgacccttttgtctttgtggtagaccaaagtcatgatctttgatccctcctgccatgttctcagaagccttgtgcttgggatttggacaaagtgaccctttttatagaggttatttttttcccattcctccagctccttctttgctgtttttctagtgcccatagtagcagatgcacatacttcaacaccctttcctaaaaattctgagctacccatacattattttattgttaaattgaaatggaaatttgctttgataagaatctctcagtaagagtctattatccgtgttatagatgtatctcctaccgtgcaaatgttagttttttcctgtgtttactttttcatgtattttgtattttggggacctttgtggagcttacatttcagtctttgttagcctaattgctattcaatatctatatcaataattgttcttcccaaagggtgaagaaaaaaatggactacttcaaaacaaacacaccattcagttttctaaaagagctgacttcacaagactgctcagaatcgcgactggcagcttctgcctttgtgggaaggcatgagtgtttagtcatttcactgtgttttgcaatcacagaaagcagatcagggaaggtgggagttgtagatctcacattttgagccctgaatctcagatactgcagaaaactttcaacgacatcactaaacaattctaccgttcaagaggctctttaaacagacctgtttttacgaatggctattttttatattaaaccaaccaccctggtgggtgcctgcatcattggttttttggccccaaaccaggttgccgaagagagtagcagtacctctatgaaagccagcagaggggtaggtagactgatgtttgatcccagttcttagaagagcctcaagaaaggactttgtgagggtttaacatcttaagctcctgtgatcaaaacagagtcaacatgagaaatgtgaggcggtcttcagagacagctccataaactgtctggaggctgggaaagaatttgtcatgcatgcttaatatgtaaagcactctttagaataaatggaaattggtgatggtaatgtccgatgggaattactatttcctaccttctcttgtcaataatataagcaataaaaaagcccacaactgaaattctgatgataccctcagaacagtttccccagtactctgctcgctttagaacatggtacctgaaccttctattttctttcctaccccacacctctgtttgagagatccgacccagcttctaggaatttggtttccaagattccacttccccccgccccccgccccaattccccttgcacatttctgcggtatttcttcctcttctatctaagcctaccagaaaaaaattaataataaaataaatactgaaccatccctctactcgctggtccagggcctcaatcaaaggaacagcttgattcccaaagcgtgggaagggaggaactgaagaagtgcccccactcctcccagtagagctattcaagatgcctccgggcccagctcaccggcagcacgcagactgctctcagaggaactggagcgcccgagcttcctgcgcgcaacgcgccagcgctccacttccaactctgctaccaagtgagcatatgagcccccttttaccttttggggcagcagcctgaagaaatttccctgtccagcccttctaatcacactgtgtctcctccctcccgcagcgacgacactccccagagaatggctctcccaagctggtgacaggtgttatccccctgctaacgtctgagctccggggctgtgcagctaggtcgggctcagggtgttcccgctggcccagtccggaatgataattgtcataatgactccattggaggtggctttcctttgccgtttctcctgtgggcggaccaggatggtcagttctttttcttaactccaaaagcgtttcttgcctaccagctctagattcctggggcagccccgcagcaagtaggaccttggcgctgctgcagtctc

SEQ ID NO: 98032 - DNA, 16931 bp, Homo sapiens
tcaactagaatagaaatgttacaatttaaatgaaatagacagatgacccttaaggacataatgttgagagaataaagcaagttgcaaagaatgcatacagtttggttctgtttataagaaatttgaaacattcaaaactaaatgatagtcaaggaacataaatatatgtgataaaactaaaaagggaaataataaactcagcaataagaatagtgttcaggggaaaggggatgggatcaggaaaggacgcaaaatttaaatttaaaaacaaagcagggtgcagtggcttgctcctgtaatcccagctactctggaagctgaggtgagaggattgttaagagtctgagaccagcatgggcaacacggtgagaccctgtctctaaaaattagctagtgtagtggcatgtacctgtagcctcaggtatttagggaggctgagataggaggattacttgagcctaggagttcgaggctgcagtgagctatgactgtgccactgcactccagcctgggtgacagagtgagacccccatttcttaaaacaaaatagaaacacaactgaaaaatgggattctaatatacagtttagggggtacagaggggtattcaaagataatgctaacgttttaatctcaaactggaggtatgagggtgtctgttgtgttattctttataacttacacagtttataagatactttttttttttttttttgaaacagggtcttgctctgtagtctaggctgggatgcagtggcatgatcatgtcttactgcagcctcaacctgttgggctcaagtgatcctcccacctcagcctcctcagaagttgggtatacaggcaagtgccaccatgcccagctaatttttaaaaactttttttttgtatggacaaggttttaccatgttgcccagctggtcttgaactcctgggttcaaatgatctgcctgccttggcctcccaaaatgctgagcttacaggcatgagccactgcacccggcctatgaagatacttttatatctattcaataataaaaaaagatgattttaaaagacataaaatatatgacagatcaatgtacaggtctctatggatgtaaaaacagaaagcacagctccttcttgttgaatatgttaaacagaaaacacataaaaagctaagcaatcatgaataatgtttccaaacattgataggagaggtatctcaaggcagcacgtgattaactatcacataaatgaaagaaccaataatagatttattcagagaagggtgagattacaacaggttggattattccatcaggttttttcttaatatttttcataaatgcaaatgtaatgaaaaatctgaccagagattcataatgcacatttttaggaggaagacacaaaatagtccctttcagtttctagactaaagccatagaggttgaggctggccctaccatgatcgtggctgtggcggtggcatattctccacctccccaacactctccaatattgggacatcgagcttcctcacatacctgtatgcaaaaggaaatggaacaccattaggttgacaatatccaccaactaaacagttggtgactgtgattagacattttaaacttctcattgtttacaacatatttttgaagacattcactattcaaaaatgctgttaagaccaagtgcgctggctcatgcctgtaattccagcactttgggaagctgaggcaggaggattgcttgagcccaggagtctggaaccagtctgggcaacatagtgaaatcctgcctctacaaaaaatcaaagttagtcaggcgtggtaatgtgcacctatactcccagctactcagaaggctgaggagagaggatcacttgagcctgggaggtcaaggcaattgtaccacagcactccagcatagacaacagagcaatgccctgtcttcaaaaaaaaaaaaaaaaggctgttaaactgcccaactctatattaagattagagtgtagtgagcatgtcctatagaggtgtactcccttacataattatgtaagaatggacagacttgaatttttattttttaagatggagtctcactgtcgtccaggctggagtgcagtggtgccatctcagctcactgcaatctccacctcccaagctcaagtgattctccagcctcagacttccaagtagctgggactacaggctcacgccaccacgcccagctaattttttttgtattttattagagacggggtttcaccatgttggccaggctggtcttgaactcctgacctcaggtgatcctcccacctcggccttccgaagtactggaattataggtgtgagccaccgcacctggccaaaatccaatttttaaattaaaaactttacgaatgtatatacttcatatgtgcaaataaaaaagtctgaaagattatatactgaagagttaaaggtaaaggagtatggtttatatatggcattgcgtatgtgacataccttcatatttaattttatattctttccaacaaatcatatatctaatttgcaatataaaacaaacaaagccttgtttccaaactcgtagggcaaaaaatctctttgtttgccggaaaaatgattctaaatatatttccattcctggtagtaatgtatcacttaacatatttactttctttgctattatttatatatttattaataatttttaagttatataaacgtagaaacatggcttttggtgaagagggatagtttacactttgacaacttactgtatggagatttaaattccgcaaagtatttttcagtttattgtaatttttccccatgggaatctctgtctttagccatggaggtagtcttaacctaaggaaagccaaacataactatctattaacaaatatgctgccaaataattacacagctttgaagttaatttcttctattacaattcctagttaataattttttctataaccttagaataactcttataatttctgtcataggagtaagaacacagaatcaaatttagccttgctcaaaccactttagaaaacaccaataatggccggatgtggtggctcatgcctgtaatcccagcactttgggaggccgaggtgggcggatcacaaggtcaggagttcgagactagtttggccaatatggtgaagccctgtctctactaaaaatacaaaaattagccgggcgtggtggcaggcgcctgtagtcccagctacttgggaggcttaggcagaagaatcccttgaacccaggaggcggagcttgcagtgagccaagattgtgccactgcactccaacctgggtgacagagcaagactgtctcaagaacaaacaaacaaaaagaaaacaccaataatggagtgtaacagggcgctatactcacgtctaccttttttgcaaaggcagagttacactattctaataagagaatgagcaagttttcaaatatctcatccctcatgaatgatactgccaaaaagtactctacttgtttagactgaggaaagatcacaactgtgcactgtctgctctacattctagattttatagtggttactcaatggaaaaaagatctaaaatttggactggagactgtgtatccttggttctccatgacttccatccacttgtgatatagaaggagcaggattaagttatctttcaactcaatctaccttctacataaaattccatcattcttttaaattaaggcaaggtatccataggtcacatgtaaattgactaggagaagcacaagttagatcatcaacagctactaacccagatctaacagactagtagcaaagcagtaatctttactctgaagaagttggatgctgggtagaaaatggggagatggcagtgtaacatagtaagggcaagagaaaagagaaagattccaaaaatttcatctgcttacttgttctatctagttctgttatcacatctttctaatgatttttagctaaatttaacaagtctgatattaaaaacagattctagggcttggttatatctgaaaataatgcacaataaaggaacgggacgttaaaattatctcaaattttcaattacctttctcctttctggcgttttaggtttcctttatattcatcccaggtgctcctgtctgcaagatcaccagatacaaaatcttgaaggtctggtccattctgtaggagttccttttttttatctggcaaggagcttaacggtctgactgggctgcaaaaatatctcccaaatacctaaagaaagagttaattatgacgtttatttagtggagtccgtaataatttagttttaacccatcataacacctaaacggaagggtaaagccaaaaaagtgattcagaaattatgtcaaactaggagctctagtattctagggcattagaatataaaagatgactgaaggaaccaaacctaaaagagagtaagagttgactgtttactactgagtttagaatagatttggaaatctgtttttttttttttttttttgagacggagtcttgctctgttgcccaggctggagtgcagtggcgcaatcttggctcaccgcaagctccgcctcccgggttcacgccattctcctgcctcagcctcctgagtagctgggactacaggcgcccgccaccacgcccggctaatttttttgtatttttagtagagacagggtttcaccatgttagccaggatggtctcgatctcctgacctcaggtgatccacctgcctcggcctcccaaagtgctgggattacaggcgtaagccaccgcacccggcccgaaaatctctggaactaacatatatcacactttcatgtactccacctaccaggaactagatgtttgtctttcaacaagattgaactgcaataactgaagaaggtgccacagtttaaaactgttctggtcctgacttgaatcaggggcgtttaaagtgaagtgtgcaataaatctctcgagctttgaataattgttgaaacgtaggttaataatgcccaattagtttcagacaactggaaggttaaaaccaagcctaacgtttttactttctttttcttttttttttttttgagatggagtctcgctctgtcgcccaggttggagtgcagttgcgcgatctcggctcactgcaacctccgcctcgcgggttcaagcgattctcctgcctcagcctggcgagtagctgggactacaggcgcacgccaccacgctcagctaatttttgtatttttaatagaggcggggtttcaccatgttggccaggatgaacgtttttactttctaggttacattgtttctgtgtttgaacgtggcagtcaagaacataagaaatcatggtattcggcttttacatctgaacacaaacgtgtatgagatagccaaaacactacaaaatccacgagtctgcacatgtatctcaaaagaaccttcgacaactcaaagagtgcctgttagggtgttgcacgattgctactgcacttctcaatgtctgccgctgaagcctagcggacaggtttgtgttctctgcggctagagtggtgtctcacacacagtaagagtccaagacagaatagctatgtggggtgctcactgcagtgctccataaatatagggtacaaaccactctaagcagaaaataagtcctcggtgctggcccagagagacttgcaaacaaactgatgccagagactctatatcatggggctggcgggataattacatgagattacacgaaaaacgtttaaaactgccgttggctagtagtaaatgttcagtaaatgcactggcctttattattgggcatgggcgctctgaagggataggatccccccaccccacgcccaaacccgttcgccccgccgctcacccggggccccagggtgcgggctgcatccccgcagcgtagagacatttcctctttaggactagcgcagtgcaggggttgagggatcgctaactcccgggaaaggacaggtcgaaattacgtcgctccatttatgacaagcagccaagctgctccacgattggctgctttagccttacgtgcgtcgcgcactcatgacgcaatacgcaggccycttacgcgatacaagtacgtaatgacgacagacgttctttctttgctgcgtctactgcgaggtaaggatgtttctgtgctcstgggggtactgggaatctgaaaccatctgctctgggaaaggctgcggcgcggctcccactctcggaaccttgtcctktttgtcccccagctcggcaagcgccatatgagcctggcggcgccagatgcgaatcctgttstgggctttttggcctattcccgcycctcagtcttgccgggatggcacygcccgcataggacttccagggttgggctgagtgggagttcgactgctgggcctcgtaattctcgctttggggctgctccttccaggctgggacacactggggcccgctgtcggtctcccgtcctccgacatcttgtctggaacttccgcctggcagtctccagtaggagtggagctctgtgcggcgtagtttggtggaaaaacgggccttgcgtcggcctcacccccagtgtttgtgtttcagaatgaagactattctcagcaatcagactgtcgacattccagaaaatggtatgagacttgatgtcttttacttacatctttactgcacgttccaagcgttgtgtggcctgacgagtgtgttctctcttctagtcgacattactctgaagggacgcacagttatcgtgaagggccccagaggaaccctgcggagggacttcaatcacatcaatgtagaactcagccttcttggaaagaaaaaaaagagggtgagggtttttcttctgataattcagttgctcgttggaaggtggtttataacagcatcacatttggttgctttaacaattttcgaattraggttcagtgcttcagctttaaatgttgctgtccagaataccagcctgttcagtgaaattgaaaaaccagattctgaacacagccaattatataaagctcaaatgtaatagtggtcatcagtgacacgtcttaatggtgttagaagtttggtttattttcctagtgattgctttgtaaaaatcacaggaaccggcagtaggtcatttaaacctgatgatttaattttccagaagggaagtttgttgcaacttctacaaagcttaactgttgggaggttttataggtggttggatttttccagttgaaaaccatgtgctttgataagggttaattctagaatcttaaagtaattcggtaagtggtctgttgtcttttaagcctgcatatttctggaaagaatacattttttgttctgttacagctccgggttgacaaatggtggggtaacagaaaggaactggctaccgttcggactatttgtagtcatgtacagaacatgatcaagggtgttacactggtaagcagatgtatcagacttccttgttttggaaagggaggtttctcaaacytgtgctttatacagcgtaagtgtctctttcagagaatgggtcatgtattttatttggtgtaatacgcaagaacttggcaaaaataggcatctgtgggtctttaagcgatagagctgagagcaragaccagatgggtacaacatgtttgtttttttctgttgttgggttttttttttttttaatcaaggctggggtctcgctattttgtccaggctgagctcaagtgatcctcccaccttggcctcccatagtactgggattgcaggcatgagccaccatgcatggctagatgggtacaacttttaaaaagtaggctaatgatgaattttcataccttccgaattctttaagataggaaatctacagttgcagtactagttggtagtcamatctcaccatcaggaccccttgttgggatagaaaaagatgtagtttctgagttttctgtctgctgccataatgtatgtcattattctttccaacccaccgtctctcccctcaagataaaaagttcatgctgaaatggttttctttgcattataccttctagaatgcacctgatratggcaccctgtacatctattataaatctgttaagattcccccatctacccttgctcttagccttaagttccttgaaggcagggggcctgcctttggcttggtggtctcaattcctgccatgtgctgtaccttagtaactcagtaaatgttagtctaatgtctaagatcagggctttggggttctcattaaaagaaggcagcattgttcattgagggcataagagctagtgaaataaagcctccgcaaggagctttacagtccactgaatagacagaacaatgtttataaggcttggttcaggtgacagttattagaaaatcttggcagtgagtgttacgttttaaaataagtataagcatcttagaaaattttaaaactattaaaaatattcctcagcattgctaatagcttgcttatttatttaacatagggcttccgttacaagatgaggtctgtgtatgctcacttccccatcaacgttgttatccaggagaatgggtctcttgttgaaatccgaaatttcttgggtgaaaaatayatccgcagggttcggatgagaccaggtatgtgcataccctsagacagaattaagaaatttttccttcatatttttttcctccttttccactcccaacttccatactttagttggctgttgttttgtgtttgtgctgagtaaaaccagatttgttttagaattatctcttgattacacttmcaactgttggtgctrcttaagggtttatatcattatgtcgattacaatttcagaaagttgatacattggagtagcttgcagtggtggttgtmtttaacttggcaaatgaaatcttttaaaaagactttaaatttacaaaaggtgtatataatggtgtgtatttatggagcacaatgtgatgtttcaacacatgcatattctgtggaatgactaaatcaggctaattaacacatccatcactccatttatttcttcgtggtaagaacctttaaaatctaaagagaaaactacatgagtagtggttaatagcctagcgtaaatttcagctctcactgtccaccttgggcatgtcatctctctgcagcttaaaattgcaaacatctttgattaaatgagttaaagttgaaaaacaacaatgcatgcgtaatacatagtaaacacrgtagctttaaaaaaaatttaaagcttagtgctttttatttgaggcagggtcttgctctgttgcccaggctggagtacggtggcgtgatctcagctcattgcatcctccaccttcgtgctcaggtgtttctcccacctcagcctccccactagctggcactgcaggtgcctgccaccacatccagctgatttttgattttttgtagagactgtttcgccacgttgcccaggctgatttcaaggaatgctatggtgcctggccccagctaatttttaarttttttgtagaggcagggtcttgctatgttgtccaggctggtcttgaacttgcaggctcaagcagttcttcccccttggcctcttaaaacatacctggctcggcctcttgatgcattttgattccattggggtggggaggggtgggaagaagggagattcttagtatcaaaataatggctgtccagaaatactctgatactagctatggtcagcaacatttaatgaaaacscttatgttaaaaataaacccctgcctcctggcttcaagcgattctcctgcctcagcctcctgagtagctgggagwataggcacgtaccaccacacccagctaattttttgtatttttactagagatgggtttcacagtgttagccaggatggtttcgatctcctgacctcatgatccgcccgcctcggcctcccaaagtgctgagattacaggcgtgagccactgtgcccggcctcaaaatcttaagaaaaggttcttttggtgcatggagttttacatggaataaattagtgcctctgcaatttaaatattttttacayagatttgatgctgtgcaaatgccctctccccttttaggtgttgcttgttcagtatctcaagcccagaaagatgaattaatccttgaaggaaatgacattgagcttgtttcaaattcaggtttgtatgtttactatgtctaactatgcctacaagattttgtctaaatcttgtttaaaatacagtattttgctaatttttatttgattagytttttaaattgtgaaaataaaaaggtcacattctgaaattttaagtacagcacataatgaaatactttctttttaagatgggttaggctgatgtattaattgctttatcttcactcctatagcggctttgattcagcaagccacaacagttaaaaacaaggatatcaggaaatttttggatggtatctatgtctctgaaaaaggaactgttcagcaggctgatgaataagatctaagaggtaagttcttacagtgtcttaagttttattactgctctagttgaatgaagctcttaatttactaaaagacttaaactgaatttgtagtaatagaaaatggagagttaagcattctggaacacagtaaatttgacagaataaaagatggaattggcatgcattttactacgtatagtttactatgaatcagtaagtcatagtcttgaggtatgttttagattatttagaatagtacagaaaaaagattagtactttcctgggcaagtgtattgatggggatttacagattttttttctttttttacagttacctggctacagaaagaagatgccagatgacacttaagacctacttgtgatatttaaatgatgcartaaaagacctattgatttggaccttcttcttaaaccggttatcctttttagctagtttttttccctcgtggaacaaggagctttaatctggttcttgaaggaatagcaaggatatattttaggcaagaggaatattgtaccagtgacaggcaaacatgaggccattcatcattgcatatagaactttaggaataccctgaaagtgtctaaatttgctgaggcatgaatttgaatatttggtaaggcaaatgttgtcttagtcactggtggagaaacagctgaggagtagaacagagtgatacagcatcagttagaattagaaggtgtagttggtttggttcatggtctcaataatcttgtcctttacctcagccatttacttccataccctagaacttgcttttaaaaattgataacccttccataatctcttaattccatgtgttatactttaaatatggtacaaggccaccataactagacttaggtcaacatggtgacccccaaacctttgtgaattctacatctcatttgatggaaactgcaatttctaaggcaaaatttaacattcatccttgatcaaatgcgtcaggaaaacgtactaagtaccttcattgtaaggtatggtcaggtactttatcagaaaaagtaaatataaggacagaggtcacgatcagttggcatatatgttatcttggatcttacaatgtcttactcagttgcccaggctggaatacagtgccatagtcatagctctgtaacttcaacctactggactcaagcaataatcctacctgcttcagcctccttagtagcaaggactacaggcaggcaccgtcacatcttttttttttttttttttaaagtatggatggggtctcatgtttcccaggctggtcttgaactcctggccttaagtgttcctctttggcctcccagagggctggaactacaggcatgggtcaccatgccctatacgtcttagatctggattcaagtacactaattgaacatacattaaggagtcttgttgtttgatgactatttggttaggtttttaagaaatttggaggaaatcataaatctcggatttgctcagaaataacggatggggttgtaggcgatgaatgggatcaacgtgaagtaagatcacatcctcgaaaggttgggaaatatgggtccattagatacaaattttttacaatgtagaaaatgaaacaaagacctgcgaagttcacctggattattgtgacagtcaactggtcatcttcctctcctgtctattttcagcatcagccagggtactgattttgaaatggattatagcactgtttcaaatcctgcaacaggttttttttcccttttttctttttaaaatagcctccccattgtacctgcagccgtttttaactcaatttttctgacttctgcgctatagctgaattgacctggctaattctctataccaagcactctgtcattaagcatttaagttgtcgttttccctttggaatgctctcagctgagctgtgtggctaatttcacttaccttcaggtctattcagtgaatcctgccttgaccgccgtattaaaaatagtagaccggctccttaagcttgtcctactgtctcgttacccttctccacttgtttttgtcaatagcatttgtaattttaatatttacaattggttgtgtattgatgatgtgtttttttctgctaggatgtaaccttcacaaggaggtaattttgtactctggtgtattccagctaccagaacaatggcatgtagctgtttcctggattgccaaggaactcagtaatagcagtgggactggaagagagagattttgggaaggtattgacaggatttcaaaacagcatgaggcttgtgggagaaatttccaagtggcaatattctagtggggtggagatgctcatgagaggatcagcttatggggagtagctgctgtgggagtaaatgagatttctttgagcatgaaatggactggcatgctgggtctgaccttcataaggtaacttaagagagtgtagctaaacagtgattttttttttttaataacttgggtataacaaatgagcctagttctccagggaaaacttaattattgtcttctgtgtctactatggataagcacttgtgcactatttttgcaatttttagatgtaggtgtccacatatttttgagacggggtctctgtcacccaggttggagtgcagtggcgtgatcttggttcactgcaacctctgtctcccaggctcaagcagtcctcccacctcagccttctgtgtagctgggaccacaaatacgtgccaccatgcctggctagttttttgtagagagggttttgccacgttgcccaagctggtctcaaactcctggaatcaagcaatccgcccaccttggcctcccgaagtgctggggttacaggtgtgagccaccacacctgagccacattttttgagaaaatatacccagaagtaacataccaagttggtgcacaactaggcagaaagggattcaggggaggcagtcttggggcagagcccatttacaatgccaaacccattcacattcaacagttcttaaaattgaccaggttgttagttgaatacaagtggtcagcatgaaccagtttatttggaataaattacattgaaaattaaacatgtagtcacactgtactggcctcattttccagaggctctttaaatatagttgtgattctccaggttgttacattgaatatacgataaacacgttagatttttcacaacacatctcagaaaagcttaaactccaaagatcttacctgtttgctcctttcaagagttatcagtttctggttgacctttgatggtttttaaggagtttatgataaacctgaatatttagtatgatagagcatgagccagattaaatgcttaacctaatttgctgtacatatttgccagtggttaaaaaatttaagggtttttggattcttgtgcgatgatggcttaaaaactagtaaaataatgcccaagtggcagagaaggaggactctcagtactgggttaggaattttattacttaggggagtttatggtaaaccagcaagttagaaaaggggggcatgctttaagcataagctcttaatgtgaaagagacagtgaaggttaatttgtgaactgtgagtacgagatactttaaacaaagtgagaaagagaaagcaaaacctgaaagataaattccaggtttttgttattcctgtggctgacctttttttttttttttcccaagcccttgatgttaaagagaggttaatgagttgcccagttgacattaaagaattttccctggagttcttgggtcagggtgaatcaatgtggcacaaaggggaaaaaacccagccaagtgattgttttaagtgacttactgtttctacatagttagagtaataaaaacagaattgactagttgtatgcgtgaccttaggtacatagttctcagagggagatgttaatactaaaaaaattccttgaaaatcatacctcaaaactgccaactttggggtagtgggtgcagctggggcaaggagactagagaagagtaaagcagaattttactgttcccatttgccaggccaaatagcaaattgatttctcatcatatttgcatttactcaaattgactaattgtatttttacagtattttggaaacttgttcattagcagttagatactgaatttagcttcagacataggtggacctagaatataatcaaaactgccttaatttactaaggctttgtaacagaagaacgtctcttgtgactgttaaggtctaaattgctggagtgagcagacaaggacaaattaatgtatgcagtgggtgttaaatgttgacctaaagaaagaataggtataaataggtgcatatttaagttttcttcctcagatgtttaaaatacactgaataagtctcaagaacagagttcatttcccaaagtgtcaaattatccaagtcagatctagtaattaaccctagcccaaaagggtgctatataaaacaatttaaactcattcagtattctgaattgttgctttacttacagtatagcaacttctattcacagagttgagtctagctttccttcatcctgtgatctttccatgagatgaggttttggaaattacttttatttttatttttattatttttttttattttgagagacagtcttgccctgtcccccaggctggagtgcaatggcacgatcttggctcattgcaacctctgcctctcgggttcaagcgattctcctgcctcggcctcctgagtagctgggattacaggtgcccaccaccatgcccggctaacttttgtatttttagtagagatggggttttgccatgttggccaggctagtctcgaactcctaacctcaggtgatccacctgccttggcctcccaaagtgctgggattacaggcggtgccaccgtgcctggccggaaattacattattttaaaaaatcagatctagtaaaagatcacaaattagatattctataggtgattttttgttgttagaaaaatgaagggcttgatcctctttaagagtctgtgttgtaactggcttagacaagcactacttaccctattgtgttttctttccattttagaaccaccctgacctaaaggagaaggcaccttattagaagtgacagaatatatattatctatcactgactacccagtttaaagaagggtgttaaatctctgctgtagagtctaacaaaacaaagttttgcttttgctttttttttttttttttggacacagtcttgctgttgtcgcctaggctggagtgcagtggcgcaattttggcctactgtaacctgtttcctgggttcaaacttctgcctcagcctcccaagtagctgggattacaggtgccactgtcaccacgcctggctaattttttgtatttttagtagagacatggtttcaccatgttggccaggctggtctcgaactcctcacctcaggtgatctccccgcctcggcctcccaaagtgctgagattacaggtgtgagccacagcgtccagccccagagttttacttcttaaaaataatttattgtaccacaagtagctattggtagagatgaaagctaaagcagaatgatggaatacagttgatgaaactttaagaagcaatgtagcatgtaatcctcatagcttactgtcaggatgaagcctttatgtttacatccaagaactgagttcactgatgtcaacacctaagggaatgttctttgaaccacacagcagagacaattgtcatcaccttggttacagctgtatctcagattgtctttctataatacaggtatatctcctgtaagttaccagcatatggaactgggatgaatttttaaactgtctatcatgcagacagatcagtttagctaacaactctcttgcctttctttaatggtatgtgttgtaagttttttgctttccaaaactttcttctcttctgcctttgaaaaatggcaattgataagagtagaaccagggtggagaagaagcaacaacccaggaatatcagtggtttcttctgcacaaggaataagcagacagtgcactctgtattttcttgggtctgactgcatctagaactactgttctcaaaagggaagcccctgctgctgatcactttgttgtaaaattgtattgaggatttagctttaaaatcagatgtgaagaatccaaatctgggtttagatttctcttcagccagtttgaatgcataatagcctttgattctgactttatcaatcaggtatgctgaaaaagataagaaattaacattaatcacaaatggactatgaagtatctttgaggaagaatttagttttcattgaaacaagctaaaattatgcctataataaaggtagtgatttttattagagggttttttttgacatttattcttttatgatctatgtaaaggagaaggtgaaa

SEQ ID NO: 98033 - DNA, 164699 bp, Homo sapiens
  misc_feature (1)...(164699): n = A,T,C or G
gaatcatgggaacattatcactggggggtgtactctctctgcgatattgggagtaatatcatcctctccactttggaatattaaggacaatgtcaccgggaggggggagtgtacacttgctgcggtattgggaatactattatcatctccccacctgcatattaggaaatatatcagagtgggtgtacacctcctccgatatggggagtaatatcatcttctacccttctggatatcagaaacaatatcacacgggggtgtggactttctgcgatattgggaataatatcaacctcttggcctttgaatattaagaacaatatcacagggtggatgtacaccccatgcgatgttgggagtaatatcagcctctgccctctatggctattaggaacaatatcccaggctgggtgtacacctcctgctatatggggagtaatgtcatcctcttcctgccaggatattaataacaatatcacagggtgggtgaacacagcctgcgatactggaagtatgatcatcctctccccctccggatactaggaacaatatcacagaagaggtgttcactccctgcgatactgggagtcatatcatacacttcctccgtgaatattaggagcaatatcaccaggcggatgtacacccactgctatgctgggagtcatatcatactctatcccctggatattaggatcagtgtcgcaggatgagtgtacacctacttcgatattaaaactaatatcatgctctccatccctggatgctaggaacaatatcacaggtgggtgtacaccccttgaggtatgaggagtgatattattataattagtaatcaggaattattaatattaatattaattactagtacaatattatgtaataataattattttaattttacgattatgtaggagtataactaattgttattaatgttatttatcaatattattaatcttaatataaattattttatcatcattttatgatggatttaattaacagttattactgatatgagtatttcattattaataatattactatgaattattaatcatgtgcattatgattaagtcattaattttgtcctcattattattattatcaatgattactcttaattattattatatgtattaatattaataatcaatagtatttttcctgatatccagtggggagagggtgatattattcccaatatcatagaaggtgtacacccccctatgacgttatttttaacagccaggggctagaggatgacattactccaaatattgcagtgggtgtacatcccttctgtgatcttgtttctaatatcctgggtgggagaggatgatattactcccaatatcgcaaggggcgtagacctccaccgtgacattgtctctaatatccaaaggtggagaggatatttcttccaatttcgcacggatgtacaccacccctgtgatacagttcctaatatctaggcggcgacaggatgatattagtctcaatatcgctggaggtgtacactccctagtgatgttgttcctaatatccagggacggagaggatgctatcactcccaatataacagggggtgtacaccccttctgtgacattgttcctaatagccagcgggggagaggaagatattactctcaatatcgcagggggtatacacccccttgtgatattgtttcttagatcccgggagggagacgatgatactagtggcaatatcgcaggggctgtacacacctcctgcgatattgttcttatccctaaggggagagcataatatgactctcaatatcgcagggggtggacacctcctttgtaatattgttcttaatatccatgatgggagaggatattactccctgtatcgcaagaagtgcacagcctcctgtgatatagttcctaatatctaggtgcagagaggatgatattactcccaatatctcacgagttgtaaaacgccttcgatattttgcctacaatcccgggggtgagaggatgacattactcccaatatcaaaggtttacatccccccttgacgacattcttcctaatatccacattgggagacgatgatattacgcccaataccacaggtgcggtacacccgtcctgtgatattgttcgtaatatcccagggaagagaggatgatatgacacccaatatcgcaggcggtgtacaccctcccagtgatattgttctcaatgtccaagaagggaaatgatgttattaccgcagatatcgaagagcttgtactccctctcccttccaggatattgctcctaatatccaggggaagagaggataacattatgtccgatatcgcagggggttgtacaccccacccccgtgatattggtcctaatatccaaaggtagagacgataaaattactcccaatatcgcagggggtgtacacccctcttgtgatactgttcttaatatttaggcggggagacaatgatattactgtccatatcgcaggggtggacaacatccctgtgatgtggtttttaatattcagtgggggagaggatgctattaattccaatatcacaagggacacacctcctgtgacattgttcctaatatccaggggaagagaaatgatatgactcacaatttggcaaggggtgtacaccccctccataatattgtccctaatatccaggggggatcaaaatgatattactccccctatcacagggggtgtacagtaccccagtgatattgttccttatatccagggagagggaggatattacccccaatatcgtaggggtgtacacaccccctgtgatattgttcctaatatttaggtggggagaggatgatatcccaatatcgcaggcagtataaacccctctgttattttgttgctaatatctaggttgggagaggatgatattactgccaatatcgcaggagttgtacaccccacctgtgatattattcccaatatccaggggaagagagaatgatattactttcaatagcgctggaggtgtacacgcccatgtgatattgttcctaatatccagtgggggagactatgatattactggccatatcgcgggggttgtgcactccctctgtgatgttgtttttaatatccagggggtagaggatgacatgactctcaatattgcagtgggtgtacaccaactctgtggtattgttcttaatatccagggagggagaggatgatattactgtcaatatggcaaggggtggacaccccttctttgatattgttcctaatatccaggggggaagagtatgatattaaccccaatatcgctgggagtatgcactcttttttgatattgttccttatatcccgggggagagtctaggttattactggccatatcacagggtgtgtacaccaccactgttatattgttttttatttccagcaatgaagaaattgattatactcccaaaatggaatgggctgtacatcccccatgagatatggttcctaatattcagaagggaaaggatgatattactcccaatgttgcagcgggtgtataatcctcctgtgatattgctcctaatatctagggggggtgaggatgatattactcgcagtaacgcagaggatgtacaccacctctgtgatattgttctcaatatccatggggatagaacattatattactcccagtatcgcaggtggtgtacatccatgccccatgatattttttctgatacccaggtgaggggaggatgatgttactcccaatatcgcaagtggtgtacaaacattctttgatatttttcctgctctttacgggttgagaggatggtattactcccagtatcgaagaaagtgtacacgccccctgtgatactgttccttatatctaagttaaaaaagaatgatattaccttcagtatcgcagggggtggggtgtacactccgcctgtgatattatttctaatatcaaggggaagagagaataatgttactcccaacagcgcaagggatgtacacaaatggtgatattgttcctaatatccagggaaggagatgatgatattactggccatatcgcaggaagtgtacacccttctgtaatattgtttctaacattcagtgggggagagaataaaattgatcccaatatcgcagaaggtgtacagacccctttgatagagtttttaatgtacagggaaaaagaataatattatgcccaatgtcgcaggggttgtaacccccccgccccccactgtatattcttcctaataggcagcatagtagaggcttatattactaccaatatcgcagaaggtgcacacacacctgtgatatacttcctaatatccagcgggaaagaggctgctattactttcaatatcgcagtgggtgtacatcccccctgtggttttgctcctaatatccaggggggaagagatgatattactgacaatatcacagggggtgtacacctcttctgtgatatggttcctgatataaagggggaaagtggatgatattactcttaataacgtaggaagtgtacacccaccctgtgattttgtccctaataaccacatggggagaggtgatattactcccaatattgcaaggggtggacaccccacaagtcatattgtttcttaaatccaggaagggaaaagatggtattactaccaatattgaaaggatgtacagaacgcatttcttattgttcttaatatccaggtcgaaaggagataacattacttttaatataataagggtggtacaccctgcctgtgatatgattcctaaaatctagaagaagagagaatgatattacttccaataatacactgggtgtgcaaccccctttgatattgttcctaatatctaaagaaagagatgatgatattactcccaatactgtagaaggtatacaccgtcctgtgatattgttcctaataactagtgggtgagggcatgatattatttcaaatatcgcagtggctttacaccccttccgtgatatttctcctaatttccagggggtggagtacgaagttactcccaatatagtagtgggtgtacacccacgctgtcacatttctacgaatattcagggaaacacagcacgatagaactccaagtctcgcaaagagtgtacaccattttgtgatattgttcctaataaccggaggtggataggatgctgttagtttcaatatcgcaggctgtgtacacacacactgtgaaattgtttctaatatccaagaggggagagaatgctattaattcccatatagcaagagggtgaggcacaccccgccatatggggagtaataggacaccccctccctccctggctactacgagccacatcgctggggtgtgaggcaccctcctgccatatggggattaatagcgtccccctttcccccccgactattacgatccacatcgcaggggagtgaggcttcccccgcgatatgaggagtaatagcaccgccctctccccctcaaccccccggcttttaggatccacatcgcaggggggtgaggcacccccggcgatatggagagtaatagcaccccccttctcccccccccccccccccggctattacgatccacatcgcagggggggtgaggcagttcccgtgatatggggcgtaatagtacccgctgtgcgtcctggtggctccggacccggcccaagcgcggcgggacctccatccgtagccctctcccccaacgtcgccctcccggggtccttgtctagtctcagcaggcggcaaacggaccccaggcgtctggcgctcacccaggagactgcccagcggtttctggagagagcgctaagcggagacgcccgctggcaagcagatcccgcctccttccctggccaaggagccgcccctccggggtagctgtgcgctgggcggcgctcggaccccttggcagccgcaggtgcctccccagcccagcccagctcagtccagcgcagcccagcccagcccagcccggcgctcgcagcctccgccgcttccgggcagataggtgccttttcttgctccttgctcttggagttcttctcttagtccctgttccctggatgaaagcatcgctccgagcctcatgggaggaatgaaggaagaatcgagactaggtgagtggtggtctagatttaacgaataataacaataaacctgcatactaagggtactgttgggaagctaggaagtgcaaggagaagagaagacaaaggctgctgatcaagataactcacaaaactaaatgcaggctagggccaattccagctattttgcactccatccaggttcccctgcctggcactgactcatgtgcagacccagacagacttcaataaatatttgctgggttgagacaagtgagtggaggtgtttctgcttgttctccagcatctaaacaagcaaaacctagctgcctttgatgattgcttcatctccacaaggactttttcccccaggacttaaaaaataaaatgtggtgtattcacacaacggactgctatgcagcacttaaaaagctaaaatcagagctgtagggatcagcatgcctgtacctagatttcagaagtatgatggcagatagacacagcaagatgcaaaatatatccactctatcatgccatttaggtgacttattttaagacacttgtcatgtttgtaaaatcatagaagggggactgtaaaatgtttatcacatccgtgattgtggctgtctttggaaagtgtgaaagggaaatcaattggactttaggattaaggtggaaataatatttccctaaaatgctttaaaaataaaaatgatgatataaagatgaccaaatataaacaattgttaactgagagtgttattaacttgggcatttttcatgtttttgccccctatttttaaaatatttcttaaactaagaagttctgtttttcaaatgcaaacaaaataagttgtgtctatgcacattctgtgacaatgaaacctaaaatgtttaatcaaaagttgcaactttcttgcatcacctcctatgttttccaatcctagaagaccacacctctttatctagggaggcttggtggttagagaagcttacctgttgacaacccccaaattacaggccaaagatgaaaggttggtattagggaactagttcccagttaataatctgataatcggccaggtcagggtagactctgaaaactccctgtgtccctgcaagacaaatttctcctccttttacatttcatatgctttggattttcattttcatggatggtagctgtcctcttcacatctcaaaatgatgcttaggtaacactgcagacctagtgcctggagatcaggaagggctggggggttggtaaaagagagtcctacagctctactgggctcttcagcagaatggaaaggacatgtctccattttcctgcgagagaaaggtagatttctttctgaatatgaaaaaaaaaatctaatttggttatccacatgggagagaaaatgaaaaataattttaaactggattgtgtatgttaggtgcaatgaagaagatactaaacgaccacccagtggttccatctgcttcccccttccacagacacacacaaaaatggttccctgtttgcatattatcttcccactaaaaatcacttggtccgtggtgaacaaaattgtgtgcacatcagaatgaaattctgaaacatggaaaattgcgataatattccttcctctttctctttctgattcgacaacttgcaaggtcagtgcttggtatatcttatgttgcaggatgacaggctacttgagaaaaacctgaggtgtgaagaaagatataagaatgacaggactggggtgcattgtgaaaactacatgtactcaggttttaagcacaaaataaaagacaatgtagcctctgcctgcagttaacaactgcaaatccttaaaattaatgttctcccggccaggcacggtggctcaagcctgtaatcccagcactttgggaggccgaggtgggtgcatcacaaggtcaggagatcgagaccatcctggctaacatggtgaaaccccatctctactaaaaatacaaaaaaattagccgggcatggtggcgggtgcctgtagtctcagctacttgggaggctgaggcaggagaatggcgtgaacccaggaggcagagcttgcagtgagccgagatggtgccactgcactccagcctgggcaacagagcaagactccatctcaaaaaaaaaaaattaatgttctctttaggaccattcatctctttctagtgccatcagtggttcagtccttacactatccctcatttggattttaaatgcaataataaagcacaaagaccaccccatttgcttctccctaactcacaataaaacactcacaataaaaagtgcatcccacttacttcttaactcccttgtctgctggagttaaactctttttgattttttatcctggagaaatggttgagttctatcttcctgggtctcaataattccactgagcttccatcagccacctgtgaccacctacccctactcactccctctctcataccatttaattggttgcttcctaattaatgactctctttgctctctatttaatgattcttgctaaagtccataaggcactttgccagcagttggtttttagtatgaaaagtagcatttccttaatgagtctgagtctgccttccaaatgaagggtttacttacattttcctaatgggaaaacgagcttttcttctacacttccttaggggtttcataagttctttttcaataactcatccttaacactttctccaattctgcctgtaatcaatattcccttcacatgtaaagagctcaggaggaaatcaactatttttttaaaaatacgcaataaggaaattctgctactcttagaaatagcaggagctaacattcattctttgcatatcatgtgctaggcattgtgccaattaccttatatacattgtctcattatatgtatccatgaccatatatgtgctaagcatgaaattttcttaagccagatagctgagtagaattttaaaatattattttgtacaaaatctagacctttaccccatttgggggatagatctgaagatctgggctcatgtttccatgtggtgacaatctgtttgatctgagcacaattactttatttggatggagccattgccaccattgtctgcccaatgcactaatgttaaatgcccagtctggctcactcatttgcatcatctgcctggctcctatagggatcccagcttgtcactcctgaggtagacactgtcatttcccccattctagaggtgagaggttacataactgggccaaaggcattatcagtgtcagttttaggactggaacacaggatgctgcctctctttaccattatgttttaaagtggagcaaagccgtagttttcaggatcttttcttgttcacacatatcatttaatttgagcctcagagcggctaacagttttgagcacttatgctatgaaaatgttttgtgtattcagttaaatgtatgcatatcatacatttatgtaactcaatacatatatataaatgtgatataacatacgtatgatataacagagttatatatatgtgtattatttaacttaatatataatgagttaagtgtatgcatatcatagatttatgtaactcaatatataaagagttatataatacaacagagttgatatatatataaatgttgtatataaacataatatatacgttaatatatattaacaaagagttgtataatacaacacagagttaataatatataaatacaacacaaagagttatatatgtgtgtattatacatttaacttaatatataatgagttaaatgtatgtctgtcccattcaactctccattgaggaaagtaccattatcttccccaagttcagaagaagaaaacagagaaatatattgaaattcagcaatttgctggtgtggtcaagtccaacccagaacttgcttcttttacattgtagtaccctccagggtatgcagaaacagatagctagtgcatctttatgactaaaaaagaaaatttttgttgttgattacccagtaacaacaagacagtataaaatcagcatattttctcaacaatattttcattttatagttgttgaataaagtattgctgacttcattttaaacttttctacatactttgaaaaatatgttgctttcctcccattttgtaagtctaggtctgctattgatgagccatgcagtgttttctcctgttgcttgatgtttttattctgaaatcatggttggttttcaaacacaaaagttttcactacagtgatacagatgaggtttatgtttccgccacagtctatactcagggtgcctagagtatagcatattattagggtactatttcttttcctatcctagatatccaactaaggcttcgggacatgttttgagcgaagatgggtgtttctgcccggatagtataaatcgaggatccaggtctgggcagattcaaccatgggagcgaacacttcaagaaaaccaccagtgtttgatgaaaatgaagatggtaagaaatatgggatagtggcatataaaaaatagaattttgcaaaattcaagtatatgcttctagtttcataagttaagcataagcatggtctgtagggccttgaaggaaaaaggcaaagctgcatgagtgagtctgaggactttgtaggctcatagctaggttttaccttccactttccatgggacctttggcagctttcctaatctccactataccaatgtcctttgtccaaagggagctgcagttgggcatgtggtggatagttaaatgatttgtttgtcctctgtgctgttccttggcagttgaagttacccccattgctcattgttacagaaaatacattatcaacatgtacatgaatgataaccagtgctcataatattatagaatgaagctgtgccttctgaatttccaactgccaagcttttgtgtactagacaaatcccataatgctacgtcatagaaaaaagaatcagttgtattggagaaaagggaaactttccaggccagactcagcaagacaagaataaaggcatgagtcctcctgattctcccatcagtgaggcatgctggaactgggcaatgcctcctcatgtccctcttccttcctatatgttaagtctgaacagcattggcgtatgcaggtggcagctgtttataggttgtctgggggaaaaaaatgccccaagccccaggtagtaagttgtccagacctctgagagggagctcttccgagtaattcccagagagctctgctaattggaacagggaggaaaagaatggactgaaattcaggaaatctgacaccagtcctactaccagttacttgctaggcccaagcagcttatttactgactctatcttcaattttgttatcaataaagtgaggagataggttccttcccactcaagaagtttatcattttgagatcctaaagcaactttgtgaattctgaagaagcttctaaatcatcaaggaaagtttattgggttagaatgcaagtttgattgctgaaatgaaaactacaaataacagtggcttaagccaaatggaaatgtttatctttctcatgtgacaatctaggcataagtaatccaggtgatgtgtggttccagcagcttagggactctgacgccaactacttgcctttttccctctcttcccatttctagagtggtaccctcagagtggctaaccaacacaacaaattccagccagtgagaaaggtggaaagtaggagaggttatgcccacttatttataggatttgctctggcttgtcactttcgttcacttccacttacctagatacaagaaagactgggaaattcagtttgttatcttgggtggccatgaaccttctaaaaataaggagttctgttttattacaaaagaaaagaagaattaggagtttgtcatgattggggacaactacgtctgctgtagttggggcaaacaatcttagttttgaatcttgggatggaaatacttttaaaaacaaaatatgggccaggcgcggtggctcacgcctgtaatcccagcactttgggaggccgaggcgggcggatcacgaggtcaggagatcgagaccatcctggctaacacggtgaaaccccgtctctactaaaaaatacaaaaaattagccgggcgtggtggtggacgcctgtagtcccagctactcgggaggctgaggcaggagaatggcgggaacccgggaggtggagcttgcagtgagccgagatccggccactgcactccagcctgggcgacagagcgagactccatctcaaaacaaacaaacaaacaaacaagcaaaaaaacccaaaatatatggctgatcaggacgccttgtttcaagctattcactatcagtttggaggcccattcttactatttctacagaatagttcataggaactttgaaattatatagctggaaaggggtcttaagaaaacttttttttcatggctattgtgattgccttgctttaacttatcaaatagtaaaagcaaagatctagagactagtgatattacttaatttttctgtctctaaaatggaaagacaaataggcttgcttttcatttagttggtttcctctgcttcctctggactcagagctaatgttgtacatgaggctggtcgtcagagaatagggtggaaaagagaggccagctgcatacttttaacttgctgggctacatttgaaggtagtagaatagcattatgatgagaaaacacagaaatgcataactcttccttgattcagccaggctttgttcttgcgggatgcccaagaaagctacataaccaaagaattgtgacaattgggaaataagatacccctttttagttactttaaaggactctagaaaaactaggttgaaggagagttaggcttagggaccagacaggtctttcttaacaccctctaggtcaccaccttttctgttgtctggcttctcagcccaatgagatgaacccactgcagcacccataaaggaaagatctgagcatagcaacaagtctgtgcctcccaaaggtgctaggctctctgtctgtttatgcagacagttgcaaggcaaaggaagtaggagggcaagtccacctactataaacctgtcactctctagacatgaagaatagaggaggaaacaagttggtccttgctctgtcattgtgaaccccatgttctgatgatggaaggctgacaataaaaaggtaaataatacataaaccagataatttcacagtgccttaaagtgccaccaaggaaatgactcctagtgatcttacagacagtgacagtgatggtgaggaggccactttagatagggtggctgcggttgtctttctaaggaggtgacatttgggctgaagcctgaaagatgagaagaagccatctatgaaatgacatgaaaagaatagttcaagaacaggaaaaacaagtccaaaatccaaataatgacaaaatcaggattgaatagttgcctatatcttaacgttctctcatgagcactagtttgccaaagagactgcatttattgccatgttaacttatttcttcaaaagatgattgatttgaggagaaaaagtatgccattctagggaatttactttgctttaaaattcagtacattttgtaaagttcatttgactcttcacataaatctggattgagcacaaggtaaaattgtatctgattgctgtgaagctcctgaccaagaaaaagcaaccaaaaagcactgattaaccaaacaacattaatgcttatgtcatttttgatatccatatttttatatacataatcataatgtataatcaaactgggccagtatcaagggcactaaaatgagccaacttaattatttaaaaaatattgctgaaaagaatcccaatatgtgatttttaaaaagttttttaaaatttttaaaaagattttttaaaagatttttaaaaatattttcttcaaactgtttaatatttccaatatatagatatgagaaaaacatttaaccaataattttcccaagtaatgtttcaagaattctctcttatggaaaaagtgtttttgttcactttgaaggtaattaaggagcaagataagaggttattggatgtcccttgagataagctattcttgccagaattcatcctgacacttgtatttcatgttgttccatctgatatctgatcttgaacacataattttattagttacttatgttgatctttattcagcaaaaacaaagtaggagattttcaggctaggcatggttgcttacgcctgtaatcccagcacttcaggaggccgaggcgggcagatcacgaggtcaagagatcgaaaccatcctggccaacatggtgaaaccccatctctactaaaaaatacaaaaaaaattagctgggcatgccagtgtgcgcctgtagtcccagctattcaggaggctgaggcaggagaatctcttgaacctgggaggtgaagtttgcagtgagctgagattgctccactgcactccagcctggcaacagagcaagactctgtccaaaaaaaaacggcttgcttatttgattatataagatatctttcataaattagatctcaaattatactattgttttgcagttttagcttttatgttttagggcaaatcttaagtcctaattactttttttttattattgtggtaaaatgtatataacaaaatgtaccatttaatcattttagaatatacggtttatgacattaagcacattcacgttatcatacaaccatcaccactacccatcttcagaacatttctcttctcgaattgaaactttgtacctctgaaacaataacatccacattccatcccctccccagtccctgttaacaaccatttgactttatgtctctatgaatttaactactctatgtacctcatataaatggaacatataagatttgttcttttgcatctggtttatttcatttagcatatatttttaaggttcatccatgttgcagcatgtgtcaagattctctttctttttaagtctgagtcgtattccattgtatggatataccacattttgtttatcttttcattagttgacattgattgtcctcaccttttgatttttgtgaataaggctgctataaacattggtgtgcaaatatctgttcaagtccctgttttcaattcttcagggtatatacctagaagtggaagcactggatcatataattccttgtttgactctctgaggaaccatcatactgtcttctacctaattatgctttgtgttttagtaatgggacacagcctggcatgatgggctagagtattggaaaggcatgcacaggttcaagtctcagctgtgccacgtgccagtaatctacatgtttctatgagaagagtcaaagaggatatagcctggtcaaccattatcagacactggagtcagtttgactaattatatggtgttctaaggaaacttgaggtaccacaagaaaagtctccaaatctaaataattactaatgaattaattgagggggaaacttatttaacctttgtaagcctcagtttctttgtatgtaaaatgcaggtaataattgggcatacttcattaggtctttgtgaggattgaataaataatgcaagtaaaacacttagcaaagtatttcccataaagtaaccactcaattaatgctaattaagtgttatttactaacatcagagtttcctagtgtgaactctttgaagtactttaagttctgagaaaaacaaaattaattaaatgcaactctgtcgattccacagttaattagacctattcatgtttctattgactggattaacagaacggcagattttatggattctgttaaaacctatataaaaacactttaaaagaagccaagttattgactgcacaaaaacataatctcatctgatatcttttttatccccctgaggttattgtgtttttgtttaaggcaaaatcaagaactaattgggatgaaaataactaaagtttactttgtctgatttaagtcccaaactgactaataagtaatcccatttgatcaacagattcagtgaaaactgtcccccattctcaactaccatatggatattctgagaaataattaatgatgcagaaaaacattttttgttttctgaaataaaagaatagacgtgcaagtgacacttctttttaatgcttacaacctttttttaaaaatctactttattttctctatctgaatgcactagattttgtttgtttgtttttgtggttggttggtatggttttgcttattgaggttttcaggctgatttagaaaaaagaaatttttacaggagagagtggacttgtttacaattcagagttgaggcaacaaaaaaaaatcttgcagtcattatgagtaatatgtgtatccaagtttatacaaagaatgtaaaggtgataaagttggcttagttaaatcaagagacagccttcttctagaatattatagctaagaaaatttggacttaagtttaaaaagctgctctaaagagttcatcaatgccctgagtttgcagagagttcaattattgcattattctttggacttgctgaaaactcagtgttctacttttatttggcaacaccatctcctaggatatgtggctgtttccagttttccagcatcttcagtgacagaggcaatgggatcctttaaaatgttgggccaagaaaattggccacagatttgcaatccaaaagaaataggaggttgctaaattgattccagctatgaaggacatcgaaaatttcttttgttatttgactgtctatcatggtctatttgcactcaatttaataggcaaatgaatttccgactttcccttagcagccttgagtaatgctgtctcgtatttattattttgcattagaatggttggaaaagttaaaggaaaatttccctagcaagaattggcttcttaaaaaaataagtcatcttggacaacctaacatttagtaaaggcatttgtcataaataacctcaagtccaatttatggcaagggttttaatttgtaagggctttatttctccatacaaagggattggagaaacaaactagaaagccagaaaacagaccacaaacactgagctagtggttccaactggagtgttccctgagcagtgacttatgaatacttgtttagaagaatcaactcaaacaaatttaggaaagtcacatcctgcctttagagcttccagtgtttgttagcatattaaagtctctgaaatgacctacaatattgaaatctcagtcttctgctatttttaatatttatttcaaaatgaaataatttttgtgaaaaacattttaatgtctgtggctcataatattctgtggatctcagtttgggaaatgaaagattataatcgtatctactctttatctgttggaaacatctttccatttatttttcctgctggtttaatggcaacaaatttttacatgtgaaatatttgtaatgtgatttatatgaaaaaatgtaattttcttattacacgatcaaaagtggttatgctcctctgtaagtttttccttacaagtttttatgttgcataatttatatctatttggtttaatgagtacaacacaagatagctcagtttaattctgggatgttggatgtttctagttaaagtacaagttggatttgatgaaaattcattgcttctttatgattttttaaaactcaagaacatgttagttaaagagtgtcttctgaacaaattcttgtgaagtagttgctgattattaagtaacactcatgctaccgtaactttttatactatccaaagctatagacatttttaattttcaacttgcaactacctaggttgaaaaattaaatctgcaagccagtttcattattcagacaatttggttatcacttcaagcctactatcttcaaagaaaatgggagtgcaggccttcatgggagctgacttctgctgtatggccttgcaaatgtcaactcgattagagtgaccagtgttagccctcaattcacaaactcaggtcccatgaaatatacacggatttctactatgcattactatgtgaccattcatggaagtttcgtttggaaacacagacattaaaaagccagtcatggaataacattcttgttaaaacaggacattggcaaaaaggactagaaaacttctggctatagattttgaatccaatagccttgcataggcttttctgtttcctcctaaactatgtcttctgtcctttctggaggcatatttatagtaaaataaacaaaattaaccttgttttacacttgagtaacctatacctttggttatttacgagaattacttaaagcagagttggcaactttttctgtgatgggcctgatactaaatattttacactttccaagtaatacagtctctgtcataactactcaactctgccactgtagcataaaagcacacttagacaatgcagaaacaaatgaacatggctttgttccaataaaactttatttatggacactgaaatgtgaatttcaaaaatattttttgcataagatcaaatattattcttttgatttttttccaatcaataaaaagtgtaaaaattggccgggcatggtggctcatgcctgtaatcccagcactttgggaggccgaggtgggcagatcacctgaggtcacgagttcgagaccagcctgaccaacatggagaaaccctgtctatattaaaaatacaaaattagctgggtgtggtggggcctacctgtaatcccagctactcgggaggctgaggcaggagaatcgcttgaatgcaggaggcagaggttgcggtgagcccagattgcaccattgcactccagccggggcaacaagagcaaaactccgtctcaaaaaaaaaaaaaaaaaaaagtgtaaaaaccattcttagttcatgagctatacaaaaatagatagtgagttagatttggcccatggggcttattttgctgactcctgctctaagcatcttgcagacatttcttcatatgccctaggagatttctgatatcccctcataataccctggccttacaccaagactacaatctgttctttgcagatgcttaataaattcattcttccctgtcattcagttgatctgtgtgagccagtggaaatacttgggccaataaatctagtgtgtttgagggtaaaatatgctatttttgtaagatatattatttaatggccacacaacctaaattcaattaaatggttacaacctgtaacgcatttaaaatatgactaggcagaatttgcttcctactaaagacatttattcgattgaggagcatccaacagttgatgttgatccccccatcctgccccactgttctactttgcaatttgtttgaaagaaattgtcaatatatttctgacttctgagcaaatccatgaatcgggatccagcaacaggaaaagaagctgttgctgcccattgcttggttttggcaccaggaatggataaatcccagacttcctggggcacgtgttttataaaagggaagtgctgacagtgcaaacagctgccatcaattggccttggagactacttccctggagaagctccaattatattcttaaaggacccaccaagctcttcaagtgttagtggcaaccatttgctgccaaccatttgaaatgatgaagtaatttttttttattagtggatcctaagtgataggctctagaactgatcttcaaccttaactaatatcatggcatcagagggctacagattaaatcagtggttcccagtcactctctgtggacaagtagcaactacgacaaagcttttcttagtctatggtggaagagaaaaattaggacaatgtaataagcatcccataaacttattaaacctattaaaatttaattttaagattatgtcattttttgtatgtgtgtatgcttagtatttatggattgtggaaatagaattttttttttatagtgagaacctaggtaagtgacttacctctctgatcccccattttctcatatgtagaagggggctaataatagtatctgtctcatagtttttgtgagaataaaaaaattgtccaggtaaaatgcttagctggtgactggcacacagtaattgctcaataaatgttagctattattgctatcattatataatcatcatggtttccaatgcctttacttggcaaataaaagaacaaaagtcacccgatattgatctcccttttcttccctagttttctggggggtgggaggcagagaccgaattttctgatctgtgaaatctgaatttatcattgtaattttccataagtgctatgtagagaactcatttaagttgctgggatgaaaaaaaatcaaaagtggcctattgtgctgggtgcagtggttcacgcctgcaatcccagcactttgggaggccgaggggggtggatcgcctgaggtcaggagttcaagaccagcctggccaacatggtgaaaccttgactctactaaaaatacaaaaattagcctggcatgatggtgggcacctgtaatcccagctactcaggaggctgaggcaggagaatcccttgaacccaggaggtggaggattcagtgagccgagatctactgcactccagcctgggcaacagagtaagcctctgtctcaaaaaaaaaaaaaaaaaaaaaaaaaagtggcctcatcttcatttcagtgaaagatgatagtatctggactcacagtgtggcagtgcagacggaaagctgagagtttattcaacatttattttcaatataaaataattaggtgttactgatggcttgaatgtggggtaagatggaaagaacaaaatcaaggataaatcctaggtttttgcttgagtagttatgtggatgactgtgacattttactaagatggagatgcgtgggaacggaggggtttgggaccctgctcacatacagtctagagttcacttttggaggcatacagtgattatgggacagctaaatgatggtgccaagtaggagctggagtagagtatccagcaatgagtggaaacatctgggatggagacagaaagacacgggtattaattctacggggatggctaagtctgctctgagagacagtgtggagaccaaggagaagaggaatcctaatatttagaaacaaggcagtggatagcaatctagctatggaaagtggaaggaaagagatagttgatcatccagttcaacactactcttgttgtagttcacttatgttgaatgcttctgtgtgactaagtcggtgagaaaaatctatgggagtaggcaacatggaggatgttggtattcacaaaagcagtttagtggagtgtggaggcctgagccagactagaatgagttaggagtagatggaagataagaatgcagatatgggcccagtgcggtggctcacgcctgtaatcccagcactttgggaggccaaggtgagcagatcacaaggtcaggagatcgagaccatcctggctaacaccgtgaaaccccatctctactaaaaatacaaaaaattagccgggcctggtggcgggtgcctgtagtcccagctactcgggaggctgaggcaggagaatggcgtgaacccgggaggtggagctggcagtgagccgagatggtgtcactgcactccagcctgggcaacagagcaagactccatctcaaaaaaaaaaaaaaaaaaagaatgcagatatggcaagtatagacaagcttcaagaagtttggtctaaaaggaagcggagaaataaacaaagagatgatgcctaatataattcagctaaatgtaatataatggatttttttaagatgaggtactagagcatgtaatataaatctattaaattgggtggccaggaaccaggactggctcatcagcatggaccaggctagacgcacagggccttatatccagaaggacatcacctttgggttttaatgctctgcacttgctgtctccaaattctaactgtctcttaggctctcatcaacacccacctccatatccagatattgagtacctcagggagttcaatttggaagcaaatgatgtgaaaatgtactttactatccagtaacattcttgttagggagtgttggcagagattgtcgaacaaccataatgcattttatcattcgatcagtctacaatttaaacatagcaggactggacagaggcacaggaagattaagccactgaccttaagtcagacagtcacatgggtagatccggaatcttgatctaaaatgaataccattttttcagttatagctatcttcccaggatggccaaccagaatgcatatataaaatttcaaaaacaaacattgggaattgctcttcagcaagaatacatcaaacacccattatgtgcctaactctaaatcttactttcagagagctaaaaacaatttcatttcacagtgacattcatcttcgcttctgccgtaactcacatgcatatgccttagaccacattattaatgaagtattgggggttccatctagagcaccttttcttccctggagttaatcatccagttcagcaccactcttgagctttgcttagcttcttctacccatttggattttaaggacaacaattccaatggcctttatccatgtatttaacaattcattatgagccaggtgaagtggatcacacctctaatcccaacactttgggaggctgaggcaggtggatcgctggagcccaggagttcacaaccagcctgggcaacatggtgagactccatctctaccattttttttttaattagttgggtatggtggcaggagatcaaggctacggtgagctgtaattgcaccactgcacactagcctgggcaacagagcaagaccctgtctcaccaaaaacaaaaacaatttatttcatcatcattgtcatcatcattgtcactgctcactcttcaacattttttaggtcaacttaattaatatgataccttgtgggataatttttatttatttttataaaatattgaagtttttgccactttgataacttcttcattttctgtccagagtataacataccagggaaaaggctctaaaataaggcttgaggtattaaaaagatcttctgtttaagtcttatgttcctaatcaataactagaattggcctgattgctttcctcagtgggttttctggtagtcctgatatgatatcgaggctgtcatatagtcctgaaatatcctatcattaacatttgtggtggtatctgatataaaggtagatgaacttcattgcagctattcttaggaaatgcgtatttaaatgcatagttaaaagcaagatttacaattatagaaggaatgcaaatgagttgtagaaagctcataaaataaaaatcaagaagaaagaattacccatcatgcctcagcccagtgataaccactgctaatatttttggctgttttcatttgcaaccccatctccattctagcagccctcatccctcctacccactatgtttttcactatatttcttgtttaaatttacttaattatttgttaattatgtttttcctctcactagaaagtgaactccatgagggccagggatttttgctattttgttcacttttgtatccttagcacctactttgttgattaagtgaatgcattaatgatctatttttaatctgtgtatgtgtataaaagacacttgatatatctgggatgatattcaatatacttttgtatcctcattttcaccataggtagtttatgtcaattccttgaaatttgttgattttcttgaataatttagcagttgtacaattctaaaacataaatataatttgcttaaatatacataccattttaaacatatttaaatgtgaaaatacagttgagttctcttagattgcaattttgtaacttttgataatcctttgatcctgaaaaaaattttttggcatgagggaagagatgaatatttcttttggagtatttaaatcatctctgcaataatcctttgatcctgaaaaaaaatttgtggcatgagggaagagaagaatatttcttttggagtgtttaaatcatctctacaattaataatatctaaagcagtttggttggtttatttaggtaggattaattttcagtatgaatattatttaaaaaacaaatatagtcagttgaattgctgtggaggtttctgtacgatttactcaaagctggctctttttctgtacgcactaccacgcccggctaatttttgcatttttttggtagagatgggggtttcaccatgttggccaggctggtcttgaactcctgatctcaagtgatccacccacctcagcctctcaaggtgctgggattacaggcataagccaccatgcccagcctgcatttatccttacatgatggtgaaaaataatgtttgtacttccttcagaataatttcaagaaggatccctggagtcagctaatgattagagtcaggactgtgccttagttgatggcccatatagcactactgaacatgccagagcttttgcttatccatactggaggagggagtgcttagaaggcaaacgtatatcattttattttcattcaaaatgtactgatagcaaagaatttcaatggctggcagattcagttaaggacaaaaataattcacagcagaaactttttcttggtctccctcctccaagtgctaagcatggcacaagtagatatcatggaattctagaaccctctcttcatagatcttaaaaactactctctttccctgcttgagtactttctcaaatctgtgtctgtgtgcaaattttccttctaaggacaccagccataccggattcagggcccactctactccattttgatactgtaccatcttaaccgaacatgttatatctgcaacaaccccattctcaaataaatttcacagtctgacatactaggggttaggacttcaacctatctttttgggagacacctttggtttgactgcttcttcaactcttaccagctctatgagcttgagcaggttacatactcttttcaagtcttagtgcttcacttgtattttggggctaataaggattatacgaaataatgcaggttaaatgcctagcactttgctttacatactaagggttcccaagtgctttattattaggtttctgaatgttatatataaagtttcagtgctgcaaaaggaatagcactcgaatataacattttctttttaattctcagcaaggcaacgtacttctatatagaagggtgcacccttacagatagaataatggtgggcgcacacttggacaagggaggagaaggggttcttatcccccacgcacgtggcccctgctcctgtgtcgttcccctattggctagggttagaccacacaggctaacctaattctgattggctaatttaaagagaatgacggggtgagggctttggcagagtcagggcagagcagatagcaggtaatcggactgagttagggtggagcaggtgatctgaatgagtcagggtggagcaatcaaaaaggttgctttatgaggaagttacgtttaaaagtagaaggcaggctgggcgcggtggctcacgcctgtaatcccagcactttgggaggcagaggtgggcggatcacgaggtcaggagatgcagaccatcctggctaacacggtgaaaccccgtctctactaaaaatacaaaaaaattagctgggcgtggtggcaggcacctgtagtcccagctactcaggaggctgaggcgggagaatggcatgaacccaggaggcggagcttgcagtgaggcgagatcctgccattgcacgccagcctgggcgacagagactccacctcaaaaacaaaacaaaaaagtagaaggcaaagaattgaacatactgacatattaagtctttgaaaagaaatttagaactcatatctaacaatccctccccttgtatttccttacagctttcttttcaaacttttttttaatatgccttggcttagtagttttgcttcattttccaaaagaagaagcttctctggataaggtggaggttagttaagggaggtttcagtaagtgacatttttatgagcctctgcatctacttacggatgcacagtatgacacagcacccgacaagaataagtccacctattacggctgcgagggaagtaagaattgaggctattattccttctcatttaccaaactacttttctagccatcttataaaggggtcatttacccctgagttgctggctaacttattggatagagcagtcagaccatgcagtgcctttctaatacttccattaggggcagtgttgtttgggatgaaggtgcaacattgagttttaattatgatgcaaactacccctctttctgctactatcatgtctaaggctattttattttgccaagccatctggctagtagcccctaattgctcagctattccattaacagcatctctagtgtagttaataaatcactgttggttgtagtagctgtagtttatccaatctacatttttattaattgtcactcaccaaaatattgacttaaatcctgcggctatttgattttgggctttaaattgatctggtattcctcatgggaccctaattgtgtctaaatagacgtgagagttgaaagacccataaggggcttctctcgctttacgatgtcttatttttccttcctctggttgatgaaatgccagggtgaaagggatagccaattggactaaagcacaagtgccactccagttatttggcagagtgtccagtaaaggtccaccacaataccaccacacatccacacatccgctcggggatgaataagggctgactgattgataagctcttgaaaattcttaagctcactgcatcccttcaggtctccaaggaacgctaagtttcctccctgtcatgagagacactaagtgaactagtgttgggagacagaagctggatggcccttgggggctgacctgcagggtaccagacttcgggatatagcagagagagagcttggaacgacttattactccaggctgtagaatcctggaaaagagctaccatgcagcccatgcctggttgactggaggaccaccctagtggaaaggggacaatctggaatacttgatccattctaaccaggcatttgcatcttggtatcctgtcttagttgccaaagtttgctttaagtctttgtttttttgttgttttgttttgttttttgagacggagtttcgctcttgttgcccaggctggagtgcaatggcgcaatcttggctcactgcaacctctgcttcccaggttcaagcaattctcctgtctcagcctcccgagtagctgggattacaggcatgcaccaccatgcctggctaagtttgtatttttagtagagacggtggtttctccatgttggtcaggctggtcttgaactcccaacctcaggtgatccccctgcctcggcctcccaaagtgctgggattacaggcgtgagccaccgagcctgacctgttttaagtctttagtttttacaatagctatcttggtcttgttgttagatggaggaggagcaactgttccgttgtgagaggttttggaagaaggcttacaggaaggtgcaggcggtggggatcaaagaaatgcattttaaataatctaatagggtttgtccctgaaacctcagcccctatagcataaaactgacttaaagaagggaactggcttagaaaaggggaagaaatttgagagtttgagataataacctgtagagaattatagataataacctgtataggtttagctgacagctggggggagggctgtctctttagtaaaatgagtgtatggttttagtaaattacaaaaactggttggggcaatcccttcttgctatttagtggtccacagaacattggaccaactacagcataaaagctctacgtcgggggcggggcggggggtaggactctgggttgacattggggtctttattgaaatttccccggattaaatggtcccaattcactaatgcccagtctgatgacagtcaggaggcacagaggtattttttctgaaatagagaggtgtctttgacttggcaaatccccacagggtataacaaggcaagcattaagtgcaatagtttgaggcaaaattgacttggttatgttaataactagatggtcagcaatagagccagtaaagaagaaagagtaatagaatagataaaagagagttaaatttttcttagctttagtttggcagggctttcccctggggctgtggcccacgactctggagggggcagcgctttcttgactcgggtgtgatgagtccatccctttttcactgtagaaacagcagtcttggtggtgagcagcacaaggtagggtccttcccaggctggctcgagttttccttctttccaccctttgataagaacgtgatcttcaggctggtgttggtttaccggaaattctaggggtggtacctgtgctaaaagacttttagttttgagggaaaggaaaatggaagataaaccaagtatataatttctaagaaatggaccttttgttttaaatgtggggacatcagcagtggactttatagtccttggtgcctttttactgagaaatttcctttagcacctatttttattagattttagaccaaagaaggccaaacaccattttatatttaacagtgcttcctgtatgattcttataccagataagctaagtttcacctttatattagcaagttgttaaacttaattttaataaaactttgtagacatatttatccaatttttaatgtctgaccataatgtatgattcttatagactctttttaaccttttataatttttgttaaagagcaggttagtgctttaagaaatacctgttgtgcttttattttaatgtccagttcacagaaaaactgtatgataccccttaaactttagccaatatgtttacacacagaatttcctttataattaacatttcaaaacttgcttaaacctttaaaacaaaatatttgtttatttttaaacttttaatgtaggtaaaaatccacattcttatggctccttataatccttttaccaaaggcatattttactttccttatacaccttgcacataaactgtttcttcaatagctttacattcaggaggcttaattacttttaaattatacaacatttcttacataaattcccttttaaaacttttttttccttcacaactttcacagacaattctttgacatgcctcaactttctgacttgttgtaaacatccctttctttaaacaactagttaatttattttaggacaagaatttactatataacattctttttacataaattctccctctcctttttttttttaagataatcattcttctccaaagccaacttcctttatgtctgtggacaagactgtctaaggccacaagatttgaagttaggataatacatgttacactgttaacttttagctaaatttacttttgttgaaaaccttctaagtttgggatttcaattattctttgctattaataagaccttgtttagtcaaaattaactcagaattggtatagatggcttttttttattattattattattctgtaagtactttaaggcttggctgagtgcaaacagctctcacgtttgaacagaccaattattaggcagttttcctaactctgcttctacaagtgtttccttatcacttcctgaatactcattgtgtctttttccctcaatcacccgggaggaacctgtcctgaagggatttagatcccctgttaggaaacctgctgggttaagggaattttcagtggttaatgttaaatcatctttttctaacagaatagccccatactttaagatttttcagttagtaagctacattttcactttttatatattttttgacttagggtagttctgaactggtgaggtgtgctcacaatgaggtttcctctaaaagttacttttctacttccttctgttagcaaagcagttgcggctacagattgaatgtattcgggccatccgcgggttactgggttaaggatttttgataggaaggctactggttgtcagtggcctcagtgctttcaggctatgcccttgtttatacttacaacaaggtggtactggagtgttatagggtcaccgagaagaccttcgattatcagttataggttttaaatttaccctggcttttttttttttattattatactttaagtcctagggtacatgtgcacaacgtgcaggtttgttacatatttatacatgtgccacgttggtgtgctgcacctattaactaaggaatagggtacactgttttttctttactacttctatctctttctttccctctctgactttctgtctctttctttctgactccctctttgtagctctgcctctctttctctctctctgcctctctcctctctgtctctctcttctctgtctctgtcctgtttctctctctctcttgtttctctctcctctgtctctctcctctctccctctcttctgtctctctctcctgtctctctctttctctctcctctctctctctcccctcttgtctctcactcctggctgtctctctctctctcctctctgtctctctctctcctctctgtgtctctttgtcctctctctctttctctctcctctgtctctttgtcctctctctttctctctcctgtctctcctctctctctctcccctctctcctgtctctcgctctcctctgtctctgtctctgtctcctctctgtccctctctctctcttctctggctctctctcctggctctctcctctctgtctctctctctctctcnnnnnnnnnnnnnnnnnnnnctctctctcgcctgtctctctctctctctctcttctctgtctctatctgtctcactctctctctctgctggtctttccttgcctctgccagctgcttatgctgctgttctcccctctccttcctctttccctaagggagcgaccggtgggagtagagctactctttcttcccccaagaagaaagcgggggtttatgtgaggttcaactcttgaaattagcggaagtttcaacccctcaaaccagggatgtctcgccttgcctgtcctggaaggctcaactcctcaaaccaaggggtgtcttgcctgtcctggaaggctcaacccctcaaaccagggggtggcttgccttgctggtcccgggaggttgacctgtttcccccactctgatggtcctttacacacttcccactcgttctgtcctctctggccgctcccctaaggcagaatcaggcccctcttagtgttggcaggcccatggcgggatacgccctaagccatatgaggcagctagggaaccgcagagaggacccactcactccgtccagcagtaggatgtcaccatccacacaaacaacactgcaagcaggtcgtttgtgatcattcatgcacacacacacatttaaccctccagaatttgaccaccaaggaagcactttaccggctgccgcggcttctccttccttggtctgtgcgcagagtcgttgccgcagtatgtgaggatcctttaagctaggttgctggccactttctttttttcccgccttgctgagagcttgggttattcctcgcactgggtgggtcttgatttctcacccctgaggctgccacaaggggacggggtgcacctcctcaggagagacaaccagagaccacccccagaggggaatgcaatcccagaagagcccccaattgttatatataaagttttagtgccacaaaaggaatagcactcgaatataaaattttctttttaattctctgcccagcaaggtacttctatatagaagggtgcgcccttacagatggaacaatggtaagcgcacacttggacaagggaggggaaggggttcttatctctgatgcatgtggcccttgctgctgtgttgtctccctgttggctagggttagaccgcacaaactaaactaattctgattggctaatttaaagagaatgatggggtgagtgctttggcaggagtcagggcagagcaggtagcaggtaatcagactgacttagagtggagtaggcgatcagaatgagtcagggtggagtaggtaatcaaaaaaggttgctttacgaggaagttaaatttaaaagtagaaggcaaagaattgaacatactgacatattaattctttgaaaagaaatttataactgatatctaacactgaaggaggcttatgcttagggttttatgttaggagtttggtttagagcatagcatcttttatttagaagaaatctaattcttaatatggaattcacaagtaggattatgaggaaccctgaaaattatatacaaagtttattttgtgtatttgaattattttttctctttggaaaaggcatgtattcaccaaaggagtccatgctatcccccccaagctaagactgcttctgctcatcctcagcgattcatagttgccttaggatacatttataggggaccctcaattttaaaaacttagcactgaatcagagagaaaacttgagaggcatttgcgaggttaaatgagagtgaccgatgctgtacaagagtaggtctcgaaatgtggtacttttcttgggttatctcgtcttattctcatcacaaatggtgaagaaatggtcagccacattaaagagcagatactgagattcagcaagtgagaaaacctgtcctggttcacacagccaggaagaggcagaggcagaatcctcaccccacttctgtttgcctccaaagctcaaggagagtgagctttacccttcatatttactcatcctcttactaatttgactcttaagataatcctgagatttaaaccagaaaactattatgatccccttatttgaatgagaatatatgtctaaaaatgatttttaaaaacactattaaaggtcacaaagccagtgaatgataaagggattggtacctctggctcctatagttagttcatccttcaaagaacaaaaatagcccccatttattgagtgcctactaaactctagatatgtttttaatatatgctatctcatttaatacctaccacattcctgtaaggtaggtatcattcattatacctattttacagatcaggaaaaaacaaaacaaaacaaaaaaaaacaagacttctagggaaagatgctgaatagaacacattcttctacatccattcctttctgaagatcttcctaatatgacaggtagggatttgtcttaagatttaaacccacaaggatgaagagacaggcagaagagcttcactatcaacgttgcagaaactggaaaggagacagagaactagaagcaacataactgagtcctaagcttctagaaggggaaggtgagaaataaccagacccatgccgtagaaccctccaaagactcgggaattggcactgtcatgtgcctctagagctagaggtgaaggggaagagctaaagtaaatgacattgtttggatatctatttaaaaactagtcatgtcccttctaccaacttggaaaaagacaaaaaaaaattctccactccatactatggtttatcctctgaagaagaagttttcttagtggggaagttgagtgcagaagatgccttgctgaaaatggagggatcgggtagataaatgcatactggatactggggcacccagcctcctcttcccacttggctctgataatactggcagccaaggactcaccctccagtaaagagaacgacagaatattttctggagattttgaccaatccaagaaggaagatttaaaattatcaacattggagattttctaattcaacatccaggccacagctagaagcaacactatagaagtttattgctggcaagagccacatactcagaatgtccaaacaggggtttaggtctccacacttaaatatgagcagacaaccaaggattctcaggcttttggggaagccctctaatatgactgatagagactaaaacaaatgaacagggaaaaagttagcaaaaagtataagaaaggtaagagaaagctatgaaaaccaaaaaacaaataaccagacaaaaaacaaacaaacaaaatagataccaagaaaatagcttttggagagcaaaaatttgctttgggaaaaaaattacagcatgaatggaaaaatccaaagaagatttagaagatatatttaaagaaaatttccagaataatgagcaaacaaagatataaaataagggtaaatataagaacatttaatggccaggtgaggagttctagtttctaaataataggtatagaaagagagaaagagaaaatggaaggggcaataattattacatattttaagaaaaagagtccagaattgaagaacataagttttcagattaaaggagcctattaaatgcccagcacaatgaataaatcataacatatcaaaacattcaacacaagtatataagactagaagtttctagagaagaaaactgttacatcaaaaggatcaggcatcaaaatagctctagacttctcaacagcaatgtgtgaaaaggtagaagataagagcaaagccttcaaattctgaaggaaacaatttccaacctagaattcaatagtcagccaaactattagtcaagtgtgaatacaataaaaatatttttcatggatatataatatttcaaaaaatatatctcccatgcaatccttcttacaaagctgttttaaaatgtgcttcagtaaaacaagaaagaagggggcactgcatgcaagagccaggaatctatccttaaagaggcatgaaggaaatccccagggtgatggtgaagggaataccaggaagacagctgtgcaggaatagagataaatagtccagactggattatgtctgaggagagacattttcaggaagatgacaatgtgcctgatgcacctgagcattatgaaagggaactagacaactggagaagggtttgggattggattgggaaggagatgtagaaaagtcaacatgtgtaaacaagactgttactaattccagggaaagccaaaaattgtgcaagaaaagaaaactaatcatagtttactacaactcaattgagcctaccatttctgtattcataataatggaaataccgaatattgatctaattaaaattattatgccagatgtattagaaagatggaggcatgttgggataaaaccaaaggagcaagaacatgagctaaatccccatctaccaccttgaatattcaataactaatgcctaaaatgaaaaagaaaggacaataaaattatactctttagggacatggtggagatcacccaatgcatatctaaagagaggtaaaagtggttgctccttggctgggagagattagaaggggggtaagtagatcataggactgccattttctcctttttaaaaaataacaaatcttttagaactatttgattatttaagctatataaagatatagatagttatggacacaaaacttgaaaaaatgaaaacattaaaaagactgaaatagagcaaaatatgaatcgtggttatctttagatggttttgtttttcttctttatactttgctgtattttttatactgatagcatattcgttttatatatatgtgtgtatatatatatcttacaattatatatacaattttatatatttttatatatatttatatatatactcttcattgtaaacaagaaattgaagctcagaaaagtcagataaatttcctaatttcaaatatcttgtaaatggtacagctaggattccactgcaagtctgtctgatgtgaaccatttttatctttcatcaaagcattcaatcttcgttaaaatccgagaggcaaaattgtcatgcctcaccattctctcccatctctgaaggtccatagtgcctcttttgtacaccatacaaaataacacttgattggtttcattatttgtttacttatttgtctatctatacatttattcatattcatctaattttagaaagatgagagaatggattccaaaggtacatagattatagcaaaataaaataaagttacaaaaatgaaacaagggacatttgattattcaggttttgttttgtcagactgctaaatgaggcacactcagttttccttctctgcttggggagggtaagtgtcctgggactgagtcccaagcttcttatgtttttccatcagtgcctaggaaagtcctgggtacacagatactcaatgaatgtttgttggtttgacttgccagcaaagccgtggctcctagggaagtgacttcagcttctttatcttcttggtgtgactatcttaaaagggagtaagtgagcctttctttgtaactgactgtatttgagaatgcagcatgacagacaaaacattcatctcattcatggagaattgtaaaatccagcagaagagctctctttttaaccagtgcttacaatttgtcctttttcacccttccttggcaaatcacgcaatattccttcttaaaaatgggtaaagtgccagccgaacttagaagagggactgattctatctctattctgaccaggtatacggtagactgtaatttaatgtcagcacctttctgttgccataatgaggtatatttatttctgttcaaagatcatgcagccctgacaaagcaaataccctctgactcccactgttaattatccttcagttgctacagggttttcatccatgtcctcacttaggagagttggcggttgtgaagcggatggagtccacaatctcagtggcagttcttaatgctttgagctcaaagagtgagtaagtcgatgagtgaggcttttaagatgtaaatccaatatctgcagagaaatctgaagctgtaatattagaacaacattcaaatgaggacttcattgactagctcattaagaagtcctttgataatagcatgttggtaagacttttcttagaaggtacatattataaatgatgatgtgctaagaaatcaacataaaggaaaatagaaaaattttccccaaatccatcctttttctgtagaactttaatgatgatacctcattcctttgtaacttaattttaaaaagttaattatgcacctactatgatacgtccaaaatgtttttaggtgatgtggatatagcgaagaacaagacacacccagtgtcttccttcatggagtctatattcttggcactgttggtcctgtgtgaagtcctaacattattttgcttaatgttttggcaagagaggcaacattggctgggcgtgatggctcatacctgtaatcccagcactttgggaggctgaggtggatggatcacctgaggtagggagttcaagaccagcctgataacatagagaaaccctgcctctcctaaaaatacaaaattagccaggcatggtggtgcgtgtctgtaatcccagctactctggaggctgaggcaggagaatcacttaaacctgggaggcagaggttgtggtgagccgagattgtgccattgcacttgtactccagcctgggcaacaagattgaaactccatctcaaaaaaaaaaaaaaaccaacaggcaacattctgggctgaaacaaaggtaattcatctggtaacaatagcaataacataaatagcagtaataattatacattattgagttcctattctctgccaaaaatggttgataagcacctttgatatggcttattttacctagtcctcattataaccttagaaggtatattgtatctggtcaaaattgaaagaagaaattgaaactcacagagggtaaataattaaagttcatagctagtaagtagtacagacaaacccaaaagcagagtttcatgctcatagtcaccataatgtattcagaaacttttaggactcatcacaatattaaaatcatggaacttggagccacaaaaagtcagatttaagtccaaaccctgaccctgggtaatttaacttttctgggtttatgtaacatatctataaagtagcaataataatattaccacctcatgctgttttggtaaaaagtaaataagataatgtatattaaggtatttggatagtgcctatagatgtatatatgctacttaatagacagtaatgtaattattaactatgacctaagatgtggcacagtgcaggtagcagaagttctatcattaatcatttacagatacttattaaattgcttcaaacccataaggatagaggcaagatggagggggaagtctaagaaattgattgagtcaacatttatataaatacttatctactgagagcttcttcacctcagggtttgggtcactttaaatgcatcctccctgacctcctctgcctggctacctttggaactccaacccattctgcaagacccagttaaaatgctgcccattcctgaagctttcttattttctaaagtaggaagagatttctcccaccttagaactcctataaacatctgcagactagttctaggcagcctttaacaaaatcctcatgggatctttgaaaatacagattcccaggtccagcctccagagaatctgattcagataaggccaatgaatctgaatttaaaaacatgtatttgtgtgattttgatgggtggacacacttgagaatcacgtcaggaccatttatgtggctctcaattacatatacactactttatattgcagttgtttatttatgttatattgcagttatttatttatgtttcatctcttttcctgagaaattaccttcctgataatccaatgcagagataaattaagaaaatctgtaggaaagaatagatcatcaagtcccttgcaacattcttctgaggttgtaataatctcctctaggatgctttgctggatttccctggactaggttgtcttttcctgctactttctcccattacaggtctccctacggcagcactgcttatatcacttggaacttgaatctattttggtaaaaaaaaagttaaaaattaaattatcagaaggatattggggatgcctgcagagtaatcaaaataggatctatattgttatagagccaggcacattaatgccatcagctttagccctttatgttgtgattttactttattccaaatgtcagctttatcctgttggatgtgctgatcttttttctctacattcagccagttccattctcatgttctggaagcttgtgacagagggggaatatgcatttcaagatcagaagatccagagtgaaaatgattggaatggcctgagtcacagttccaatcctagaccaaggcatctggctagggatgtgagagatgatgagtgacagatacagtgacagcaagtggttgatgggatctgagttgtgagagagggtctgtgaaaaatgaaagacctgcataagaagaggagaagcagaaatatgaacattgttgtgagtcaggtctttacccaactctgtgctgcttattctacttttttgtgcaagattgattatgtgtgtttaatagaatgcagtaaagaacagtgttggagggcagctgtggagtccacttgagtgggactctaccactctgccacttacctactttgtggccttgagaaaggtacttaatttccctgggttgcagtttgttcacctaaaaacgtggcaataatagtaatactgtttcagagttggcgcaaaattaggataatatatgtaacatatttagaataatgatgggtattccttatgtaaatgttagatgttagctactgtgaatttttctgttgttccactagactgtaggacccctgaaggcaggcaaccttgggcttctttctcccagcacctagcacaatggctgttacttagtaagcagtcagtaatggtgtgttgttgtcagtgaacacagactgagttcagtgagcaatgtcttggaaagcctctactgcacctaggactttcagctatactgagacagaaaaatgaaatcctctctggactggaaagcagaagccagacatgtaggcaaccaaactgtaactgtttccatgtcgaattgactttgcctttagcgaatcatagcactgaggagtgtcacgtttaagcagcaaatttgtatagcaaattaacatgccaaaaaaggcatgcaagacttttacttgatttttttcccctcctctctggggaatttatcttatttgggtcttatcttggaatttatcttatcttgaacttattcagactgcattggtttaatttgctatcaactggggctatatagtgcactggaatttaatgtgttgtatatgtgaaatatttaccaaataaccacataaccaagatatggaggacctactttaagaggagattcttgcaaagcaccttaaaagcatacactcaataatcacaatggcatgactgcatacagggagataatcagttgttttaacttttaatttaagcagtagcagaatgactttttgggaacttaggaatttggaaacctttttattctatgtattgaatatcaactatgtaatttagtctaaggttatatgctagaaacatttcaaaaacgaaagcagcagcaatgacagcaaaaatgtgtgtcaaaagcaattggttttaaatagaaatacatcattttaacaatcttgaagtttaaaagatcctataaaaatcacaaacccagaaggacaaacaagaaaagattgatacatttaactacataaaatttaaaactacattactgaaaaaaaatctgagacagggtctctgtcacccaggctggggtgcagtggtgcgatcacagcttactgcagccttgacttcccaggcttaagggctcatgtaatcctcccatcttagcctcccaagtagatgggaccacaggcatgcatcaccacactcgactaatgtttaatttttttgttgttgagacagtctccctatgttgctcaggctggtctctaactcctgggctcaagtgattctcctgcctcagcctctcaaagtgctagaattacaggtatgaaccactgagcctggctttaaaagtttttaaaatcaaaagccaaatggacaacctagaaaaaatactcctgagatatgttaaacagagttaatttacttgccatttttaagtgtgcttacatatcaaaaaatctaataactcattaaagatatgtaaaatatatacaaaggcagtttgctgaaaaaatacacatataaatatatgcagcttcactcagcattaaagaaataaagtaaatcaataattcaatctttttcacttgtcagatgaagaacagttaatgtagtagtgttggcaaggtggtggacaaaaagttatttttatatgtttttggtatcaagaatatttgatgcaacatctttgaagagccagttaataatatctgtaaaattagaaaattaacatattctttgcccagcatttctacttttatcaactttgcttgtaaacagacacagaagcccatcaagaatgctcaaagtagttttggtaatcatagataatttttttttttttttgacggtgtcttgctctgtcacccaggctggagtgcaatggcacaatcttggctcactgcaatgtccgcctcctgggttcaagggtgttgcaggaagtcagggaccccaaacggagggactggctaaaaccatggcagaagaacatggactgtgaagatttcatggacatttattagatccccaaattaatacttttataatttcttatgcctgtctttactgcaatctctgaacataaattgtgaagatttaatggacacttgtcacttccccagtcaatacccttgtgatttcctatgcctgtctttactttaatgtcttaatcctgtcatctcgtaagctgagaaggatgtattttgcctcaggaccctgtgatgattagcattaactgcacaaattgtagagcatgtgtgtttgaacaatatgaaatctgggcaccttgaaaaaagaacaagataacagcaatgttcagggaataagagagataaccttaaactctgaccgccggtgagccaggaggaacagagccatatttctcttctttcaaaagcaaatgggagaaatatcgctgaattctttttctcagcaatgaacatccctgagaaagagaatgtgcccctgagggtgggcctctaaaatggcccccttgggtgtggccgtcttctatggttgaaactgtagggatgaaattagccccagtctcccatagtgctcccaggcttattaggatgaggaaattcccacctaataaattttggtcagacctgttgctctcaaaccctgtctcctgataagatgttatcaatgacaatggtgcccgaaacttcattagcaattttaatttcgccccagtcctgtggtcctgtgatcttgccctgcctccatttgccttgtgattctattactttgtggagcacgtgatctctgtgacccacaccctattcgtacactccctccccttttgaaaatccctaataaaaacttgctggttttacagctcgggggcatcacggaacctaccgacatgtgatgtctcccccagatgtccagccttaaaatttctctcttttgtactctgtccctttatttttcaacgcagctgatgcttagggaaaatagaaaagaacctacgtgactatcaggggcaggttccccgacacaagggattttcctccctcagcctcctgagtagctgggattataggcacacaccaccacacccggctaatttttgtatttttagtagagactgggtttcaccatgttggccagggtggtctcaaactcctgacctctggtcatccacccgcctcagcctcccaaagtgctgggattacaggcgttagccactgcactcagcaatcacagataattaaaccatctttcaaaatccatcaataagttaaatattttatggtacatttacacaataaaatacaaattagctacttaaaaataatgagatctatatgtgatggtatgaatggacagaggcaatgtgttatacagaaagggtttaacaatgtatgctcccattggaatgatagtatgttgctattgctgttaggaaggagtacatatatgcagagagaatctcttaaagggtacacaaggatttgttaataatggttgcttcatggaactggaactgcaaacttggaagaggaagatagcttagttttcactgaataattgttgtacttaaaaaaatttgtaatttttagttttcagtggaccagatattttgcttctggtttataatgtctcatcttcaaagtcagctgagttaggtttaattagctccattttacagacagagacattgttatttgaaagattgagtaactagtctaaggttacacagctggtgtcctcgttgcctgttcagtagaaaggtttacataaacagcaaggtgtgctgttctcaatagactcacttatgttcatgatttggtacttgctcaagctggaatcaatttttagaaaaaataaaatcttttgcaaagatttttacctcaaaaatagaaaaaaagggcattcctgccttaccttctacaagggtcttctctgaaattccaagcatcagggtgttataacagactctaaaaagggtttccttttttctttcctttaacattgcttattgcacagcatattgagacagagaagatggtaagtgaaataaaacaaaggaaataaaaagtatcatcactgggtttcagaatcagcatggtttatgctaagggaaagacttggaaaccttgattcaacatataattctaaaaagagacaggaagaaatcccaccttgtttcctctgattctacctttgggatgggtaggtatgttatacaataagaataacattgagatgactgctataaaaatagtggttaagagcctgggtccagaatgagaaaggtggatattgaatttacctgagtgcaactaggcagactcaagtgagttgattttacccactcctccactcaaatactgggtatggctttgcaaaaacattcaaccagttatccacatagttggtcttaactttccatgtgactataatgaatataaacttgctaatgagcagagtgtgattttagtgtttaaactattttttcccgaataatagttcctagatgcagttaatgagccttattgggtacccacacaaaggagatagaattgtctgttggactttttgaaaaactttcttggttttaaaaaaggtacatttctaaaggatttttatgtgtagttttgactaaacaagtctttgccttactttctgtttttaaaatctaacctcaacattaatatgtcactatactggttataaccataacaaattatttcatctctctgagcctgagtaccctcaactgtatacactataaggatgtgaagatagaaagtgacataaaaatgaaacatgtactgaccaccctcataaacagatccctcatacatatagaatgtctgtgcctggttgattagtgaaggaatgtgtactcacccaaaagaaaaactctgaaataagtacttttagatatttactttttcaatattccaagtaattatcacaacattaaggtgcattcagctttgtgtgttaacgtggtatacctccaggcaacttttaggatactgtacagatacaatggctgtgaaggctgggatgaaaagacctgtgcgaagcaggactgaggcacttaaggaaggcctcagagttacatctcctttgcctgttttcttgcaggccacataccctagcccagccctgtcagcatgagtgagaaccaggctctgcctttgcccacactaaaccactaccttcaaggccccacaaagacccagtgtctccagacggtctttctgtcttcttaacactcagagctccatgaaccagaatgaaagttttggaacatgatccaagtaaaagactcaagaagtaaacaccactaaggttaactttgctttagaggttagagaaaacactgcaaggacaccacaccagagactatgaaaaccccaaatgtattgaaatgatgctgattccatttacctccatattgcctgataatacccaggtgctaccatggcagcttaaggtggtatttgctgggagctatgatactctttaagaagtaatagcactactagtaaaagcagttagttccaggcaatattctatgcacatgacccatttcatcttcttataaacctcatgaagaatatattattttcatcctcattttatagatgcagaaagggaagcatagacgtaaatttccaagattacacagctatttattgttggaactgagatttgaattcaggttgtctgtcttcagggactgtgctcttaatctcagtggtcatcaaacttttctgtaaagagccatccagtaaatattgtgggtttatatacattctctattgcatatccattggttttcaaaaataatcctatacaaattcaaaaaccattcttagctcatagactacacaaaaacagattgcaagtccagtttggcatttactgttcctattgatcaagggtttaagaacatagtgagtacactattccacattccccttaggcaaatcctgtatgtttatagtactgttagatttctgttgacaaaataatccacaattctgacttcatctctctctctctctctctttctgattttgtttgaatttatgaggtttagttgcattttcaagttagtcttcctgctaacgagtgattcttttgttgaacatttaaaaagggactgtcaggattgaataagagaacctcttccagtcacttttttttttgagaaaggatctcacctgttgcccaggctggtgtgcagtggtgcaatcacagataactgcagcctcaacctcttaggttcaagttccccctgcctcaatttctgagtagctgggactacagatgtgcaccaccatgcctagcaaatttttaattttttgtagagatggggcctcactacattacccaagctagtcttgaactcctgggctcaagcaatgctcctgcctcggcctcccaaagtgctgggattacaggtgtgagtgactgcatccagcctcttatagtcacttttaatctatcattggctttcccattagattgtactgttatacaaggaagtgacttcagacagtatggcactagactagaggctgtgtttttctttaataaaggcataaatgagatgaattgctctaaggctttaggcttgtcccttttctgagaagtgacctttgggaggtcacatttagttaaagcagttttgctagtataaatttaccaggatcctgacatgtaatcctgtatcattttcagtaaggttaaaatggtatatgaaaggaggtggttcacgaaatggattaatatcaacatggaacttcatgctttctaggtacctgctgcatccttggagattcaaaatgtcatcatggcattctaggctagactggcagtggagaaatcactgtgagttattggatttgctcaagataaaatcttgaatttgcaaataaatcctggtcagctttttttaacactcttgtggtaaataatacacaactcagattcatgtaatgggtgtaagaaaatcattgctttggttatttcagtatgaaactcaagagaaaacttactgaagtgtttttaaaattattctgaccacaacccaaggtaaaacataagccaaaaaacatatcatgacatagtaaatgaagccaggattgtatatatatgtctactcaagtatatgaaatggaaacaacagtttcagaggcagtactatgcttactacatttgaggcatttctggtattttctattctatttaattaaatttttagtacttcttattttagctacatttatttcataactcattaatgggttttgactcacagctcaaaaacactgccttagagaatccaaatgttcacactatccatatttataagaagtaattgttctggggttcttgtgtattcttatagcttagtttgatttatttgctaagacctggctaagtgagaactgcaaagagttatgccttcaactacctaagccaggaattttctgaggtggcaggggaaccagggtgagcagaaggacatatcatccccaccctcattaagcttatgctatagtggatgaaataaactcagaagtcaaggagtttcagaagagaagtcattcccttgagtaactatgttaagtacgtaaacagctttagtagtgctttcttagtacaaggtgttttcttctgatctaggagagtcagtccaatttttttcttttgagaaaatggaggctcaaagagtctgtcatttatctccagtctcttcattattttgagtccaagtacaggattatttgtaatatacatgctgcctcacatgactaagtgggttttgtgatagaaagggaatttggagttgagaagagaaagtgatgattaagtcacatcattaaaatgtttgactctcagatatcttggaaagactttgaaggcactctagccaaactttttccttcagaaggagcttatctaattattctagataatagagaaaaactaggtcttttaaagagacaaattatataccatttagtgtttcacaatattttctgaataaacttaaaatcccttatttggaatttaactcatctaaatccttatttcaaaaaccaggaaacagagtcaaacattttctcagttatcaaggcagtaaaccaaagattgtcacctgcacaggagaatctatgatttgttcttctcatcattatacatttcacgagcattgactcaaaaaaccatgctacctataaactaatcaacaattgcttcttctagggactgaaattttaaaatttcagacgtggaggatcgactctacttcaaagcaaaattcagtggacttctgcacacatatccattctaatctgttacaagtctgcactttggagattagttcatgctacacacttagaggtgtaatattttcctacttgggaaaattgaaattacttagatacaaaagagtggttgtagtaagaaaataggcaaggagaacattttaaagtgctgatcctcggtaaagccatacataggatgcacctgggagcagatctttctgaagtcattctgtgctcagagatgtttctccttaccttgctgcctatgtcaaattctctgtgatatgttcttagagccccatgacctctcttcttaacttgcagtgggagcttgaattttccatttatttttgtgaccatttagtctataagagtctccgtctttacagggccctcacttgactacagactccataaaggcagagattctatttttactctattattactgtattcccagcactaagcactaggattaatacatagtaagtgttcaacagatgtttactggatgattagattggcattttaaggtagtctgagatcacgttttagacaagatacttcagtttagtccaatctttattatttattagctactaaagagaaattgataattactcatgatattcttcttttttgttttacagtcaactttgaccactttgaaattttgcgagccattgggaaaggcagttttgggaaggtgagaacaaattgaaatgattaaccaccagcagggttatgtagcccagggaacagagggtccagaaatgttcacattattgagttgctgggaccgcaaggaaagataattaagtgaaaatgtttttgtaatggatttttataaaattgtcaccacagtttaagaaaagcgtgtgacaggcagctacataatgaacatatactgttgtcagaataatctcattaaactcaaatctgtttactctcagtaaactttaaggcttttctctctaccctaaaggagatgaagatttcagaatcattttcagattctaccagctgtatgcccagtaatagttatcttgtttatggaagagttacttattttcatgtgggaaagaagtcatccgatttctatttgtttcctcatttgtctaatgtttttatcttaagaaaaatacatattcagtttaattttttttgcaagaaacttctgtattcaaaccctgattactagtttctcaatggagacatactttaagagaataatatttcatataaaacttgcattttaaaatcattttctgtttactttttcaggcattatacagacctctaaagaaatttcaaaaacatggacatcatatttagtgtttttccagtccttaaagtcctttttggttatatcatgtatggttgtaaacagaaattctttgcacagtattattcagcttgacagttcagtcatgtctatttcagtcactcaaagcaggattaaggatgttacttgttattggaatattcctgacatggaggcagctattttcaccaaaatgctgtcttaaaagcccaaaaagcaataccaggcaaaattgtttgagaaaaaagagatccaagaattgaactggtgcatagaaaagaaaatgaaatttttaatctaaaatcagagctaagtgggagcttttaacatcatataatttgcaaatgttaaggatccaagccacagcaaagaacatgtcttgttctgtctctcatcaccatgatccattatctccctaatcactctctcactcgggttttcaccattaggtctgcattgtacagaagaatgataccaagaagatgtacgcaatgaagtacatgaataaacaaaagtgcgtggagcgcaatgaagtgagaaatgtcttcaaggaactccagatcatgcagggtctggagcaccctttcctggttaatttgtggtgagtaattttactggacctctgaatagagacactcctgttatcggtgggctaggggaggtccccaaatgcctctgggacctcagccctggctggtatccaggctcttgacacaattgcaagaaagagttcaaggatgagttggaaaacagtgaaagtacagagatttattgcaaagtggaaaagtacacactcaagagaggggagcatgggtgaactccagcgaatgtcatgtaagggggggtttgaggctgctgccataatgggtttctttaaccaaggggtgaaacattcatgatgattcctgaaaaaagatggagatttcttggaactgtggtgccagctatttttacaccaaatatgaatgttcctggaactgtcatggtgctggtgggtgtatgatttagtatgttaatgagtgtatgatgaggtcctaggtgaaacctaggtcaaatccagcacaatggagaggacccacagactctctgaaggaaacgactgctcctgcaggacccaggcaactcccccaaaactgtgagtaccccaactgtggaggtgggaaagagagaccctcctctcccaaacacacacccccactggagaagctgaaggtctgtttgctggagaagtttctgactttacctggagctgagtggacttgaagagcccagtgaaatacacggggagaagaagcagcagaaaggccctgggagcttgctgggtccacaagcaggccattcctgcctggcaccacagggatccaatgggagaggagcgggggtaaaattccatagggagaagcaaatctctagctgaacttggtgacaatttgaacagggtgagaaagcgcctggccagaactcaggagagggcacaaatccagtgtgcagactccgggggcaggggataaaccaagctcttttatttcccagctgggagcggggagcctggggcaggttttcaagcaggtattgcttctctacttagaaacaacctgggagctgtgttggcgggggaggggggttggggatgggggaggggggtggtggaaagcacggtgggagtgagaccggcccttcggttttcatgggagctgggtgaggcctgtgactgccagcttttccccacttcctgacaatctgcatgtttctgcagagacagccataatcctcctaggtacacaactccagtgacctgggaatcccacccccattccccacagcagcagcagcagcaaggcccacccaaaggagtctgagctcagagacacctagccctgcccccacctgatggtccttcctactcactctggtatcggaaaacaaagggcatataatcttgggagttctagggccctgcccactgccagtttctccccataataccaaagctgatgctctctggaaaagcaccacctcctggcaggaggacaacagcacaaaaatagaatattaaccaaagctaagaacccttacagagtccattgtactccctgccacctccaccagaataggcactggtatccacagctgagagactcatagatggttcacatcacaggactctgtgcagacgacttccagtaccagcctggagctgggtaggctagctgggtggctagacccagaatagagataacaatcactgcagttcagctcacaagaaaccatatccataggaaaggaggagagtactacatcaaaggaacacccagtgggacgaaagagtctgaacaagactttccctctgaaagagcctacccaagtgagaaggaaccagtaatatgacaaaacaaggctcttgatgccccccaaaaatcacactagttcaccagcaatggatccaaaccaagaagaaatccctgatttacctgaaaaagaattcaggaggttagctattaagctaatcagggaggaaccagagaaaggtgaagctcagtgcaagggaatccaaaatatgatacaagaagtgaagggagaaatattcaagcaaatagatagcttaaagaaaaaacaatacaaaattcaggaaactttagacacactttaaaaattgcaaaatgctctagaaagtgtcagcaatagaattgaacaagtagaagaaagaaattcagagctcgaagacaaagtcttcaaattaacccaatcaaacaaagacaaagcaaaaagaataagaaaatataaacaaaactcccaagaagtctgatattatgttaaatgaccaaacctaagaataatgggtgtccctgaggaagaagagaattttaaaagcttggaaaacatatctgagggaataattgaggaaaacttccccggccttgctagaaatctagacatccaaatacaagaagcacaaaaaacacctgggtaattcatcgcaaaaaggtatttgcttaggcacactgtcatcagattatccaaagttaagatgaaggaaagaatcttaagagatatgagacagaagcaccaggaaacctacaaaggaaaacctattagattaacagcagatttctcagcagaaaccctacaagctagaagggattggagccctatctctggcctcctcaaaacaattattagccaagaattttgtatccagtgaaactaagcatcatatatgaaggaaagatacagtcattttcagacaaacaaatgctgagagaaattgccattaccaagtcaccactacaagaaccgctaaaaggagctctaaatcttaaaacaaatcctggaaacacatcaaaatggaacctctttaaagcataaatcacagaggatctacaaaataaaaatacaagttaaaaagcaaaaacaaaaccaaaaaaatctgcaggacccaggagaccacccccaaaaaaatgtgagtgctccaactgtggaagtaggaaaggaagagcatcctttcctgaacacacacccccactggagaagctgaaggtctgtttgtgggagaacagctttagctcttttttggttttttggaaaaaaacccaaagtacacaggcaacaaagagcatgatgaatgcaacggtacctcacatttcaatactaacattgaatgtaaatggcctaaatgctccacttaaaagatacagaatcacagaatggataagaactcaccaacctactatgtgctgccttcaggagactcacctagtacataagtactcacataaacataaagtaaaggtgtggggaaaggaatttcatgcaaatggacaccaaaagcgaggaggggtagctattcttatatcagacaaaacaaactttaaagtaacagcagttaaaagagagacaaagagggacattatataatggtaaaaggccttgttcaacaggaaaatgtcacaatcctaaacatataagcacctaacactggagctcccaaatttataaaacaattactaattgacctaagaaatgagacagacagcaacacaataatagtgaaggattttaatactccactgacagcactagacaggtcatcaagagagaaagtcaacaaagaaacaatggatttaaactataccttgaaacaaatggatttaacagatatatacagaacatttcatccaacaactgcagaatacacattctattcaacagagcatggaagtttctccaagatagaccatatgataggccataaaatgagcctcaataaatttaagaaaattcatattatatcaacattctctcagaccacagtggaataaaactggaaatgaactccaaaaggaaacttcaaaaccatgcaaatacatggaaattaaataacctgctcctgaatggcattgggtcaaaaacaaaatcaagatgaaaatttaaaaattcttcaaactgaatgacaataatgacacaacctatcaaaacctctaggatacagcaaaggcggtgctaaaagcaaagttgatagccctaaacgcccacattgaaaagactgaaagagcacaaactgacactctaaggtcacacctgaagggactagagaaacaagaataaaccaaacccaaacccggcagaagaaaggaaataaccaagatcaaagcagaactaaatgaaattgaaacaaaaaaaaaaagaaagataaataaaacaaaaagatggttctttgaaaagataaacaaaattggtagactattggcaagattaaccaagaaaacaagggagaaaatctaaataacctcactaagaaatgaaacaagagatattaaaactgacaccactgaaatacaaaagatcattcaaggctactatgaacacctttatgcacataaactagaaaacctagaagatatggataaattcctggaaaaatataactctcctagcttaaatcaggaagaattaaataccctgaacagatcaatagcaagcagcgagattgaaacggtaatttaaaaattaccaagaaaaatgcccaggaccagatggattcacagcagaattatatcagacattcaaagaagaattggtaccaattcttttgacactaaggaaacctccctaattcatcctatgaagccagcatcaccctaataccaaaaccatgaaagaacataacctaaaaagaaaactgcagaccaatatcactgatgaacacagatgctgaaatccttaacaaaatactagctaactgaatccaacagcatatcaaaaagataatccaccatgatcaagtgggtttcatatcagggatgcaggaatggcttaacatacacaagtcaataaatgtgacacaccacataaacagaatttttaaaaaaatcacatgatcatctcagtaggtgcagaaaaagcattcaacaaaatccagcatccttttatgattaaaaccctcagcaaaatcagcatacaagggacataggccttaatgtaataaaagccatctatgacaaacccacagccaacataaaactgaacacattccctctgagaaccagaatgagacaagtatgcccactctcactgctcctcttcaatgtagtactggaagtcctagccagagcaataagacaagagaaagaaataaaggtcatctaaatcagtaaagaggaagtcaaactgtcactgcttattggcgatatgatcgtttaacttgaaaaccctaaggactcttccagaaagctcctagaactgataaaagaattcagcaaagtttccggatacaagattaatgtacacaaatcagtagctctcctatacaccaacagcaaccaagtagagaaccaaatcaagaactcaatcccttttacaatagctgcaaaaaaaacaaaacaaaacaagacaaaacaaaaaaacaaaaaaaaaacaaatacttaggaatatacttaaccaaggagtagaaagacctctacaaggaaaattacaaaacactgctggaaggaatcatagatgacacaaacaaatggaaacatgtcccatgctcatggatgagtaaaatcagtattgtgaaaaataaccatactgccaaaagcaatctataaattcaatgcaatttccatcaaaataccaccatcattcttcacagaattagaaaaaacaattctaaaattcatatggaaccaaaaaagaacctgcatagccaaagcaagaataagcaaaaagatcaaatctggaggcatcacactacctgatttcaaactataccataagcccacagtcaccaaaacagcatggtactggtacaaaaataggcacatagaccaatggaacagaatagagaacacagaaataaactcaaatacttacagccaactgatctttgataaagcaaatgaaaacataaagtgggaaaaggacacccttttcagcaaatggtgctgggataattgaatagccacaagtaggagaatgaaactggatcgtcatctctcaccttatacaaaaatcaactgaagatggattaaggacttaaacctaagacctgaaactataaaaattctagaagataacattggaaaaacccttctagacattggcttaagcaagggtttcatgaccaagaacccaaaagcaaatgcaataaaaacaaagataaattgctggtacctaattaaactaaagagcttttgcatggcaaacggaagtcagcaaacagcccacagagtggaagaaaatcttcacaatctatacatctgacaaaggatgaatatccagaatctacaatgaactcaagtaaatcagtaaggaaaaaacaatcctatcaaaaagtgggctaaggacatgaatagacagttctcaaaagaagatatacaaatggccagcaaacatatgaaaaaatgctcaacatcactaatgatcagggaaatgcaaatcaaaaccataatgtgattccaccttactcctgcaagaatggttataataaaaaaaaatcaaaaaacagcagatgttggcatggatgcagtgaacagggaacacttctacactgctggtgggaatgtaaactagtacagccactattgaaaacagtgtggaaattacttaaagaactaaaagtagaactaccatttgatccagcaatccctctactgggtatctactcagaggaaaataagtcattattcaaaaaagatacttacacatgcatgtttacagagcacagagttgcaacccaaatgcccatcaatcaatgagtggataaagaaactgtggtatatgtatacatgatggaatactatgcagccataaaaaggaatgaactaacagcatttgcagtgacctggatgagattggagactattattctaagtgacgtaattcaggaattgaaaaccaaacatcatatgttctcactgatatgtggaagctaagctatgaggatgcaaagcaatgagaatgatacaatggactttggagacttagggggaagagtgggaggggggcgagggatacaagactacaaatgtggtgtagtgtatactgctcaggtgatgggtgcaacaaaatctcacaatcaccactaaagaacttacccatgtaaccaaaaccacctttaccccaataacttatggaaaaataatccagcaccacattaggtttagtcggacttagccagcttggcttacaccctggtttttcaggttcttatcattcccagtttatgcagctgtttcaacattttccttttgctagtcatgtgaaactgctgtctggaattttcttttctcctgctaccaccctttattattcctgtctcactttcatcttcatccctactgttacataaatgcatcttgatttctaggcaagcatttgtcaaattctcattaggatcttcctcagggtcttttgttctccttagtttctttggctttatagtgaaagaacatttttcttttattgtcactaacaaatacttcttggtcagttgtcacagttccccttgtccttgaggtcaatatatatatatttttaaacattgtaattaaatatgctgactgggaaggagttcagatgtcttactagttattagatactttctttccccatgaactgcacgggaggaactttggttacaaagcttggcctcatcagctgacttgaggttgatatttagaatttatacgaagcactttctcccttaaaataactggcaataaaactgttgctttgtagcgtatttcttaggcagccacatatatacctgtaagttagacaaggataggtgcttcctttgtcaacaaatagcttttgcagagctgaagctaacttgtatcaatgactagacattaagtgactgtgatctgcgctccaagctatttccataatccaaggcatagaaaatggcagagaagcttgcagtatctgttacctcctgttcttttcttgtgtgtcaaggtctttgtgtgtcaccttcattttattttacattttaatgcgtccattatgttaagtggtgtttcttaaagctaattcaggatgactgttatttaaatatgcataccaagaagttctgacttaccagcaaagaaaaaaaagggtctttattcagagaatgctaatggaaaaataattgaggttttactctgtgtttagggacatccttctggagaaatcagtacataaaacctgcctccatccatctttaattattacagttcatttaatatacaatttgctcaaagcctctatgccacagttgaaaagaagatggttttatgtgacttggaaataggtctattacagtttatgcactactcggatatggtagagtctaatttcagcttaagctcagtgtatttaatcagtatcttagagtggcctattcaaaatgctgccatgtaaaaagctaaaatggatgcagctctttcttccctacccttagcaatcatcaaattgcctttcttcccctctctctgcatcctgagaatgacaagatactgtcacttcacaacctccctttgttcaaagtcacatttttcttcttaaaaagtttaaccaactaatttttttttttttaagaccagggacccatgataaggccttagcattttaccttctcatatttgtctttcatcgctgtgtgggcaaagttgatttcattctgttcctttttttaagaaaatgggtattgtgaggctttaagctggccaaagatgatagattttgctgtttgctaatttggtgtcattccagacaacattctgttctccatgcatactgacctggtgataacatgacatataacctattctttccttctcacttctcacattgaacctcacagtggaacactaggcatcattaacaatgatagaagaaagagaggagacttacctccacccagtgattctggtactacattcaaaactagaaactaactgggagggggaattcttaaagtacaacagcaactccctttgtcttccaaaccatgagaaaaatcttcacaaatctgtatcattcttcctaataaatgctttttgttttagtaagtacaatatattcaatgtaagtttatctttccacatttataaaccatcttgcagtgcttttgaaggtgtgattgtgagtgtattagtcagttctcacattgctataaagaaatacctgagactgggtaatttttaaagaaaagaagtttaagtggctcatggttctgcaggctgtgcaggaagcatagtggcttctgctttggggaggactcaggaagcttccaatcattgtggaaggcaaaaaggggagcagggcatctcacatggtgggagcaggagcaagagagaggaggagagagtcactacacacttttaaatgaccagctctcttaagacctctatcacgagaacagcaccaagaggatggtgtgaaaccattcatgaggatccacccccatgatccaatcacctcccaccaggccccacctccagcattggggattacaattcaacatgagatttgggtggggatagagatgcaaaccatatcagtgagtaatttacttcatcatttttaagtcacatggttataagatagggttaatgtgtgtaactttacatttataaatgaaatgaataaagtgctatggccagtacccagcacatagtaacaggtgtcttacaaatattcgttctttccttccttacttcatgaagttatgacattctgaacttgcccatctcctatggttcattgtggacatccaaaggacaaatctaaatggtgcttggccccaggacatcatggaaagctgtatgtgcagtgtcaagggggttatcttcaactcattctctataagagcatatgttgcttgttttgttttgttttctatcctcattctgcaaattaaacaaacatcaagactccccaatatattgtgtgcaatttaatcaagattttatgtcctgagtttaactattagatttatctttaccacccgaaagcattaaaagcttaagaagcattgtattatttataaagtaacagcaatacttttaaaatttctgccttctttgtgtactctattttatggatatgctgtgtaggcctctcaataatactttcaataatctcattcatgctaaaatgcccctagcttctggagatttataaaattctagttttcaggctgagggtaaacaaattgttccttttttaagtgagttaagattaaaaagtttgtgtgtgtgaataggtataaatgtatacatacatatgcatatatttatacatttatacctatacacacacaaacatatgtttttcaatatcatatatatgtattatatatatgaatatcacatatatatgtgtgtgtatatatatatgtgatatttgaaaactcttctgctcattgcagtcaacttgaaaaacagaaaattacctagaaaaatgaaaattcttcaataattcttatcaccttgtaacaatcacttctaacatgttggtgtatgcttttcagtaaaatgtctgcatttgattttctgtttttgatcatgcattagcctcaatcattccttctttcacctatatgtttactgagcatcgaaaacaagttataatttgattgctaggtgaaatacaagatgcacagttatatttgaatttcagataaacaaccaataatttttagtatatggcccaaatatcacgagatatatttttactgaaaatttttatttatctgaatctgaagtttaattatgcatgttgtacttttattggttaaatctggcaatcttaactgtagtagaaacccatgctatggggatatcttggtgagcagaaatagacggagccctgatattaatcaaatggcacatgaatatataaactgtgagaagtatataaagagagtaagtatgaagaactgtgtgtgtggtgtgtgggtatgtatgtgttggggtttcagagaaagaaggtaagtagtctgggggcagggacgttaaggaggaaagaacatttggaaataaaattcaacctgacttgcctccagggacctggctacactcaggaacagtcttcaaatgtaggccatgttatcaagtgaatgctgccagacagggctggcatccaggaaaagtaaataaaatcttcttgtgcgtctgtctctgagggctcttcacaaagccctggcaacccacagcctgaaaacaaataggccccagtctttcccagcatagttgattccccaggtggcttttgttaattgagattaaacctgtagctgcacacaactcctcagggcctctatctctttactcatgtctttgtccctgtggatagaaggggtccacatgtggtttcaggaaattaggacaccagatcatctgttttaactggaaagaactacctgtactgagagtgtgacaaggtcctttcagactctgaacatagcccaataaatggtatcaaccttaaataacgagattctgaaaatatgattaagtatcgagtttgctggagcccagagcttgaggatgcccacctgggagcacagattcactttgcccagaatgtacactccaattagcagcagttataagtggggttttaagaaaaaaagacaaggcagttcctaagttatttaccaaaaatttacattaaaataatgtaagctattgatggactatacattattctttatatcacaaattacaggaacacaaagataatgggtgaggcagctagtcaggaacaaaatggctttaaaatactgtccttgagcatgggtttgaggctgtgactgacatcccatactcatgtttctctaaacctaataaattgtgcatatctcatatagctcagactgctctgagctatttttgttttctcatttccccccttttcatcaagattttgcaaagaaagcattgtggatgaacttaagcagttttggctccttttatgttcaggaacttagtcctgcattgctaggaagtcttattcccagatggtcctgtcccacatttgggggaaggggaaaggatgagtcttagtggggattttaacaccatcagaagcaaaattgggatggcatcgcagggtgccacaaatgagacctcacccaagtcactaatttatgtagctactgttgcttgtgggatcatctccaggcttcagaataccatgcagttagttttctcggaataagtaaaacaatgagctatacatagtagaaatataatacacataacaattacaattaaaaaaaaaaaagaatttctatgcctgaatgaaaaaaatatctattccattggaaagtcaactaaaaacatcatgaagaaaattaaaatccagtcctttcttagagacttgttgtagcaggaaataattcaagatttagatcaaattgtaggaaaataataaaaactagaaaacaatggtcagggctgaatttaaaaacaggtgtgctataattttcttctgaaccataatttctctctcttcagttcactatttctacccaagataaatgttatcaggaccaacatacttgtaaaataagctttagtattatatttggcctaattatttgcattaagtgcaacaaaaataatgaatggccatgtacgcatttttaagttggctttgctggaactttttcataaggaatctcagattagacttttaaaagcctctctaaactagatattgaagccaataattcaccatcaaactgcctgtagcatctacataaattgggtgaatttctcccttcttcaggttctgaaatatattgaggtttctaggcctgtcaaatgatgacattctttacttactgcaaggtcaaaaaacttgtgagggtaccatgtagacaaggtatcaggtcagttttccaaaaggactattgatttggctctataaagtcaacttcaattcatcaaagcagtttggtcatatctgaaagtatgtcatttcacccaaagccttggtaaaatgaccagccttagtaaaatgaccagtgtctccaactgtgtactgttacagaagaaaacaggttcttactgaacttacacaaataacaatattgccataaataaagagtattcacaaatagtttccaaattctggaggaatcaggtagagagtaagatgtttcaattttgctcataaaagtatactttacttaattgttgtaagctctaaatagctcaaaaaaaattcttgactttggaaaacaaaacaaaaagaatcagcaatgttccaaacaaaaaaagtcattaaaaaaatttcagtcctggccaggtgcattggctgatgcctataatcccagcattttgggaggccaaggcaggtggatcacctgaggtcgggagttcgagaccagcctgaccaacatggagaaaccctctaaaaatacaaaattagccagacgtggtggcacatgcctgtaatcccagctactcgggaggctgaggcagaagaattgcttgaacctgggaggtggaggttgtgttgagctgagatcacatcattgcactccagcctgggcaacaagagtgaaacttcatctcaaaaaaaaaaagaaaaatttagttctctatcagttcagttccatgtagttaactcttgttctgtttgatattgggttagcaatcttcacgaactgatgaacttttatattagaattctgaaagtttttacataatccattgatatgatttccaaaaccttcagaaacttgtattcgagagtacttctcagaatccttttcatgaatttccttgaaggataagcaaattttggactgtagctgattataaaccactttttatgaagaatctaagtaaaataataattgtctgtagatgacaaaagacttaaagcagtcttagttaaagacacaattgaccaggaaatttggttatgcctgtagcatacaacaacttgacataacaatcgtaattattactgatcatatataccaaaacatattggaacttttggaatctcattcaattttggaacagatattaatcatattaatacatttatacaaatatattcaaagaaagttaaacatcatttcttatttgacaatgctttctgtatgatttaaacatatcaaataagcctgatctgcctctctgtaacttctaggggacctcatatctgaaaagttatttcgaggtaaaaaaaaaaaaaaaaaaaaaaggactaaattttaatttgaaatatgattttggaaagtttgtcaaatatcaaaggtttaaaaaacttactcaaaatatttttacaggtcactgtaaaataatagtcatttatttagccaaagtgataattccaagatttcaaaagcaaaaacttttactatttggtagaaaggagactgcgttcccaatcaagagacctaatagggacagcatgaggcaaactcttccctcctttttataaggaatctcagattttaccttaaaaagcctctcaaggctaggtatctttgagaggttacctttttttttttctgtttttctttttgaagtttaatcaaaaggcaaacaaatcttttactgtctcttattaatactatataaaattcttattcaaaggagaatgccaaatttatattagtgtgttgtcaatactaaagctaattttaattaaacattataaacaaatccatacaatctcagtcagctttgactgcagaagataagattttcataaatcttttataacctattacaattttctattaaagagaagatcaatgtttcaagaaaaccctgtggttccaaaagaggggcccagactctggccttgcaccagtgagcttttgagattaatgttcactttttagaaaaacttataaacaattctcttctaattttagccaacttgatcacacacaaaattcctttcacaagattaatcttccataaacccacaacttgcttaaaccttcagttttgtcctatacttcttttattttgagacggagtctcactctgcccagcctggagtgcagtggcatgatctcggctcgctgcaacctccgcctcctgggttcaagcaattcttctgcctcagcctcccgagtagctgaaactacaggcatgcaccaccatgccgggctaatttttgtatttttagtacagacggggtttcaccatattggccaggctggtatacttcttttttagattggcattctatcttaggacaaaatctactttcctttctcccttatcattttgaccacacaatgctctctttcatgcaaatgaaaaattactgtcatttcaactccctttaccaaaaacacatcttaatttctttatataccttatgtatagaattgtctctcttatatctagtcattttttttttcttttttctttttttctttttgagatggagtctcactctgtcgcacagactggagtgcaatggtgcgatcttggctcactgcaacctctgcctcctgggttcaagcaattctcttgcttcagcctcccaagtagctgggactacaggcatgtgccaccacacctggctatttttttgtatttttaggagagacagggtttcactgtgtttgccagggtggtctcgatctcctgaccgcatgatctgcccgcctcggcctcccaaagtgctgggataacaggcatgagccaccgcgtctggccatatctagtcatttaaattacatacgataactacaattttaactcttaggaacgctaatttacagtgaaatctgaggaagtaattttgagctgttttatgccagtatttatagatgaaaaccatttcataatttttataaagttgtttcctcaattattttgtttattaacagatctaaatatatttagcttttctacaccatataactcagacattttatggttacacaatgcttaatttaacatgactttacgatttagttactgaaaaagatttttgaaactgaaaagttcatttatacacttctatctcatttacattcatttaatttagtttattcattcttaacaattatgcttgaatagttcattaaacaaaagtagccaccatcaagttatttctttgttaatcatttttatagcctgcaaatgtcaggcagttgccacctaagcaagaacccgaaagctaaaacagagatattttgctgatcagaaggcacggtggctttcattaaaccaacagtattaactggtcttatttaccgaagatttacccaagttatgtgaactaaaagggatttgagttactttctatttttctgataaaatatttaagtgtttcctttctcttttggccaattagaactcattcatatatttttgtaataaattttacatacacatgacacatataaacatgcagacacacacaggcagattttatagctttgtaagtttcttcatttgccagttttcaatagtttctctcccacctttagactgtcaagccctaaacaattgttagctaggcaaccttaaatttgtacttctaaagggatgactcttagctgaaacaaagtaaaaaaaaataaaaattacacttcaaaaacacagagcggagctcaaactaagggagcaggtgtatataggtaaaggtccagttaagacaagatggccaaggaaagcatcttaagtaaaggtaggacttgtatagatttaaaccaatgttaaatttctcatgactcagctctccctctcctccaggtgcacagaggcagaaacccttacaaatggagatttcctttatcaatgtaaatttcaatatagccagctaaatgccagcaaggtatattttggagaactgttagaggcagtgaatctgtatgtgtctgcagcaacttcaattcttgcctactctcaaaataaaaaattcaactgaggggcataaggtagaatgaaagacagaggcaatttttagagcaaaagggaaagtttattttaaaagttttagagcaggaattaaaggaagtaaagtacacttggaagagggccagatgggcagcttgagagattcaagcacacggtttgacctttgacttggagttttatatgttggcaggcttctcgggggttgttgcttctcccctgattcttcctttggggtggactgtccgcatgtgcagcagcctgccggcacttgggagaggccgcatgtgcagtgtgtttactgaagttatgtgcatgcttacttgaggcatctttttttccttaccagttgactgttcctagaggaaggtcatataccagttaaactctaccatttttgcctcttagtgtgcatgcttgagcctactcgcccacctcctgagatcttatcaggaacctactgatcatcagtttcagggtttttctatctactgggagattgccttttcctggcgccggctgcaaccaaatattatttgagagagacagtttaacaaccacctgaccatcacctaatggttgtctgacattccttggtggaggttgggggtgatctcctgccttgcccatgtctgcctgcctactgtaacagaccaacttagttaaataggtgggcttttcaacttagtttgtttcttggtgagatgactgacatcattgtgaagctctttaatgaacagggcaaagaaagccttctctatgcctggactcggcatggacagctctgggaaagaagaaagcctattttacctgagggcctatcttttataaatattttgttcaaattctttcttttaaaacaaaggttctttttcaatgacttaccaaaccaatacaccttaaccaaggttatgtctaaaccaaggatcaactaggcatttccaaagagtggcaaagtagtcctcacaagatccagaaccaaagacagctcaaagaaacaaatgtcttgctcactgcaaatagaatacaacccatatttctgtccagccgtattttcaaggatctcagcttctctgttgagcacctactcacggaggccccaaagccctatatgccccacagatagagacaggaaatcaaaagctgtctctggaagggaaaagaatcaataacaaatgggtacctcagaaggtcaagagttatacaaatgattttaaacaaataggactgctttcctgactgggaatcaaacctgggctgcagtcatgaaagcagaatcttagctggtagaccacagagtggagtgcttttttgtaaatccttcaggagatccaagcaggcagtttgagcatataaaggatttcaactcatttcagatctgatcacagctggaatgctgtttagctaatttcctgcatgttaatatttcaaagatatgatgagatttgtatctgcaagggattgtgaagtccagcagggcatttgaaggatattgtctgggccgggcatggtgacttaaatgtgctggcttaaaatcccagcactttgggaggccaaggcgggtgaatcacttgaggtcaggagtttgagaccagtctggttcacatggtgaaatcccatctctactaaaaaatacaaaaaattagctgaatgtggtggcacgtgcctgtaatctcagctactcaggaggcttaggcaggagaattgcttgaacctgggaggtagaggctgtagtgagctgagatcacaccactgcactctatcctggtgacagagcaagactctgtctcaaaaaaaaaaaaaaaaatactatctgatgttgggtcaagaaatcatcagtgtcattcattagacctggtatagacaaaagtttgttggatctgtatttttataatctctgtagtatcattcttgttctgtagttgtttcatttgttctctctgtttaaaaattatcttcctaggagatggatgggagctgagggaatgagcagaaagggatgagtttagatcacaggagtaggaggagatggagcagttagaggtgaaagagaaaacctccaaaatcttattaaatttagaaatagtttcaaacatacttttgttcacctcttgaatggaggcaattttttcttttaggatttcttttagaaacttgtaggtactattggaagtaagtctctcactcaatttggttctaaaactagctttttctaattgtgtgtgcaaacaaactaatttaggtattttaaaaggtaccacattttggccattgtcagttggaatcattctgagttatgctctactagttttctaaatatttgcatgaagaggcatggtaagtattcagtatgaatcgagctggcatttctaatggtggatctcttcttaaggaggaaacctcagttttagatagttgaactgccttcagaatctggccagttttaaaaactacagttgttttttcttaagccacaaagatttacttatttttcaagagaaactatattcttcttggccaaattttgtattagaggaaaggttacaaactctaatgaataagacaaagaaaaccttaacttcagagaaaagtgaaaatcacaaaacaaagtaaatataatctctagagaataacacatgaaactcctgtctttcagtagagtttcaattccaatcccgcagagttaagaatgtgtatggcttgaataaagtctgaatcctcaactaacctgggagtatttggataccgagatggctgccagatctggtgaggttgggtgaaccaagctgttgattctggtactgttacaggaaagcagtcctgatccataccccaagagagggttcttggatctcacgcaagaaagaattcagggcaagtttgcagagtaaggtgaaagcaagtttattaagaaagtaaaggaacaaaagaatggctactccatagacagagcagccctgaggactgctggttgatcatttttatggtttttttaataatatgccaaacaaggggtggattattcccttccctttttagatcatatagggtaacttcctgacattgccatggcatttgtaaactgtcatggtgctggtgggagtgtagcattgaggacgaccagagatcactctcatcgtcatcttggttttggccggcttctttgccgcaacttgttttatcaggaaggtcttcatgacccgtatcttgtgctgacctcctatctcatcctgtgacttagaatgccttaactgtctggaaatgcagctcagtaggtttcagcctcattttacccagctcctatttaagatggagttgctctggttcacacgcctctgacagtaccaacattccaattgtcacgaacttgaggggatcactgaagctccactttagatcccatctggggtggtaaaatgtcaacgtgaaacaagattcagaaaatatgattaagtatagcatttattggggctcaaagcttgaaaattgttatccgggagcatagattcaagttgccctgaatatactccaattaacagcagcgacaagtgggtttctacggaaaaaagaagaggcagtttctaacttgttcgccaaaaatttacgttaaagtaacgtaagctattgataggctacacgttattctttgtatcacaaattccaggatcacgatgataatgagccaggcagctagtcagaaacaaaatcccaggcatcagtgtggggatatgactgaagtcccatactcctgtctctctgggcctgacacattttgcatagttcatatagctcagccttctctgagctatttctctcttctcagtggctttcctggaagcagcctccatcatatgtgactcagagtgctagcatttcttcatgggtttataaaccataagaactcaaggtggccttcagagccacagcatcaacaatattaacttccctattagtagtgttctattactttgggttttacatatattatctcatttattcatcataacaacctggttgatagggattattattcccattctattcctgaagaaactgaggctcaaaggagctaaaatattttcctatagtcacacagctaggaagtggcagagcgaggactcaaacccaagaatcctgacttcaaagcctctgctcttcctgctgcactataccatccctatacacatctctgagactcctgtaaaaatatgtaaggaacaggatttatttcatttattgtctttcatatcccacaagaatacaaactgtgtaaggcaggtatgtctgtatgttttttatcactgcctcattccccatcttccacaacagtgcctaccgcacagtaagtgctcgataaatatcttttaaatgagcatgtgaatgaatgtgtgttagtgttagggctaaggcctttggcttctggttaattgccctttttgccattatgccaatgtcatttgcacactcacaaacataccctcatataatcatatgcacttcagtttctttgcaggtcctgggttcagacaaatctgagtttgaatttctgttccaccactgggtaactgagtgaatttggtcagttatgtttggtattttacttagtttcctcacctgtaattaggaataacaggaatactcatgtcagtactactttgaatgacagtgataagaatatgtacttcaagcacctcacaaagtacgtggttgataaatggtgactttacacaacaactgagtgacacttcttctggcacaggggccaagggaaaatttccccttcaccctctgaaggttcactgagaatcaactgataaaaggcagattaataggagaaaaagcacacaaaatttgtttgcaatatggaaattcacagaaaggggtagatggttgacacttttatgccatcttgaggttacagaaagagcttggaaaaatagattatgggtgaagggagagaaagaaagtcctggggcaaaggtggtccttgttatgtagatgaaatctcacaagtagcaactctcagaaagaatagatgatagtctgtggttgggagatctgatcatggggaggtcctcagagaatgcctggttgtttatttcactaatgtattttttttttcctatagatacaaatcatctccatgaaaggtagcttttcagggttattcctgtgtgcatgccttcttctgaagcaccatctcaagatatgtcaaataagtgtatttggggtgaaatatttttggtttcctttgctagaaatgaaatgtccctgcttccccatagccagaaaagattcttgagtggacaactgcacctaaacttgaacctgagcactagaaagtcttttgttttattctatgtttttataaatttaaatctaattttttgaatataaaataatacatattttgtaaatgtggaaacacagaaagttctaatgaaaaaataaaaacctgtatttcatcacgcagaaatatctgctgtattagttttccgttgctgcggtaacaaattgccacaaacctggtggcttgagacatcatagatttagtatcttacaattctggaagtcagaagtccaaaatcagtctccctaggctaaaatcaatgtgtcaccagggctgtgtttcttccagagcctccaggtgagaatctgtttcattatcttttctagcttcttgaggctgcctgtattctcggcttgtggccccttcctttatcttcaaagccagcagcatactatcttcaaacctctctctgactctgacttcatgttctccttattcatcttttaaggccccttgtgattacattgggcctacttggataatgcaggatcacctctctatctgatgatgggccttaaagtcccttttgccacaaaagaaaacatatttgcaggttctggagattataatgtggacagctttggggagcctttattctgcttattacaaacactattagtatttagtgcaattcattcccattgttttccctatatttttcaacatatttcactttttactatctatgccattcacaagattgcttatttcaagcaacgttttattgtaattgttttctgttatcaacataaagtaatcaaaagggtcagaatctagtttaaagtgagtttattcgagtacaaagtttgaggacaagccccccaggaaacagaattcaaggaatggaagtcagagttccaaagtgtagacattggggatcatttatagacaaagttcagggaagtttaacagaatttcaccatctttctatgtaaggtttaatgcatagttacaacaatctgattagtcaaagtggtctttttcttttgagaaatgtatatttaaacattctactctgaagatgtaattgtcatggggccttgggcaccatcatgtctgagttaggtacaagactatagggaggcagttaatctataacaaagatcagtgattggaaaggggaggtctggtctcttctagtcatttatagaataagaacaatgaggaagagaggtaagctataatctaagatgcagaattgcagacatgccatgcgactcactcagtttccagggcttaacttcccccttgtcaaaatcaatttagaagatcctgaaattttattttattttatacttatattattaaacatgttttattagaatgtttcattgttgtggggagaattcctaaatttcctaagcataaacactctttgtttcttttcagtatatatttcttcccagtacatgttatttggacctaagtcttctgggatggcaatagagatgcaatggaggtcaaattccatcctttttagaggaatctatacaaattagagctagtaaggatataaaagatcattttatcaggtgcatcatccctaaacatacatacacatttacacacataatgtaaaatcctgttaaaagaagacgcttcccaatattcaagggctgtatagacgtgcttttagattaagaattagatgcattatgacagattttgctatgtaacaaactgccccaaaacttattaactcaaaacagcaagtattgatgtctcatgattctgtagattggccaggaagttcttccagtctgggctgttatgtgagtcagtgattcaaaactatccatctaggccttgaaggcgggggctagcctaacctttttcttctgccatgagactaaccctggcttcttcacgtgcgggtggaagggttcctaacagcaacagctgacaaacttaatgagcaagcactttttcagcctctgccacagtcacattttctatcctattggctaaagtaaatcacgaagtcaggctcagattcaaggggtgtagaaataggctccacttctgatgagtggcacggcaaagtcaacattgcaaaaagccaggcagagatattactgtggccagttttgcaaacaatccaccgtaatacataaaatatgtttaagcagtccacaaaatgatcaaggaaatggtagaaactataaacactgcaagaactcagagccacatgatgttattgagtccttgtagtgctctgaaagggttcaaggaagaagttgttttggcatatgaccctgatgaacttgcaaaagtagagaagaagggagcacagtttctgaagaagaacttagtagagaagtgttattctgtggccagtacgcagtaattgttccacctagagatgttgactgactgatgaacaggaagctgagtctttataatgcagatattcacatattcatttactcatcctttattgaaaacaacgcaaggagccactagaaaatttaagctcaaaagaaactcactggatggatatggggtaaagattcagaagcacagctgaagtagcaggtttcacaaagattagggacaaagggcaatctggaaatctaggtagcaggaactattgaatagactcttaagctgtctgggcggacatgagtcagctccaaccaattttctaaccttgtgtcacccactcaagattgaaagtcctgggagagaatccaactggccttgctcagaaaacattcctgccccttagctcaaagaaagaataaaataaatgactcctggattgttagcctaagcaacttagatgatcatgtcattcatttagatggggagattggaggaggagcagattcattgtgaaaatcaggaaaactcttttagctctgttaattttgaactgccccttagtaattcagatagagctcttgaataggcagtaagtgaatctggagttcaaagggaaattcagggagtataaagtccaacaaaacaaaaatatgggaatcactggctgttagatgccatttagaccagggacttgaagggagcaccttgggaaagagactagatggaacagaaagtctgaggactaaagacattgctctctaatagttctggtagaggaggaagattcaggaaactagacagaaagacaacagtcatgaagctaatcaacaagctatgggtaagtcaggggagtctgccatcctggaatcttccagagagaaaagtttttcagaaaggaaggagggaaaaccatttcagatgctgctgcaaggtcaagaagaagaagacaaaaagagcagaccccttacttgagaagataaatattgtgaccttgtcccagtgttttgggaggctgaggcaggaggatcacttgaggtcaggagtttgaggccagcctaggcaacatagtgagaactcatctctacaaaatataagaataaaataattagctgagtaatctcagcttctttggaggctgaggtgggaggatcccttgggccaggagtttgaagtgattactccactgcactccagcctgggtgacagggcaagactctgctctaaaaaactaaaaaaaaaattaaaaaaatatattgagattgttgcagaactttctccttaggtcagctaaaactgggctcttgtcacatgaccagggaagattaggcttgcagacacatagaagggtgaggaaaacatttattgggagaaaaggaaaaagaaagaaaaaccctcagcaaagcgagagggagtcttgccaacaacctcctgcctcacagataggttaccacacggaaactgaagaggccaggctcctccccctgcaaacagcgcgaacttcccctggctccacccacttccctcagtgcgcaagtgggcattatttagagagaatgagccaggaaagcgcgggcttcatccaggaccagcagtccggtttttcagccttcaggctgttttagacttggaggctgggtttctccgggacccttggctgtctcctgtctctatcaagatcttaataagagccaactccacatggtgggacaaaagaccaaagggagtaaagggagaggcttaatgagaaaatgagaaattaaatcatttaatgagtgattttattttccaagtagaggaggagaggtacaaaatgagttttgagattcatgttgtgacaggtagcaatagtgtcttgccatttctgtatygtattccattgtataaatactccatggttcatttacgttttttaccattgataggcatttggatcgtttgcaatttgagactttcgcagagtactactattaacattcttatttgttcttttggcaaactccaaaatatgtgtacttttgtacacatgtaaaccctaggacccagtgatttaattcttaagtttatattccaaaatatgtgtacttcttatttttctacacatattttggaatataaacttaagaattaaatcactgggtcctagggtttacataggtttagctggcaaacaattttccaaagagcttgtgccagtttatactcacatccgcaatgtatgaaaagtcaagttgctccaaagcatcaccaacactggatattatcagtttatttaactctgggtgttccagcaaatgtgtaatggtatctccctgtggttttaatttgcatttttctggtgacttatgagtttgggcatatttttgcttattgaccatttataatccctttgttgggaagtgcttgtttgactcttttaaccatctttctatcggttgcctctttttcttattgatccatgaaagctctttatatattctatatacaagtctttttaaaagttttttaaaaacttttatttagcacataccaagtcaggtgttgttccaggtgctgaaatggaggagaaggaaattttcagaagatatgtggcaaagagaaaaaagtgttaacctttgtgatttgtgttatttgttactatcaagttggcaataataaatatttattataatttgtaacacatatttaaaatgtattatatataatattttatattgtatcatatataaaatcaacagattttaattaattcaaaattcagtatcttcactgacatgtgttagcttcctagcactggaatgtcatttgcttgcttacatataaaggtataataaattttaaatcttctgctcagataaagaagtagtgaattatctaagatgtttgaatgacttaacataaatatttctaaggaaagggataaatcacataatttttctgcatggaaaccaaataaaacaaataaaaagaaagatgcgtttatcagtagggaaagtgtctagaaaaagtacatataactatgcctgacaataggcatatagcctacatgtaattgatacattttagaagaaagtgtggaatcatttttaatattatgtatgtagaactctaccctgagtcaggagtttcttgtcatatgttgaggagggtagaacagagttactaacactaaatgagacattgaataacctatcttttgtttttatgggtaaaaaatatagcgaccataatataccagaagtaaaagaaatacaaattaatatctaatttattatatatatggaatgagctgtgaaacttcaccaagaagtctttctttggggcatataaactatttgcacaatctctgaccttctttttcactgcaataatggttttttttttaacaataaaaaatgtttggacttaatgtggtacaatttatcaatctttttctttatgcgtagtgatttctgtgttctctttaagaaatttttgtctggctggggacagtgactcacgcttgtaatcccagcactgtggaaggccgaggcaggcagatcacttgaggccaggagcttgagacaagcctggccaacatggtgaaacaccatctctattaaaaatacaaatattagccgggygtaatggcacatgcctgtaaatcccagctacttgggaagctgaggcatgagaatcccatgaatcctagaggtggaggttgcagtgtgccgagatcatggcgccamtgcactccaggttgggcgacagatccagacgctgtctcaaaaaaaaaaaaaaaaaaaaaaaaatctttgcctatgccaacgtggagctattctatcctgtttcctagaagcttcactgttttagctttcacatttagatctacagtctaggatcaagttttattttgtcttcatataaataagtaattgacccttagccatttgttgatragcttatactttccttacgtcaccacagaaccayatttgttattaatcaagtcaccatctatgtatgggtttcctgactctgttccattgattcatttgtatactcttgcatatttatcactctgttttaattactgtagttttatactggattttcagtaattcatctttggattatgttggctacagttggttctttaaaattccatataaatttcataagtagcttttcaatttgtattttaaagctgctggtatgtatattgggtacatggagtctatagattaattcagggataactaacatctttttaaaatatcaaatttccaattcatacattttatatatatatatatatrtgtgtgtacatgcatatacatatatatgcgtatacatttccttatttatgtagatattccttaatttctctctttggttttagtttttcatgtagaggtctagcgtatttgtctttagactgatgactaggtatttgataagattacaagtggtattatttatcaaaattgtatttcttgctagtttgrtgcttatatactaaaatacaattgattattaatattgactttgtgttcagtgacctggctaaattctcttattaattatactagttgtcccataggttttcttggattttcaatatttacattcatgtgatttactaatagtggcaggttcatttcttccctttcaatcttgccttttctttccatgcatattgcacatgcattgagaacaatgttgaataaaagtagtgataatggacatctttgtctctttttcccgagttcacagggaaggttttcaatatatcaagagtttataaaatatttgctgtaggctatttgtagatatcctttatcacaataagaaagtttcttttctgtcctaagtcactagaagttttttttttttttaacatgaatgagtacaatattttatcaaatacttttgttttactgaggtcatttctattgtgagtgaagcaagttgatttgtaaatattaaagcaatcttgatttccaaaagtaaatgctagttggtcatgttctattatcctcttgtgtatattactggctacaataaaatatttgttttttatattttttatattattattcatacattatttatgtatgttatttattatttataaatatgtattctatttatatatattcctacatatattttargatgtacatagacaagtttgaatggtaacaagaatgagccaactgagaggaagaaattggtaatgtagtaaagagcggggatgattgccaagtcaggtcctgcaggtggtgagatgaatgtgactcagggcacaggtgaatgagctgaccttaggtggaagtggggacccttccttcatgtrctaggagagaaagcagagtttgaagtctgtatgtgtgtgagctgctgggcttctcagagggcagatgaaatagttcttatgccattgcctgtgttttccctgtggtatatgaggccatccactgagaatgaaggtggtcagagtataggaaattttgagatgccgagaagatctgtgaaattagtagagaattagaataggattttctaagtatccatttgagacttgtagttataattaaacaagaatctatcctgcagatttgtatttttctccttagattgcacttaatagatcaccagttcatttttgttgctgtttaaaagcatattgagtttaagcaggattggagtttaattgggtgaggtattctcactgtgactaagtttgatgaattgaaaagcgtagttgtagaaaggaaactcaagaaggaaattcttggggaaacttaaagaatcgtatatatgcaatgtcactttttaagacaactaatatttttaagaatttactacttttgaggtgctgtactaatatattacatgtataatttcatatrtcttyaactactagttcctgtaaataagtatgctgatgatgacacgttccatttctttcgatagccacaaaaacaggaagtgatgacaaarctggattctaactccygactcccaaattctctaagaccctcagcattaacatatattttattttaatgttattatatatgtatcattacttttacaactcttaaaccaaacattttaaaattagctacaactgcaaaatcaacttaaaaatttcaaagagccatttaacatgataaattaaaatattttagtaaaacaaaatcaccactgatactttaatattcttaggtctgagaaaaaccattatgtcgtattattcctgcgttcctggtagcgtttctactgctggacatcagaaatagagaatagtagagcccctgagataagagcagagacaggggaaaagcaaaacatttctgaagaggcagttggtctagtttggctataatcactagacgggtaaaggaacattgggtgcattaaaagtagagagcctgggatgaaggcgtgaaggctgagtaagaatctcttcacttggtagtaattctagttcatccccctctgacctgcaattctgaacatggtgtagcttggtcaataaggaaataaattgcctttctggctggagaggcaaagggtagacaatacattgtgccagctgaacttcctgtctctccrctctggagaagagccagtcacaatgtatgactcagcacgccgggcacctctcccacgccagccaggcctgcccagccacttgctgaatcacaagtggccatttccaatcccatcagtgacccaagctctccaacttagactagtttctctgtgatcggtctatgattgtcatggagcacaaaaagtattaacttctaacatttatttttctttcctggatgcttgatgaactttataagcaagagactgatttaattgttcctcattatcatctgagcatgccgtcttggcttgcccttttatatggagagcaaaatgttgttattcccctttgcctgwttactggctgtattattctctgaggtggccatctcaagagattctgtagaaaataataatagcaaaatttctcccttgagaagcttcataaattaaatctccagagccagtatatgtaagccgacagattatgaaatatgatttaatgctctgtccagagaaaggtcagggcttcagaaaaatcatcataatatcaagaaaaactaatctgcaacctgttatatgatttttaaaaatcaccccccatcttttttactgtgcaaactgtagatttttgtttattttatttgaggctatagtttatgtcttgaatcacacacatatgagtattactttctgtgargttttcatgacccctgcaatcaaacttgggtccttctgttagtttctatcacagtatccttcacttttctttcacaattcttgccatattstataactacatatttgtttgttaaatatttgtttatcttttatagatgattggcttcaggaagagggaaaccatgtccttttgttcagtcctttattctcagcaccttgcacaacatgaatatacaaaaaatatttgtaaaatgaccatcgaatgaacaagtgctcattaagtaccaagctatatgccaggggttgctgatggttagaaatgagcagggcacaaaattctttgttcaattagtgagcaattcaggcaaaaagaaaatattaatggtgattatacaatataatgcaatgcagccatctgccactagatttctgaagtgttttgttttgtttttaagagacagagtcttgctctgtcacccagactggagtacagtggtaaaatcatagctcacttcagtctcgaactcctgggctcaaggaatcctctcacctcaacctcctaagtagctgggactacaggtgcatgccactatactggctaatttaaaaacagaagccaacaaacaaaaaacacacctttttaagactgggtctcactatgttgcccaggctggccttgaactcctggcctcaagcgatcatcctgccttccaaagtgctaccttctagagtattgggattacaagcgtgagtcatctgcaccaggcctgaagcattctgtaatggagaaatacctgggtgctatggaagggcagagggggaaacacagaggagtaacatctartttacgtttgtcaaggagaggccaggaaagactaactacaggggagataaactccaaccaagagtctttaagtcttccaagacttacgtacaagtttcttattgctaaaatggaagttttaatgaacatttatttatttatttgagatggggtttcactcttgttgcccaggctggtgtgcaatggcacaatcttggcttactgcaacctctgccccccaggttcaggtgattatcctgcctcagcctccaaagtagctggaatacaggagcctgccaccatgcccagctaatttttttttgtatttgtagtagagacggggttttgccatattggccatgcttgtctcaaactcctgatctcaggtgatccacccacctcggccttccaaagtgctgggattacaggtgtgaaccactgcccccggcctgaacacttactataaatattatatggtagttctctcaaattcattctgtttactgcccaaaagagctacataaattctaagttgtccacatttatgaattttagatatatggctgtttattctggataaacacacaaaatacacaagagtgggtgcgatcacttatatgtgttaaagaaggcattcaaggtgcattttttctttggaaaagctttgtaaggctgcttatgagacagagaagtaagtattttataaattccaaagcttcttggtctattgatgagtttttctgctgttaaaaacctctgaaaatttgacaacgtactctagagagagaaagcgctgaaataggcactgacgtactgctggtggcaattcaaaatgatatgcaccctatggagataaatttggcaatatcaagcaaacattacatatacctttgccctttgttttgacaaatctttgttttagcaaaccctcttctatacatctataatgacattagactgcccagaatacaagaaggcaaccacagtgggccagtactactactgggctagatgtggtggctcacacctgtaaccacaacattttgggaggctaaggtaggaaggctgcttgaggccagcctgggcaacatagtgagacctcatctctacaaaaaaaaaaaaaaaaaaaaaattagccagtcatggtggtacatgcctgtagtctcagctactcaggaggctgagatggaaggacaggttgagccttggaagtggaggctgcggggaactatgaatatgccacagcactccagcctgtgctacagagagagactccgtcttaaaaaacaaaacaaaataacaacaacaacaaacaaagatagatgcatagagtttttcactgttgcactatttatattagccaaaaaccrggaaacaacctgaatattcatcaagtggggacagrttgagtaatcatgtgacatacataaattgcagcactgcacacttgagaaaagaagtgagaaatgtctctatttcctagtgtggtttgctctccagagtatactgttaagtgaaaaaagcactgtggcctcaaatttatctrtagattctatacaatccccatcaaaatctcagctggcttctttgcagaaatycacaagctgatcttaaaatgtgtatagaaatccaagggactcaaaattcaataaattcaaagactagccaaaacaatcttgaaaaagaagagcaaagttggagggctcatacttttcagtttcgaaagttgttatgaagctacaataatcaagatagggtggtcctggcataaggataaacatggaacagaattgagcatctaaaaataaagcctcatatttccagtcaattgacttttaaccagggtgccaagaaaattcaatgggggaagaatttgtcttttcaacaactggtgctgggacaactgtatatccaaatgtaaaagaatgaaattggaaccctacctcacaccatgtacaaaattagctcaaaatggaaaacagaggtaaatataagaacttaatgtataaaattcttcgaagaaaatacagaagtagatgatcaagaccttgtaatcactaattgttcctcagatatgaccccaaaagaacaagtactaaaaaaaaaagtagacaaattggacaccatcaaaattgaaaacttttatgctttttatacttcaaagtcactatcaaaaaagtgaaaagtcaccccagagaatggggagaaaatatttgcaaatcatatatctactaaaggatgtgcatttacaatatacaaaggggccaggcgctgtggctcatgcctgtaatcccagcaaatcgggaggccaaggtgggtggatcacctgaggtcaggagttcaagaccagcctgatcaacatggtgaaaccctgtctctactaaaaatataaaaattagctgggtgtggtgtcaggtacctgtatccccagctacttgggaggctgaggcagsagaatcacttgaacctgggaggtagaggttgcagggcgtggagattgtgccattgcactccagcctgggcaacaagagcgaaactccatatcaaaaaaaacaaaaaaaaacaaaaaaaaacaaaaaaaaaaaaagaacaaagatttcttccaagtcaataataaaaacagaaaatgcaatttaaaaatggataaagaatctgagtagttttacattaaaagataaataaatggtcagtgagcacttcaaaagatcctgagcattactaaacattagagaaatgcaaatcaaaatcacaatgagatgtcatttcatacctattgctttctttttcttttttttttttttttgagacagaatcttgctctatcttccaggctggagtgcagtgtgtgtgatcatgaaaatggctcactgcagcctcaacatcctgggctcaagtcatcctcctgcctcagcctcttgagtagctgggactgcaggcatgtgccaccgcaccagacaattttttttttcttttgtagacacagtgtctcactatgttgcccaggctggtctgaaactcctgggttgaagcaatctttctgcctcagccccccaaagtgctgtaagtataggtgtgagccaccacactgggccagtactattctttaaaaaatgggaaataacaagtgttggagaggatgtagagaaactggagcctttgtacattgatagtgggaatgtaatgtggtacagccactgaagaaaacagttggacagttcttcaaaaagttaaacatagagtttccatttgatccaacaattccgttactcaatatttactcaaaataattgaaagcagggactcaaatagatacttgcacaccagtgttcacagcagcattattcataatagtcaaaaggtagaaataacccgaatgtccatcaacagatgaatggataaacaccacatagtatgtgcctatgatggaatattactcagccttataaaggagtaaaattctgatatacactacaacatggatgaaccttgaaatcttataataaatgaaataatccagacacaaaaggaccaatattatatgattccacttagatgagatgcctagaacagacaaattcatagaaacagaaaataaaatagaggttaccaggagttggagaggaggaataaggagttattattaaatgggtatagagtttctgttagcaatgatgaaaatgttctaaaaatggacagtggtgatggttgtagaacattctgaacgtacatagtgccactgaattgtacttaaagtggttaaaatgataaattatatgatatgtatattttaccacaatagaaaaaaatacaagaagttaccagtggggaaaaggagggattacagaagacagggataacagcacgacttttctcagtataccttgtttttcgtatttgactttgaaaatatgtacatactttatataactagaaaacaaaattaaatcttaaaacaatcccaaaaatggaatgtaaaaaaaatgaaaccaattaatctaagtatatatccagtttgtggcataaccacacaaaaatgaactattccaagtgacttttgaacagaaaattactatataccatcagtagaatatatcctaataacaagaaagaacagcaaaaatatcttaaagtgttttcagtaatggcattgttgggggtaatgttgmtactgttattttgaaagtgttgagtgtatacagtgggatagaaccaacaagtatttataatgatatcattgagaaccaagattttcattgagggagaagactgatgaagttaagaatttctgtaatcttgaatgtaaactgaaagcattattatgaaatgtgtgatgtgtttatcttagtttacctttgaatatgtgtatatttataactatacatctatagcagcagacacttctgtcacccagattgtctgaaacaggaaatatacaagatagccagcaatatgttttcatattctacagttacaaagctgtcaaaacttactagggttatgtcaaacaaaacatgatctaacatgactatgttcctactggctgaagaatgaacattatgaactgaacatcaataagaataatgacatcaaacccaggagttcattataatatatttttaagtatattgattgcttttggagggttctaggaaacaaacaaatcattttgaaaagtggtaaataaaggaaagacttcagttcaagaccagtctgagcaacatagtaagaccccatctctacaaaaaattaaaatatcagctgagcattgtggtgtacatctttagtcctagccacttgaaggctgaggctggaggattgcctgagcccaggagttcaaggctgcagtgaactatgatggcaccactgtggtccagccagggttaaatagcaagaccctgtttctggcgaaaaaaaaaaaaaaaaaaaaaaggaagacttaaacatacctttcctatatgaactgtgcctcggagtaactaaataattgattaaagcaagtttctctgtataaaagtactccagctaaaacattaaggagaaatgatagaattcaaatatcacaacccctaaggaatttttgcatcaagacaacaataattaatgactgataacaccacacacagaatacagacttattaattgtataactcctgatcaagtgcataccactatctgtgaaatagttttgccaaaaaaaaaaaaaaaaatctaacctaaacttgaacaagcctctagatctaaccaccaatttttacaaactacaaagaattgtggaatgtatagattgacgtgacatgaaggcaatcggcaaagtccagactgtgaaaatactacagcaaacatttagggtctttttttctttttctttcttttttttttttttttttttttttttgagagagtctccctctgtttcccaggctagagtgcagtggtgtgatctcggctcactgcaacctccgccgcccaggttcaagtgattctcctacctcagcctcctgagtagctgagattataggtgcgcgccaccatgcccagctaatttttgtatttttagtagagacgggtttcaccatgttggtaagcctggtctcaaactcctgacctcgtgatccacccgcttcagcctcccaaagtgctgggattgcaggcgtgagccactgcacccagcccacccttggtttttttcaacaaaaaattactagaaataaaagaataatagttggtcaaggaagctgtagaataagaaagactgccacatacatcaatggcagtgggcgggctttgtttgaatccaactctagcatgcaaacatttgataaaaatttctttatttaaaaagaaaagtttacaaaacaatcagaaaaaataaaaaagattgaggatctcaggacaactactagcctagataatttataaagattagataactgactcatttttrttagtttctttcctaataaggcaatatgtattagatatatcagagtagaaggaaatatttttcttacatctatttggctttttaaatataaacatatataagtaaaaaccaaaatgatttataatcccaccatttatgtaactatcttattttcaaaaaaaattatgcaaatactagcatttgtgtgctttttttccttttgtgtttgtgtgtttatatcctttttaaatatatcctttttatgtacctaagcagctgtatactatactgcatactatagtgtgaactttgttcttttccttcgtctttacaacatattgtggaaaacgttccatatcagaatatagatatgcctttttgtagccattgaaatgcaaagaaaaaaagaatatagatctgtctcattttttaaaaatgctgtataatctgtagcacgaatttactataatttattcscatgctcccttatcgatgggcatgtaaattgtgttaattttatatgatataatgagtatccttatatgtatatcttggcacagtttttcgagtgtatccataaagtttcttgcaatgaaattatagggcaacaagggtgtggtggctcttgtctgtaatttcaacactttgagaggctacggcaggaggattacttgaggccaggagtttgagaccagcgtggacaacatagtgagccctcacctctactaaaaattaaaaaaaaaaaaaagaaaaagtttggtatggtgatatgtacctgtagtcccagatacccaggaggctgaggtgggaggatcatttgaacctgggatgtcaaggctacagtgagctatgactgtgccactgcactgcagcctggatgacacagtgagaccctgtctcaaaaaaaaaaaaaaaaattacaggccaaatccatatgcttttaaaggatatttttgaattgttctcaaaaagaggcttcaccaaattaccatccagggtatacaagatacccatttctccatgtccttaccaacagtggctctcatcaagccttggtggaaatgctctcatactgatactttaacgactaaaagtcatgacatatctgcttaggttgtaaattgcctccctctaaacttatacagagagaatttagagtgttgtctcagcttggttccagtgttatccaagccattaacctttgttttgccttagattgtcacattgtggtatttcagttaaaaaacaaaaacacaactggtactttttttttttttttttttttgagacggagtctcgctgtgtcgcccaggctggagtgcagtggcgtgatcttggctcactgcaagctccgcctcctgggttcaagccattctcctgcctcagcctcccgagtagctggacctacgggtgcatgccaccacccccggctaattttttgtatttttagtagagacagggtttcaccatgttagccaggatggtctcggtctcctgacctcgtgatccgcccgcctcggcctcccaaagtgctgggattacaggcatgagccactgtgcctggccacaatggggtattgtttttatagactkttgaaatctgcctttggaaaccatgggtttgctgtgttgttatggtgaatgaattaggtgcacaatactagtttttaaaaaatgaacttcacactaggtacaccttgaaaaattattccagagctataagaagagctataagaagaaaaatatgatgggtcattgctccaaagaaaggttttaaaatgtaaatttgtacttaatgaataggacagtgtaccctaacctcctccttgctattcttcagggatctcttctaacaagggctaatgcttcacctaagctgtgaaaagcctgctgtgagcactccctgttcagggtcagaaaaacacaatgaactgttctatcattttaggttctaggacaatgttctcttgcttttccttgctcagaatggacccttgctggggtagcatcagaatgaggatctggtgcaacagttctgcaataggaagtaggttcccctactatcatggttttcaagcttttttgactgcagcccataacgagaaataatgtttttcatcataacccagtagatatactcacagagacacagtatattcataaaaaaaatcataacgtttaaccttatgttaatagcatttatcctatgttattcaatctattttatttctttttaaaaaatgctcatcacagttaactaaactgatttcacaactccttaaaggaatttgactcacaatttgaaaaacactgcattgtagaatattttagagtctcttcccaaccctcagagtcagatttatttcaagatggcccctgtaagacagcttcaagcttgtgagtgactttcttttttctttttacttctttaccatttaccatgactcccaaataagtgactcttttggcttatttggtaaccatgctaatttctacacatagaacctagagcatttacataagacccacccaaagcttgtgttttaaccttgcttctctcctttctttctttgattcattgattatgttttctattgctatctgttcaatctgtgtttcaggcagtgtacaggtactgaggcaacaatggtgagtaaaagcaagcatgcatcctgagatatactgggaatgaaagaagctaatccaaaagcatacaggaaaatattttcaaactttgataaattctgtgtaagcatatggcattgcacgtaacaggggaaccgcatttaatatggagtgttggaaaaggcttctgtgagaagtgacacttgagctaagactagaaaagtgaaaagaatataaccaggtactggacagcatcatgagtgcaggcacaggtgacatcgtatcacaagcttctaaggctgaagggggcgtgaattgctagctggagagtggaaggaaaagatcttcaagataaagctggaaaaataaacagggccaggcctcataggtttctgtagaccatggaaagaggtgaaggttattttgagcctggatgacatgataaaactcacattgtaaaaatataactgcaaggtagagaatggattgaagaggtccaagattacgcagacagagctatgaacagcctattgcaatggtctgggtcaagcatgatggagtagggttggaatagggtggtgaacttttattagttatcttccttactgagcacactttgcaatgaatttcaaatgcactgggaccagacttgttaattttggagctgtcgactaacaaataagtaagccatgataacccaccaaagaaagttgcagaaatgcaagagcaaggctgtgatgaatggttgaggtacaaggaagctcttactcactcattttaaaaaatcagatgatatgaagttgaatattcaagatattgcccaattgtgttatgttcacatattttactgggcatagttctggataataaaatatttatcttctctccctctgagaattaaaaatctgagatggaggcctctgatgtgccaaaggagaaagatgatttttaagagccaaacgtgcctccatgattaaatacatttatatttctactggccaaggaaagcatgttgcctcttgcctgggcctcttctgtctttgattaataatcccctgcacattcgaacactgttattaacttgccacattggcacctttatcactttgttctttgaataaaaagagcttaacccaagtcccagtaaaaatgttcattcaggctgaatttaagaaatatattctgctcccttggagttaaatggaataataggagaagagtccacttgactgttaccaggtttctgaactacacctggcagcctaacatagtcaacagcagggagtgaatcacatctgctctgtatgctaacccggtctgagtaggtggtttgcattggcatctaattatttttatggttagtactctcttctcctgacttttggtaccaaaccctcacacacctcattatccctattgcatctgccactcatcctaaaaggccttgcttacatcccacaatcaatcattctttctcttaccttagcggagaacagcctgaggtgcagcaggtcccagatatgattacagtttcaccagttcaatattgtttactgaatggcctgtaaaacacagtgaatataatttgtgttgctgcagttggaaggcttacataccacattgcctagaaccaaagacctttcctcatgcccaatacaccaatggcagagatgaccagccagtcactgcatcgagatgaagaatagtatctcccaaaaggcaataccaagcatatgtttctcaggcttttacaaaacactttttaagtttctgtctaaactcctctaagagctaaatttttccaagacgtattctgtgtaaatcagtcttcagtgataaacaaaattttatttattgaactatcaggtgctattaatgctaattagaatgttaccacctcagattaatgcttcgttgaatttcttttttttctggtgtttgtaagtattccttttctccttcagcacaatgataattataaagaagaaaatgtactaagtgcatttctcccatcatttgatattttacatttatttcctcagcaaataatttgtcacaaggaagtaatgtgcatccctgggcactgcttgcaggcacttaattcttgattcaaatgaaactttaaaatgttttatccatgatgttatgtctaaagaaacatgtcaaagaaacatgtcagagaacttgactttgaatagaaatcatggctgtgctttgagggaaacaaaataaatcacagaggtaggaatgcatagttacaagctactgtttgtacacagcagagaccaattctactctctgttctcatttcctcttctaattcctcatccctacactccttcctgtgtgaagcccatgtctgatcctgcctawttcagtgactgggggtcactgcagatgcgtgcacagggtcctgttatgggatccggattctgccgccttctccagacacaagtttcccctcatacctgttgttccagcaaatccaagctattctcctttccccacttgcactaggttctttccctagtctgtgcttgcatgcatcctatttttctctggtatttttcaaattttactttggcacctggagaacgttttggcaccaccatttgtcaggtgtttaactttgtgcatttcctcgtgtgaatgggagcgtaggtccagcatcgtgaggaaggactggggtcacactcacagagtgtgtcagagcccacaaagtcactcagtagaaacatcaggagatgttagcgttatttttcagttattactatgatcaccattcctcaaaattgagctctggttttacctctcctgagaagctttcctttacttccccatcccaaagacagagtgaattacttccttgtactgtgtgcttagttcttcattgcccttcttatgtgttttccttatcattaatgtgggacatgatctgttataatgttgctgggcaatgatgttgttagtatagaaaaatgggcatgaggatagttcaaggagttcccataactcatattttatgggccttctgcaatatatggttaggatacaaccattagcaataaatggataacttgggttctcttcattttctgtgttttattgctacatgaataaacagttattgagtgcttactgtatgtcaagcatgacaataagtattataattaccctgtttattcatcagtatgatcaaatgtggttattattcccatgtgacccatgaggaaactaaaggcctaaggtgatagagctagtgatagaccacctactcccaaagtctgagctcttagctcaagaacactctgctctgatctgtagggtctcatttgtctctgagactctttaatgtgtaaatayatttgataagttttctcttctaatgtaattccaggtattccttccaagatgaggaagacatgttcatggtggtggacctcctgctgggtggagacctgcgttatcacctgcaacagaacgtccacttcaaggaagaaacagtgaagctcttcatctgtgagctggtcatggccctggactacctgcagaaccagcgcatcattcacaggtcagtcaagtccaaggagatggccatgaacgtaacgcaaggagagaatccacaactggctacyttcaataaattcttattgaacatgacatttaatccccgtttaattcttgaaacagtaccctgaggtaggttgattgtcttcattttgcagattttgtaaaagactgaacacatagagcttaatttgccaaaggtcacagtaaacaacaagatcacaatcaatgaattttggtactattttataactaagcttagayaaaaaggagaaaaggtgacatatagaaacctaataaatattaagtaaataattaaatggaggtagcacatggagggaaagaaatagaatgaaaagaaagaaagttctttgggaaaaaagcttgagtctttctaatatttgctgtcctgcagtctatattaaattaatccctaatgtatgtactgcaaatggaggtagaaaaagcaatagcaatgtcttctgcatttagagcattagtagtaaataaagacatacaaataacataagaaaccataaagctatagagataatacagagaaaaggataatactttatagtaaagaaatttgtagtttcaatgatgattttatayatagtatctcatttgatctctgaaataacctgagataaatgatcagagcagatataattagactagaattacatatgaaaaaatcatggcttgtatacattaaattatcacccagtttacttatatgaattgtaaacatatcaaacatcaaaacatctactaatcaacatcaaaacaactagtgtttactggttgatgacttactatgtgccaggcactcctaggtactttatgtacattagtttattaaatcctcaaaactcagcaaagattccacatttcattataatattcccattacacagataaagaaactgtctcaaaggtttgccaaggacaaacagctaacaaatagcgtagccaggatttaaacctagatctctctgacctcaaagtcagaattctatgataccaattcacattacttacacatatgaaatatatgcattaattgattatacatcattaaatgaaaaatcagtacatgtgactctgctgctgtcatctctaatccttgaagaatttgctgagattttaagtacaattatgtctcaattagtaaaaagttggctagataaaatatttgaccaccaccagttgacattgacctgtaatttattttttaaacctttatatatatatatatatattagagagatggggtttcaccatgttgcccagtctggtctccaacttttggcctcaagttgtcctcctgcctcagcctcccaaaatkctgggattacaggagtgagccactgtactcagcctataatttatcttgatgagtacagagcctatagatgaaggtgaagcatcagaatttatagattctctgtgcaggtaccacaggccagttcttttatttatttttatttttttgggccttggccctctacatttagtttttatttaatgttccttctttggaagggcctgcttgtattggaagtgtgctcttcaggcaccagataaatgaaagcagaccagttaattacgtaggatctcagaagtgaatttgcacacctggtgtttttttcaataactagaaatcctgttctcaagcactcatcttcccatactggttttctggtccctcatagctctttctgaagagagactsttcatacttgttagtctatggagtccctctcaaaactttcctgctcgttcattctcccaaaaattgccaaccacagcctatcttggttgtgacatcacagatatcagaaagaaggcagtgaccttgagaaaccagcatggcctcagagccttttcactctctctccttttcctgtttgaaattgggttctgtcccttctttctttaggcttcatgttcttggtcatcaaaagaccaattctctgagcattttctccatgtacttagaactgtgttccaagaggaattcaggagggaaaaacaacaacaaaaatattgatacaatttttccccaaggagcttactaacacccaatactgtttttctgttctttccctctctttttttctcaccgttatcatcattttgccacttaaatcataaaccaaggattaactttctggttttttgcccttcaatcacatccacagttattacttagtgcccgttctcagaagggcctttttgtactgaaatgtctcctcaccatggtaaaggtatggaaggcaaacaggatgacattttgagtgcagtgttaaattgaggtgacatccttctggtgtcaaaaactattcaggtgcatttctgtaacctctatgcacctctccccccacctcccaggtgttatattttacaggctgtcatacccttttgtacctctcctgaggagttgtgacatttggtgtataattaattcatttgtctcctttataaaattgwgaactctgcatgttttgcttttcattgtataaccagtatgtgaaaaaaatatgagccacatgaatgaatgattgaccagaagttcaggcttacaagtaggaaatattcaaatataggacattaaatccaaaggyctcagacctacttgtaccttggtctttacattaatcatgttatttatcatccaaaccaggatactctgagagctaaagaggatgctattaatattaatagcactgggaagagtcaaaagccataaataatctaggcaattcaggacctatgtcaacatcattaaggcttttcaaggcagtgttttttggttttttattttttgtagagacagggtctccctatgttgcctaggctggccttgaactcctgggctcaagcaatcctcctgcctcagcctcccaaaactctgggattacaggtgtgagtcaccatgccyagcttcaaatagacaytttaattctgacagtgttctgataaccaggattttctgctctcagaataccagatatcaatttgaaatggtgtcaaatagctttttaaaaagtgtacatggtaaaagaagcagtgatccctttgtttaaggaatttaaatgataataactttgtcaatctgagactaagaactcctgggccagagagtgcaaaaagcaatacagaagagatacaggcttctgaatactgtaattcttttttaaacctccttcttcaaaagaatcagcccgattcatgttgtacttgaattcaagataacaaaacaccttttagttacttagaaagattagattgtaaaatatgtgctgagttcctagraattaaaagtgagaatgaaaaaaagaatcaatgaaagtacagtagatctcccggacaaggagagaccatctgcataaaactgaagatataaaatatgtgacttcctacttttagattaaaatctacattttgcctttggacatggtagaagattcaaaattacccrtaaacagtcagcactacgtggaagtaggagcagcagtaggctgctgtttgcttagggtttcctgggtaccaggctgcctgctaagcacttgtgagttatttcactcagtcttcccatagctccaggaggtttatggcactttgtccccatttcaccttcgatgaaactctggttctgaaaaattacttgcccaagtttgcatggctattaagtagggaaagcatcatgtttaggaaatgcagagctcttcaccactctccagcctgcagatgctcagcatggctgcagctctgaggggagcrcgggacacctatgcatggccacctgcctcaggcacccacagacgaaagtggtacatgtggaacggacagacagagaacagcctaaaattggaagctaaattgtgtgagaaagacaagtacttcagagaagatagtgtggagtcgcaaaataagtttcatgagagctcatacagaaaacagcctaaaactagaagctaaattgygtaagaaagacaagtacttcagagaagttggttgggagtaagaaagcaagtctcatgagagctctgagggtgtaaatgggacttttaacagccaaagcacacagcaagtctagcctagcaagaggagctcaatggatggaagtcctcacttgtttccctgtgttaacrtagaagggggtctttttaaaattttgttttcacttcagcttttctgccagaaatgtctagtgtagtgatgttttaaaaaaaaccataagatctgtttccgccacaaatccccattaagacataaatggagttttattttgtggatgtttaaaaatccatggacttgaacttttggtagtttcccaaatatgtagaatattcagctagttttcttcaatttcagaatctttcttttctatcrttgttaaagacacagggttgcataataaccattaagtttgaattgtgcaattagacaactttcttattagtcaagaagtcaaactttttgtgtgagtacagcttgaaaatcagctttagtttccaaagaatggccagtttgaagtataatattctcttttgcttacttgaaatctgcaaataaatgctttaaattagggacaaagtgattatttgcttttatttaaaaaataagggaaacaaaactcattacaatctcttctacagggttagtactattctatttgttgattgcctcagcctctccaatgaacaatctggtggaaagtaattatttaatattataatccaaagacaaatttctgtttactcccttgtcagatcttaaagtagactcaattatgaatttaagctaatgagatggattgtatgggacaattaaatagtaagtcattttgggtcaaaataccatttgagaggatggttgattgttttttccctctgagaattaccccccactataacgaggttataactcactgtttgctaaatttttataggaatgagataaaaaatctgattagagtaatttgtgcaagtaattacagtacaacagagagagttgcaaaaatttcatttcccattgagtaccgaaatgttgaagagaaataaaagaagatttatggctgtgtagaaaaacacaggatggtatttttatttatcacctttgccttctttgctgttctcattggaaccaataactgattccagattcatcttagggactgtataagatgcagatagaaattatttctcacacatgacctcttgggctggagtagctgcttatgagatgttcctatcattcttctagaaatcagtaccttgacagtgaagaaaaaaatcttaggaataatgcttctagtccaaatatttattcaaaaattatttactgggtacctatttgccagtgttctgaatgccaggctcccatggggaagaagacaatccccctgtcataagaagttgttaatattatagtgtgaaaaatagtcaagtaaacacttcaacattaatatcaaaaggcttttaaatgttgtggcatgtgccataaagaatgaaagctgttatgtgcatatcctgagcgatgcatgtgtgcctgcatgcacgtgcacgcacgcacacacacacacaatatgcttagttgcgtcttcccaatgctcatggttatacctctaattgtagcctctggaccatgatattctatataaaaagctgtctcccctctccaatcttaagccctcataagtggatactacacctcacttatgttttaatctccagcaacttgcactggatctaaactagagtgcttgctggataattcaatgactgaacaaatgaatgaggacagtatgtatatgtaaccattgggtgagtgcagaaggtaaaagttgctgtggaggatgtcgtcttcagcaaattctcaaatttattccacacattcctctgtgcatccacaacatgtggggttctggtctgcctttccactatgctggattagttttgtatgctgtgtaacaaattcctacagtcccagtgaccagaaagaacatacctttatcagctcgcagtttctttgggacaggtgtctgggcacagtctagttgagttctcggcacagctgccattaagatgtcagccagaactgggttctcttctggaggctgaactgggcaagaatccacttccaagctcagtcagaatgttggcaggaggtatttccttgtggctgtaggacccatggtggctactttctttaaatttaacaaggagaagaataccgtagagtaagttggctagaaagaaaacagagtacacatacttgaatratgatatataacattgtaacataactcagtcacagaagtaagaccatcacayctgccatgtaatgtcggttagaaacaaaccatggaaccagcccatgctgaggggctggaaattatgcaagggtgtgaacaccaaaagctgggaatcctgggggtcaccrtacacagtctgttcacatttcctctaaagaagttgcactgcatcacagttccataccaatttctgctatgaccttaaatatagccctgaacttccctgtcaaggaagaagtgaggaggtttcaacaagtgatcagwaatgattcttttatgtctaagattctaggatgatttcctctctgccctggtaggctgctcttcaaagtatgacctcctcattgtttctctgctctaccacacactcattcccctccaagaaggctgcccacctgtaatgacctgtctacagagcctgtgatagtgacttgtgataaatggctattagcacatttaccaatcaaggtcctgtttgcaattcggttgtgggtcaaaattatgtttgttttaactgaggtctttagtttatttcaggcagagatctgggctggagtgtcacctttgtgtctaattctcacacactgtactatcttagcagtcacattttattttcttgagatgataatttataggaaaaaataagacatttctgcagctaatcattttagtcaatgatcattgagtgacaggtgagctcctaataaataaatttgccaacacagtgacacctcaggtttctgaagcctgtgggaatgagtcatctggaaagatgtttttctaattcctggaagtatttcagagatttttaactatttaatttatactacaaagcacctatgtcacttttttaatgacttaataggagctatcacttattgtttacaccaagaactgcgtactgtgctaattggcaggttccacacaccacctaacttgataatcaacaattctctgaggggattaagcaacttgccaatatacagtcagtatatggggaccagattcaaatgtagaattaccttcttcaaaggccctgttctaggtatagacgctcttactttcactcttataataataagatatcctcaaggtcagatgagctgttcagtgctgtttaccaaatagcataaaacttcagtttagatacatattttagtgggtaggtactatatgttaatttgtgctccctcagaaagatttgttgaagtcctaacctccagtgcctcagactgtcatcttttttggaaagagggtttttacccagataatcaagttagaatgaggccattagtgtaggccctaatccagtatgactggtgtccttatgaaaagaggaactttggacacagaggaacatacaaagagtgaagatgatgtggatgtagagagacacagggaggatgacaggtgaagatgggggattgatgtgatgggtccaccagccaaggaatgccagagattgccagcaaacccacagaagctggaagaggcctgggaggagtctccctgagaagtttcagagggagcatgggccctgctggcatcttgattttggactttctaccttcagaactgtgagaaaattaatttctgtgttcttcaagccactgtttgtggtactttgtgacagcagctctaacaaatgaatgtagtaaatatgtttctattgttttctttgctgctaattttttaatctttgcttctctagtaggtgctactcagagcaccttctgtcctcactcctaacatgctgcttacaatacattatgggatagaagaccaagtgacaaaacttgtttgtattgtttgtaaaattaaactaaaccaagagaatattcagtaagtcaagtccattggctttagtatagggtaacctattttaatgttgccagagactgtctttgcttacttttgtatttcaggtttgggaagatattttcagtatctgtaggctttttttttttttataccacttctcctgtccaaggtgtgttgttttgcttttatatatctattaggaaagttaaatcttttccattttaccaaagctacatgtccagtatgagaacatttaaagtctaaaaattatctgattacttatattgtatgtgttctgcttgatgctggctttctttcagtgtattgataaaagtttctatttgttgcagtggaataatagactttggttttaggctatcatctgtggagtgcttaagaaaatgccctttctttttgttttggtaaatcttcttttcagtagaccacaagcccttgcaaatgttctctttttctaactctggtagcagaaggaccacttgagcctcaaaacaaaacggcagtgcagtaatgagggtattaggttgatgtgttctattcagcacctgctcccgagctaccgaataatgaatgagcatgaattacacattgtgaaaacaggagaatctgccttctttgtgttgtatgcatcaagcagtttcaaaagggctttgcaattgtgtttctcacacaaagccacccatttgtgaaaacccatgtgwaaaggcaaaragaactgtctgtgtacaggttaacatttaactagactggcagagcttttaataatttctataaggttaatggcttcgttaatatgcaacctgtgatttggtccaagttaaattttactttgcccagaatacattataatataaagcttaagctttattctttcaggtttagtcatttaacacataatattgatcaattatgcatgttggacacagagctctgaatagagctttgaaatataaaactatggttttagtcctcttagagctatgatgtttggtaggttaggtgaagtagacacatttttgacttataaattttcagcttacaatgggtttatcagggcgtaacccattgcaagttgggagcatctgtacgatggtatagatatatataatgcatatagttttatatccttttaagacaaaatatgaagatattttatttgctcaaatcttgttacacagttttccactgtgatattcacatgctgacagagaggctatttgcatggtgtttgtcaccagcaatgaacagcagyatttgagttatgtagtggctctgccagttaccagtggggcaacttgggcaagacactaagcacctctgaacctcatttgttttatcagtaaaatgaagatagctatacatacttcacaggctgtggtgatgatatattctaatgaatatacagtcttaaataaaaacattcaataaattctagctactcatttatattaatttattatacccatttgctttgagttatcttctttgcaataagctgtgggaaaaacttactgttccttctcatactccaggatacatcatcacccaaatcattacacattcttatataacgcaaacattaagaaagaacaataatcttactaaaaagcagagtgtggtatggtagagagattaagaggctttggaatagttacatcagggatcaattagtgagctgtgtgactttaggcaaattaataaactgaatttctttaaattttgttaaataggtataataacattatatataagaaagcaggaaaaatatgaacagctcctattataatgcttgcaaaatcaggagtgcttaataaatggaagccacactgcgattttccagataattgtgaaacaactacgggccattacaaaaccataggaaattagaagtgaggagtaatttggagactgacaagctctaccttcatctaaaggcagaatttcttctgcagtctccctaacaaggaatcgttatacctcagggatgggatagtcactaccacataaagtagttcattttcagacatgcataaccttagaaagttcttctcttgatttacaattagcctcatagttctgttgctgcctattggagttttactacgtgtacagtcagrcagggcttccattcagtcaccacccattagtactgttgtactagtaatttatggatggcgtccattcttactggtccatgtcccattctgatttgtgtttgtgccatttttaagtgttttgaatattaaccctggtatcagataaacatggagtcctgactttttccataatcatgaataacagtggaatagttacatcagatttgtgtgccactgtggtcccatctatgaaatagggataataattgtacctagttcataaggttgtttgaggatagtgtggaataaagtataaaaagggcttagcctggtttctcaaatattgcaataaatgaaacttagcatcatgatgctgtcacaatggttcaatgataattgaaaacatcgattcatcatttagcatcctcagcttatcagtttctcactatctagctcttcttacactggacacttcctaattattctttcaatgttttctggaagttagttgaataattactgtgcaccagatactacacagtagtcccccttgatgcatgagggatacattcaagacccccagtggatacctgaawacgcagatatttccaaacccatatatactatgttttttcccttttgtacatacctatggtaaagtttgattcatagagtaagagattaacaataactaataatagaacaattataacaatatgcagagtaaaagtatgtgaatgcagtccctctctcaaagcatctgattgtaccgtacttacctatttttgaaccacagttgactgtgggtaaaaaggaaaactgcagataaggggggattactatactacgagttttacatgtaccatttaactaaatcattacgactctataaagtagatatgattattgtcctcagttacaaatgtggagggctgagtctcagaacgttctattaccgacatggttttggtcccaacagaaaacctcataatggtttaaacaataaaagagatttattatcttataaaatcagaaaatccagatgtgtgctggacttggagggtatcttgattcaacaattcagcagtatcaccaactagctggtttctttcactctcttctctcttttccatgtggccacttcatcctcagcttgttcctccatgtgattgcaagaaagctgcctgctgcccagggctccatgctaaattctttaaatctaaagaatcacactccttctcaaaactttccccaggacagcaaggaagctttttcctcagaagcccagaacataattctttctgatactcagtggcttaaattgggtcaccagcccatccctgaaccaataacagggcctgtgggatgggataactcctacttaggcctgactcacataatccttccctacagtcagggtggagtaggtttcccaaagcacacaaaatacagtgtgtgtgtgtatgtgtgtgtgtgtgcgcgcgtgcatgcgtgcgcgtgtgtgcgcgcatgtgtgcatgaatgtgtgtgttacagagaagtgaaaatacccagttgaaaactgaaatgatgattaagagaatgaagaatgcgtattagaaaggcaatcaaaatgaccattagtaagctgcacagtcgagatctgagccttggtcatttgactacagaattaatactcttaaacctccactatctactgcttcccaaatcaacctagaaatccctggggttggataggaccatttgtgtttgagactattaccaacattactaagtactatactaatatactcatgcaacctaaagcatatatatgtgaagtgtgtatatgtacccatatatatacatacacactcatatactacacacagtatagcctatacagggctcatgtttaatcagcatacactggtctggccctatcagttgtatttcagtgtattggctgatgaagaggtcatgcctaagctttgctgctactccagccccttttccaatctccccctcatcccccaccccttccctcccttgacccagcaactgaagtgctaactcctggcccaggagaggtccttcagggcactgctcctgggcttccatcagcatcccttctgatgaaaggatgactgtgctgttctggttgttaaatattttgtccatcacctctggctatttgtaaatatatatacttacatggaatactatatatgcccactatatttcagtaaactttactatgctaagctctagagagtttagatcatttgtccaagattacataatgagtgactgggattacaaccaaagattgtgaagtacaatcttaggaggatgatacctagtctttaatcatctaaccctgacagcctttcacttctgccccctattccaaactgtttttccttataattttccctcactcgctcttaacatgggtctgttttttgagaccaatagcccatctgtgacaccctaaataatatgttacagaattatatgtataatatttttcccctctccagaacttggcgatggcccaatctgagagactgttatgtggcaaataattaaatacaaactatggaccatcaaaaggccatgggacactgaaggagttgattttggtttcgatataccgatttccttgtttgctattttcatgtacatgtaccggtataggattgcagggtgagcaacttgactccaggggaggcgcaatgaagggatgtaattagcctgttaaccctgctaatgtcttgtaaagtcattcaagtgagaagagtagatacatcaattcttccttggatcctgccacaaggagcattgtatttccactctgctatttatagttctcacagctggaatcagctggttcagcaggacatggctcttttttatttaatcaaaccaagatgcaatgaagaatttccaaagtatgcatcctagaatttccctttatcacccccaaaattccatagtccctctgaaatcataggctcgtaacaggcataaatcacttcttatttattactcttactctaatacatacacatacacttactggaaagtcaagtttcttagttggccaatggtaaatgtggcgcatctggcacacagggtttgtttgggttgttttgggggtggggattggttgttttgctttgttttgttttctcttctcttcttaggggaaaaagacatgcagggcttagtattccaacaatttgagaaaccagggggctgggattcattcatttttatgacaaatagttactcgagcacctactttattcttgggtacttttatgagtccaggggctgctgcattgaacaatacagaaaagaagtcctttcacttagaacttacgtcctagtgggggttgggggttgggggttgagagaatgaagcattcttacaaagaatgttaaaagcgaactmtgggcaggaattgaggatatgagttttgatgtataaagaaaaagtgacaaggtcaataattggtggtcttagtgtgatagatatgccagtttggaaattgtattgaataaatgctagtcaggggctaggctgtagttatgaaaaggagatgattaaggaagtgagaataaggaaactattggtgtgggacggatgaaaagattattggaggcaagtcaaggaactgagaggccagggtgttagatggagcattcatgtagacactgaagtcaccaagaataataaataacaagtaagagggaattcatcattagctatctgcttatgatatggatgtgtttttgctgtgtccccatccaaatctcatcttgaattgtagttcccataatctccatttgtcataggaagaatgcagtaggagttaattgagtcatgggggtgggtttttccaatgctgttcttgtgatagtgggtgagtctcatgagatatgatggttttataaagggcaattcccctgcacatggtctcttgcctgcctccacgtaagaggtgcctttgcttctccatcaccttctgccatgattgtgagggctccccagccatgtggaactgtgagtctgttaaacctctttttctttataaattacccagtcttgggtatgtctttattagcagtgtgagaatagactaataaagccaattggtatgaggagtggggcactgctgtaaagatacccaaaaatgtggaagcaactttggaactgggtaacaggcaggggttggaacagtttggagggctcagaagaagataggaaaatgtgggaaagtgtggaacttcctagagacttgttgaatggctttgaccaaaatgctgatagtgatatgaatgaaaaagtccaggctgaggtggcctcatgtggagataaggaacttaccaggaactagagcaaaagtgattcctgctgtgctttagcaaagagactggtgacatttttcccctgccatagagatctgtgtaactttgaacttgagagagataatttagggtatctgrtggaagaaatttctaaacagcaaagcattcaagaggtgacgtgggtgctcttaaaaacattaagttttattcattcacaaagatatggtttggaattagaactcatgttttaaagaaaagcagggaataaaagttcagaaaatttatagcctgatgatggaatagaaaagaaaaacctattttctgaggagaaattcaaactggctgcggaaatttgcatcagtaatgaggagcaaaatgttaatggccaagacgatggggaaaatgtctccagggcatgtcagaggtagcccctcctatcacaagccctgattcctgggaggaaaaatggtttcatgggctgggcccagggccttgctgctttcgtagtctcaggacttgctgccctgcatcccagctgtttctaaaggggccaacatacagttcagaccattgcttcagagggtgtaagcagcaagccttggtggcttaygcatggtgttgggcctgtggatgcacagaagtcaagaattgaggtttgggaacctctgcctggatttcagaggatgtatggaaatgcctagatgtcccgacagagttgtgctacatgggcagagcccttatggagaacctctgctagggcagcrtggaagggaaatatggggtgggaacccacacacagagttcccactagggcaccacctagtggagctgtgagaagaaggtcaccatcttccagacaccagaatggtagctccaccaacagtttgcaccatgtgcctggaaaagctgcagacatacaatgccagccaatgaacgcagccaggaagggggctgcaccctggaaagccacagaggtggagctgcccaaggttgtgggagcccacatgttacatcagcgtgacctggatgtgagacatggagtcaaagattattttggagctttaagattatactgccctgctggatttcagacttgcatgaggcctgtagccactttgttttggccaattcctcttatttggaatgagtgtatttacccactgcctgtaaccccattgtatctaagaagtaactaacttacttttgattttacaggctcataggcagaagggacttgccttgtcttagatgagacattggactgtggacttttgagttattgctgaaatgagttaagactttggggaattcccagaactgagggttcctccccattgtagaccatataggtagcttccagacgttgccaaggcatttgtaaactgtcatggtgctagtgagagtgtcttttagcatgctcatgtattataattagtgtataatgagcagtgaggatgaccagagatcacttttgtcaccatcttggttttggccagcttcttcactgcatcttatttctatcagtggggtctttgtgacctgtaccttgcaaaaacagtcctgctgattactaaattcctatctcacctattcaagatggagtcactctggtctgaatgcccctgataagagaatccacagtgttcaattctccccagttgattctgaagcatatccaggtttattagccactaagtaaaaatatattatagactactgtcaatgaaagaaacattttgtaagttatttcatatttatttttacttgagaagactgaaaaggtaaagaagtgatgctaaaatttagaactagaaaatctcaacttgctctagtaggaattttaatagagcacactamgtttcttttcattttctctctcctggtatgtgaataaacaaccttccatactgcaatttaccctgtagtgaattagatgttaccctattatattttggagaaactatatagttagaatctaagcttagataacttatttttatgtttacaaatccactttctcttatacatttttcttaaatttttctcatattctttctctgaatttgtggtaaaaatacccctttcccattctatgtcatggttctttaygaagctttctcatcctctccatcccgagggaactatgtctcatttatctttaggttttctgtatcttactacagtgacttaccagagtaggtaaatatctgatgaataaatgaatacaagatttaattaagaagtaatcacattaaactaattgttccctctctgatctctgtaatattaagtttcaaagtagtttctgggaaaagtagttaacacaatgatgtatggattcaataaataagaaaaatggtgctcagggatttaacagaaagctcataaaatgtcaaatccacagcaattaatttctcccagtaagtcctcataaattcaggccaagaaatttgatactgatcttgcctctctcaactctcatccatctttggtagggctcctctgggcctctttttcacctggcaaacagtacctgatactcattggatgcagatctgaaagaggtggaaagagcccgacacctggtttatctctagctttatggtgcagagagtatttgatggtgtgcacagtgctctgtatatactgttaggatcagccttcttgagtgcactggaatttctctgggtgtcattaagttcttcatttactgaccatgaggcactgggatagaatatgatattaatcaagaaaccatccctgacatcatgatccacttggaaaacttgcagaaattagaaaaattttttgagtaggcattttgctttgttgcccaggctggagtgcaatggctagtcagggcacagttgtgcaatgcagcctcaaactcctgggctcaggtgatatccctcttccacctcctgagtggctgggactataagtacacaccactgtgcctggcaagaatttttttttttaggatgttataaggcctatagttatttaattattaatcctggggtagttagtgaaaagatttggaccagtcttttacacactgatgtacagcaagataactatagttagtaacattgtattatataccagaaatttgctatatcaaagtatcatgttggccacttcaaacacacaatttttggtttaaaatgactaaaaaaattaaaatagcaaagtaaaaaaaattcacaggagagcacaaaacccaccttcttccaatgaagggagtagtctggtggttaatacttggaggatagaatgatagagtttgcaaagccttggtgaatattatagtaaggaacactcctgaatcaaaaaatcgcattgtactttataacagccctcacttttccactctcagatttttactgcctttccctaatgtaccattaaagcccttcagcctaaattcatagactccattagagaagaaattctgaaacaggttttgggaacacattctcagcctagtcaaatagctttcatgctgctagaataaaaataccttaatctttgacagaccaagtctgtcagcttactctttacttaaaaatattaatgagtaacaagtcccatatccataaacagaaccaagtgtgtgataaactgtgataaatgttatggtggaagaagtatcccatgtggtcagaatatatgggattaggggggatttgacccagaaatgaaaaatcaggaaggcttcctgcaggaaatggcatctgagctgtggggttaagggtgaatctgtgttgtctgagtgcactggtgagaggactctaatttaggcaaagcaacagcaggtgtggatgtgaggaggcaaaaggagacagggggtggttatataactacattatcaaccatatttttcccatttatagtctttaagctcacatcatctgtgyaattctagagttacrcaagaaaatgatgcttaatactactaacattactttatggcaatgtaaatgctttatatgatccaatggaccaatatctacatgcttagatacaacatgctataggaagtttagagtctgagtttttgaatgagagaggccttggttcagagcccatttcttccatttactagcctgtgaccttgggttaagcttcagttttctgatttaaaaattggggattttctgtctcataaatttactgtgagaattgaatgagaagatgagtattgagaagctagtacactgtttcaactccagttagctttcttaagcctttttgcccctaccccttagttctgttcgttttattgtgagcaactttcttttttctttttactcctctagggatatgaagcctgacaatattttacttgacgaacatggtaagtgagtgatttgtttgcaatcaagtacatgacatgcatgtagaaaagttgattgttcccagcagaggggtattacacatgaaaaaggtattttgttctattcattcgagctctacttacaaactcctcatagacaatatgggggaactttattacttatggcaggttatagtacaacaatacacccttaaatcacattgaatttacctaatgagaaaatcatagtctactcaattttcttccactactatatttcttcaagaaaaccatcacaacttttcagtgttagctggccttaatataacacgcaatcacctattttttataatgatacagaaggcctcaagctgagagcatttggccagcaatagcatctacctagacattaatgacattattttgttctcattgcatctacttttttgcattccttcttataaaaggcaaattggttttacatttgcaaattggtttttacatttacttaatatcacagaagaattcttacattttagggtcattgtaaagactgacctaatacatgtaaactacttgatgcagtgactgtcacgaagaaatcactcaatagaagtctaatattggtacaatttttatgaggtggtcatgggtttctccccttggaaaggaagctggaactgcttcatcttgttttatgcggctttgtctatgctggcacataactagtatgtaccaatgtatctcagaaaagatatcaagttttctgtttaaaaatttcagtttgagaaaaatcagttaaagaaaaacataaaaaagataaaagtatatgtgttatctagatttgtgatatagggatatggcaataatcaagatggtgataagtgaatgctgaatttcaagaactactgattacaccctctagaataagcttttgcccgtgatgattaaatgtgtacgatttcttcctaatatttatttttgtgtatattkggatttattagaatatcagggaagatctgcagggcacaaaaactgtatgttataaatgttaacagtgtcaataagatctttgttatgtctttagaaggctgctagatgaggagagtcctagatcttaaaggctccttattcaatttttacaaaaaggatttgcaagtggaactgaaactccaagtaccatctattgctcattatttatttacctakttttgagcctgattttcctgatcccacctgtgctcagggggctaagaaacactggtaatgacctctaatttcaaagctcactgtcattacttatttatggactgtccaaaaagattttttccactttcttccaatgccttatttcttccttacctttactgcttctgacatttgaaaacagggtctctgattctcagaaatgtgagcaatggtgagatttagcatgaaggtgactttctttaaaataccagctatccagagctaggtacagtggcaggcacctgtagtatcagctacttgggaggctgaggcaggaggatcgcttgagcccaggagtttgaatccagcctgggcagcacagagagaccctgtttcttgttgggggaaaaacaattaccactggcttctcttctagcctatagaggccacctttgtgcaacttagggagaagtgctccccctgcccaccacagcttcctgacagcacatggcccaccaaggagaacccaagttaggattgagtcctcacttgctccctcagctgggtgcctttgtgcatgatttctgctgttccaccatttatagaggccttaaatgaaggcatataggtcctatcaatccaacactttcccagctttatcctcccttcagagaacagtgttttcatcccaggtctcatccatggcttcaccctacttctatcattaaggcatcctattctccttcagtcaacttcttcctcctcctcattttcttggtgacttggtcattgcagatgaggaaaaacatgaagaaatcaattaatcttcaagtttaaccacctttagagactacccttgtgaaagattaattgtgtaacagtgtggttaagaatgtgacttctggagccagattgccttcattcaaaacacacttcactcatttcctagcccygagagctttgacaagttgcctaaactttgtcttagtttttccagggatcaaaagaatacttacttagaaaaaaaatcttacttacaaaagaaatcttacagggatcaaaagaatacttaattagggtcattgtaaagactgacctgatacgtgtgaagtacttgatgcaatgactgtcacaaagaaatcactcaataaaagtctaatattagtacaattcttctgaggcagtcatggctttctttccttggaaaggaagctgggactgcttcatcttgttttatgtttctttgtctatgctaacacatacctaatacgtaccaaatctctaccagatagaatctgtaaaagttgtccttcccaaataattattttgatttaagaagtgatataccaaatattctgcttgtctacttcttagatcttgtgtttaaaccattttgtttatcccttcatcctcaggtaactacactttccgtgtacattctgctgtctttcatgtgtgcagggggcaagggtgcagtcatgacattttattcttggtggagctggggctctgttgcctacagaatacaagccatcattccagtgtgccagagagagagtctcagtctgcccctattacctgktgtcttatttacaatgactgctttcattctcaaggctttttaaaatttggtcagtgaattaagaagaggcttttctgtattatattcctaccctgaactcaacttgaaaatcaattgctttgggaaggattgtatatgaatggtacagaagtgagcaaacaaaaaagactgagagccattttctaaacattgccttagggatctctttctggagataataatttttttgaagttatttacttcgtttgttcagattctgaaaaagtaggactctcagacattactcaaggaacataattaaccacttttccatgaacaaattcctgttgttcacctctccccagctcgttatgtagagctgatcttgtgagaatcagctgaatcacaaatcaatgcctgccttttagagtgtctgctggtgtgactttccatgtggagctcatatttgaagacctcatttgccttctccatctccatttataatatttcatccctgatgggctgtcgcttgggcctcatgtggaaattgtagccactgtgaagggtaaccacctatctctctggtgccccctatgcgcatccctacaagtgagctgtgtatcacaccatgctgcttacatttttatgcaacacgattcagtaacaggcagaaacttttattcttactgactcatattctttatattcatctgaaaagattgacatttaaaggagccaattgtamaatgggaaatccactgtgtgaatatttcttgtacatcagaatttgccttaaaaatgtttttaacttagagcacatctgtactgttctccccaaatgtcccatttactagttcagagcaagatgacattaggtcttgggtgactcctgacccactatcctaatgtatattttcatttcctaccaatgtaagtaccccatccaattctatcaatwccatagtgtctaaaattcttgtatttttcttattcaggaaatgctacaaccagaggaacagtaatgtctgcctgacatatcagagaaaatgacaattatgtcatcatctgtcacttaggtttcttaataccatcctgttacaaggaatagaggcaaaaactcagcgtaggaggtgagaaaaaactgaggctgccatcttaacagccttttcattgcagagtctcaaaatgtaccaaaagatgaagtggacagtgtccttttaaaacaacatacagtgtagaatacagtaacttatccccatttaattactccctaggtagtgcctaaggatatacattttcagcaaggatctcagaaaaatgtggggcacatattctaaacacctgcgagtagcagagacttaaaagttgggagcagtgccaactgattggttatggtgccctagagcactgcgttgatgaaagagatcctcaggctgtgcacaggagcagcaagaaagagtgtaaatgatgacaacaatgatggctgaattcaatggcatcataaaatgaattcagattttttatatgatcctctatcccaagcaatagaggcaaaaaaaaaaaggcagaaaccctctcctagagtggtaaattaggaagttctgaggcttgcacctgaaaaacttttcactaaagtagtgattctcaactgggcgtaattttgctctactccttctccctgcagaggacatttggtaatttctggagacatttttgattatcaggattccagccagggttgggaggtgatatcagcagctagtgggtagaggccgggatgctagcatgcatcctgcaatgcacaggacagttcgcactacaaaaaattatcaggtccaatatttcaatggtgctgaggttgagaaactctgctctaaggctcactcaaggcctgggctaatgaaaaaagccagagaagtccttcattcccaaggcaattcctgtgtccttcagtcagcaggagactgaaccctttcctgtgatccagcagtcaaatttcattttcaaaacacagaagggaacctggcagataggtcaccatggtaaggagaagcaagtcatggctgtagccggacctgggactaaggcttagggccagcactctgtgaagttctgccttcattgtttagctcagaagcaccaggttacaagatccagtagaacctgaccctcaaataatttctccctctccttaaataggcatcctggaagtggactagaactctgagccaatcagaaattaactgttttaggttattcagttctttgatcttgtgatacagcacacaaagtttttggtagattcatagtctgacaaagggattctagacaaaattctaggtcttaactccagctctgtaacttttgagtcttttgaacctagccataaatgactcatatataaaatagggcctacctcactaggctaaaggagaaattttgtgcaacaacattttgaaaactgaatcatgcaagtgtaaacagcatttaaaaggaaaataytcaacattctttcaactgacgtgtaatgagtactcaccagagttgagatgttctgctaagccaggccctcttttaaaaatgtaatctcaaactttattaggtctcataatcacctggaaggcttatttaaatattggcgcccaacccacagagtttctgatttgttataatagagttgaggggggacggggcgtaagaatctgcatatctaacaagttcccaggtgatgctgatgctgctgatctgggcactacattgtaggaatcaattggctctaaaaccttctctaccttccacttctacatgagcatasataatcttgtagctgagtcagcttggaaatctatgcagactaaagtagacagttgcatgtctggctgctcatctgaatcacctgtggaatttgttgtttttaatacagatacctggctctcctacaagtcccactgaattggagtttcaggagaccgaagcccaggcacatgtattttgcaaaactacactgaagtttctgataatgacggatatcaacaattaaacgcttacttcttgccaaatgctgtgctaagtctcctgtaatcattctttcatttaatatttctaataacctcttgagaagactatgattatctttccaactttacagagaggatragtgacgttttcaaggtaacacagctagttagtggtagaacctagacttgaagccaagcagtctgactccaagaaacaggctcttcaccacagtctccagactcacctgatttgtattaaactttgtgaatcactgatccaacactatgagcaggacccatggggagaaagagaaaaagaaaaaacagagacaacctacgctatgataaagttattgaaatcaggcattggtgccactccagcaagaatgagtggctaccttttttttagatgagtgctacctttactttactgaaatatcatgacataaacaaagccaaaacactttctgcacaaaataaaatcctggtgataarggcagtgggatttatgcttagcagcaggctggatactatcagggagcagacaaagaagtttgatacagggcttgtggactgtgggccctggaagaatctgatgacatgccctccarttacagctgtatctcatcaaaaccacagacacatgtaaatggaaatgccarcacttcaagattctctgaaagcagttgactgtcatgccaacagctaacataataggcttgtttgcctgagcttttggcacggcccttttgttccctttagctgtaaatgcagggaccctagagcacctcatagagtgtgttccctgccacgtataagtattagacccacactatattgctttgagtgttaaagctgaaagagaccctagagatcatttagtctactccttctttttttatgtgaaggaaaatttagatccaccttggaaaaggacttagagtctactatgtgttagaggctgagttcaaggcagaacccaggcctcctggctcccagtctagtgctctttatagaatccctttaaaaatgaagttgactggccgggcgcagtggctcacgcctgtaatcccaacactttcagaggccgaggcaagcagatcacgaggtcaagagatcgtagaacaccctgaccaacatggtgaaatcccatctctactaaaaatacaaaaattagctgagcatggttgtgcatgcctgtaatcccagcaactcgggaggctgaggcaggagaatcacttgaacccgggaggcggagattgcagtgagccgagagcacaccataacactccagcctggcaacagagtgagactccacttcaaaaaaaaaaaattaaattaaatttaaaaaaaacctaaagttaaaccccgccccccacccaccgccccccgctatcccttgataacagttattttgctgggaactgatgaggccaacctgaattatcagacaaaaaatatgtacaaaaatattttagaaaaacttgaagaaaagggatgctttcttggctaggaaataaatatttgtatccatattcatgccagttttgtagtaataatatttgcctcttacttttcttttcttttttttttgagatagtctcactctgtcacccaggctggagtgcagtggtgtgatctcagctcactgcaacctctgcctcccaggttcatgtgattctcctgcctcagcctcccaagtagctgggattacaggcacccatcaccacgcccagctaattttttattttttatttttagtagagacagggtttcaccattttggccaggctggtctcgaactcctgacctcaagtgatctgcccacctcagccttccaaagtgctaggattacaggggtgagccaccacgcccagcctatttgcctctttaaaaaaaataatcccataagggatgtttggaaacgtgatactttgagtatctcttggctgtctccttcatagtattcataggctaaagtaacttaaaatgtcaccaacagacaaaagatgcctaactagaattacctgaccacaaattcttaactactaagggtaaaactttctgaggctgaactacaggcttacaatcagagactaatcattgcatatcatgaaatggagaattgttggtttaagaccatatcggccttgaggatggactgcaactggcctacaagaattaacagactaattgggtgttttcagttaaaagcatgattgtgccactgggttgaatgggacttaactttctgtgtggttcttctctctctgcagggcacgtgcacatcacagatttcaayattgctgcgatgctgcccagggagacacagattaccaccatggctggcaccaagccttacatgggtatgggtttyatgagtgtcttttttttttctttcctgtaaataccatttattacaggtggaatcatctgtggggatttgcagctagaactggtaagttcctctctgactttacctgtggagcttctgatttcatgggtcttctccactagcaagcacccaagatgactttgataggaaaggaccattgattacattttgaaaacttacttcgtgtgtcaaggaagaccgtttgtacccacttcctaacaaaaatattaactaattcaataaatacctactaactgtctctgtgtgcttagcactgtttcagatgccggtgaccctgtagaaagcaacacagacaaggtcttcagatcctggagcttacattctagtgggagcagatttataaaaaaaaaagaaccaaacaaggccgggcatggtggctcacgcctgtaatcccagcactttgggaggctgaagtaggcagatcatgaggtcaaaagattgagaccatcctggccaacatggtgaaaccctgtctctactaaaaatacaaaaattagctgggtgtggtagcatgcgcctgtagtcccagctactcggggggctgaggcaggagaatcgcttgaatctgggaggcggaggttgcagtgagtcgagatcgcgccattgcactccagcctggcgacaaagcgagatttcgtctcaaaacaaacaaacaaacaaacaaacaaagaagtaggaaacagtaataagcaaaatgataataagtggcaaagtattattttaaccattatttacataatactgcattacatacatagagctataaactttacaaaatacattcccagctataattttagatttacttgtagtgccacaacaatcccatgaattcttctgtttaaagataaggaaattctggagctggatggtggcatgcatctgtggtcccagctgctttggaagccaaggcaggagcattgctcgagtccaggagttggaggctgcagtgagctatgatcatgccactgtactccagcctgagtgataaagtgagactctgtctctaaaaacaaataaattatttttaaaaataaataaaggtgaggaaattctgcctcagaaagtttaaatgtctttgcattattttgtgtgtagcgaggtgaggaactggtttttgccttgacaattcagcatttactaaggggtgaccaaaaagagagtgttagatgcaaaattgtcagttggtttcacgtatagttgtggtaacaaatcaactacaaaaactctaagttcacctgttgggagcagccatctatatagacaccagaactagttgttagcagaaccagctttacttcccgtccagcctcaacaatgcaaggagagagctagtgtcctcgagggggcacacagtattcagaaagagggagttctccctcccttttccctgtggttgctcctaaggcaagtgagtcagatctcaagagaattatctgtaaactcttagagtgactgcaagaaaagatacctggaatttaattcttgattagatatctgtgtagttactggacttgtgactggtcctggagttaacacagcctggttggccatggaagtttgatgagtttgggggctagtctttctggggatcatagcagcaggagacaggtatgcagtgaatgtgatttgtcttggggagaagggaggtggattagctacaggctgtgatccaccttcacatgggaccctccaatgaccaagaatatagcctggaagggagggaggctcctgtcagtgtgacttcctgaaaacaccacaagtcccaatagagctcaacatatcagaatcactgagagtggagtctaggcatagtgtgatttaaagctcttagcgtaattcctccgtgtagctaggagtcacaacttccaccacagacccctaaagagagattactctgcagggtagcacatgtgtgaggacccctctgcctcgactacccttctttcatgtcctaaaacaaatagtgctttctaggaaaagatagaaggacgtgtgtgagagccagatcaatcctccacctccataccggggtggctgaaaccagcccagcagggtgagtgaaggagctttgaatcagatataagaatagttttaaaattcacagaactgaattgtaaagcatctaaagtaaatgtaataagcaaataggactaaaacttattaggcaacagactgagatatcattaggcgagctccttatccagcaaaaacaggaagttagacactgcacagttgctgtcaaatgacagaagactaaaaactactcatgcttggcggggtgcggtggctcacacctgtaatcccagcactttgggagaccgaggcaggcggatcacaagatcaagagatcgagaccagcctggccaacatggtgaaaccccatctctactaaaaatacaaaaattagctgggcatggtggcgtgcatctgtagtcatagctactcgggaggctgaggcaggaaaatcacttgaacctgggaggcggaggttgcagtgagccgagactgtgtcactgcactccagcctggcgacagagtgagactccatctcaaaagaaaaaacaaacaacaacaacaacaaaaaacctactcatgctttaccctaattagttaagatgcttaaagcaggtgatgtggtgatgttgctgtttaaactggtgggattaagtcgggtggaatgaattgtttcagctagatatggtcagagtaattcaaaggtaaaatatttcaacttgaaatcaaggacaagagcaatgccattttcttttaatatttcattctcttcccccatgtaactagagagagagagagagagaggaaaagagaaccccctacatgcagagccacctcactttccaacagaaatcttctatgagaaaaaaaaatgagccttattttctatgatatttgaacaactgcaaatttcatggctttcaattaccagtggggggaataaatctcttttgtcacttctaaaataatggacatatataattcagcctattttctgcctaaaacctatggtactcaaatgataaaaaagcatatccaagcctgctgctctgatgagtttattctccaggtttcctgggtttccatattaagggctattttcttggaaccaaatcagaaaatgtgcatctgggtttccagggttggtttccatggtgagagaagtacggggaggccacctttctttcctctccccagtggttttaagtacaatatctgtataatgtaattttttcaaagttggcatttctagtcttctcacaagatagaactgggaaattggaacctaggaaaaattctgtgcaccttccacttttacccttgtaattaacaatgactaatatttcttgaaatctttcccyggaccagacaaggtgttaaatgttttacattcatttatttgtttatttttctcagcagccccatggggtggactatacttatcactactttataatgagaaaaatcagaagctaaataatttggccgagatcacatggctaataattgaaaagtctagatttaaatcaagctctgtctgatttcagaaatcaagctttttcttaaaaggaagattaatgagaaataaaaatatatatttgtaaatatttttatctgtggtttttaaatggttctaagtcaacttagttaggctaacatattcgaaatgtttcttgccttattccaaaatgattatgtgattgccacactcctccttttggataggagtctttcccagacgtattgtgggtagaagtctgctgtctctttttaaaaattatgctcccaatggtttggtaaaatctaccaaatctatcagcacccattttatagtgctttcataggatactaagtagcaattcaccagaaagaacaaaaagaattctaaaaagaaagaaaactaaccaaaatactgaatgaagattggagaaatattcatctactaatacaagatgctgagcatattttaaatcagttccatagctctgtaaataataagacagtatgccagttcttcaccaccttccatcaagcaaggaagttttgctttttacaatttattgtcctctacctctgtgctccctctggtccctccattattccttctctcttctcctttgtctgtatgaatataatccagattacttagagttaaccaattaaaaccttctcggccgggcgcggtggctcaccctgtaatcccagcactttgggaggccgaggcgggcagatcacaaggtcaggaaatcgagatcatcctggctaacacggtgaaaccccgtctctactaaaaaaaatacacaaaaaaattagccgggcgtggtggcaggtgcctgtagttccagctactcgggaggctgaggcaggagaatggcgcgaacccgggaggcggagctcgcagtgagcagagatcgcgccactgcactccaggctgggcgacagagcgagattccgtctcaaaaaaaataaaatgaataaaataaaaaataaaaataaaaataaaacattctcctccaaattatatatgtatgtatgtgtatatatgtatatgtatgtgtgtgagtgtgtgtgtgtatatatatatatatatataaataagttcactatggactagcaagcaaaaggaaagtaataatccctttgccaatagatatttatggtttatttccagacattttttcctaagcacaaacacatactgtttacattttttaaatattcgatcatgctaaatgtaacctaaattttcattttataatgtaacaataatgatagcatcatatagtgaacatttattgttccaagcactttgctaagtttttaacatttattattaaactctcaaccccataaaataggttttactattgtttagattttacaagttaaaaaaaaatcaggcccagagagagagaaagtgatgtgttcataatcacacagccagtgattggcagagcatgaaattaaacccaagtctagaaacatgccgtgcctgagacatggacgatgatgtgacaatgatgaaggtagaatgkctgacattgctaagctcttcctaaatgttaagcactgttgtaactgcatgcattgtcatttaaactaaaaacagttctgtgaggccastactatcgttacagttttattattgcataatatattaacatataattaatgtagtatattgtatatatagtactattgttatagtatatattgttctcacttcagaaattagcagactgaaaggttaagaaacttgttgactgtgaagctggagacagtcataggggtctgatgccagagccctaactcttaacatgctgcagtactgtccctttgttcatgtcaataaacatgcctctgctaaaatagaaacccacttctcttaatcaattttttattgttgaatgttaggttgtttctcattttgaaatacagatagagcatcccaaatccaaaatgctccaaaatccaaaacattttgaacaccaacatgacactcaaaggaaatgctcattgragtattttggattgatttggggatttgggatggccaaccagtatagtgcaaatatttcaaaatctgaaaaaaaaaattgaaatgcagaacacttctggtcccaagtatttcaaataggggatactcaacctgtacatttaaatttgtagtaaaaatcctgttagcagaattatgtcctggaacttagttatttctttgtgataaattttcattcaataataatagtgtattctcttactgaaaatcactcaaagaaaattttgtgttctcaccacagaaaacagtaatgtgggtaatgtgaggtaaggcacatgttaattagctctattcagccattctaaaatgtatttatttcaaaaaatagtgtcatatacaatatatgcaatttttacttcttaattaaaattaattaatttgattaattaaaagagcaaaagaatttctggtcaaagcctttacatgttaatagatttctgttctgaaaattcatattaacttgtacttgctctggaagtgtctgaagatattcatttccctgcattcttatcagtgctacactatcaatatctttaattgtcccaaaaaaggtaggtaaaaatgatatgacattatgatattaccacagtatttctttgacttcttttgtcaattgcctgttcaaattctttgctcattttctattaaggtgttaatacttttatcctattccaatagttcttattgattatataaataattcttgccttttatatatttggaatatgaaatcctagggtatcatatttgttgtacatttcattacaaatataatttctcatttttaatttgttgctgttttatggcctagttttgacatgaaaagcttgctaaaaatattatcaagccactcatctttttactttgctttctaactttgatgcttttcttagcaagaccttcttaccagattttagatgtgtttgcttaatatttttattctgattatggtttcatttttttacttaactcagttgtatattattttgactgaacggatgtggcaaggatctgactttatttttgtatgattattaaataattgttttgagactatgtattaaataagtccctttccatgctgatttgaaatatgttcatcataaactaaatacatttttgtgctaatatctatattctgtagatttcaaatcttgtagctttataggttaatacatgggatgcgggactctttctttattcttttccaaaaatattacttccacaatttttttcttgtagatgaaatttagaatcatttttgtaaagttccatgaattaatcccattaaatgtatagattagtgttgggtccctttctttatgtcctgaccaaaatttaatacccacgtttaaaaaaatctgaaaaccaaatgatggaaatccaaatatttaataaatatattaaaatgtagtcaagcttattagtaaacaagacaatgccaatttaaaccacagtgaaatactattacacactcaccagattggcaataaagsgtcagttattgccaagtgtgggtaaggatgttcaacaaaaggaaccctgatctaatactggtcatagtgtgaatttatacaacactttggtaaatagtttggagttctgtggtacacagaaaagttacacattcttatcaccaacagttcccctgccaggaatacactctaaagagatatgcacttataggaatctcacatgtataggaacgttcatgacagcattgttcacaatagtcccaaactgaaaataacccaaatggctatcaacaatgggataggtaggtaaattacagtatattcatatagcactaaaagtgaacaaacttaactacatgtagcaacttggataaatcttatacacataccattgagtaagaaaagtaagacaccaaagaatacaaggaatacgatttgatttaataggatttaatttaatggaatttaatagaatacaaggmatagatttttttttgctttgttagtgtttcctttattataaagcactgaaataaataaataggtagctagccaatttatccacagtttctgggagctatataagataggcaaagctaaactattgtctaaaaatatgtacatagatattgatctatatagaaaaacaagaaaattattaacataaaatttagcacagtgacttctagggttatgaacagaacaggacacagtgatggggacaagattctatttcttgacctgtatcatgtttatgtggacatttgcttataactgtttgctaattctgcagtgttttatttacttttctgaatatatgtatagaaatacataatgagcaataccaaacaaaatactcagtggcttttttgaaggacacttagcccttctctgactctcttagtactctcttaggtgcagggaatcttctggaagggttggtgaaagcccttcaatatcttcctgctctggtttctcagctatttgagggctcaaataattactcgtctgttatgtttttgtatgttgtcataaggtttcttcttaatgttccaccaaaatgcttcagtgccttgcataccatgaatattttctgaatgaataaatgtgtattaaaatgttttaatgcctgaaaatagaccaggtagaagaggatgaaaaagaatactggataaataaagctggaagaaagaaagaaagtgaaaagaatactcatgtaaaccccaaggataatccaatatgacagatacataacttgtatagagtaatgtttattctattaggcattttcttagcacagtggctctgattatccctcaaagttctttgtagcttctctgagtgacgtgtctgtcacccatcacctggggactatctgatatgacttgttgtgagatactgagaagggagagcagaaatatagtccatcctgtctgtgggagtagtgtggggtcagggccattacctcccaaattgcactgggggctgtgacttgcagaaaggatgcagtgattcatgaaaggtgaatgcactagggaaatagccctccttattcctgctgcatcaagctcttatagtcagggccagtcccgggcattgggatgtaaacactctacctctctagttggatgttgttcacaggattttacttaaaaagaacatgagtgcactgggtagggaaaacctgtgtgtgcaggacccatgtcataccagtttcctttgcccagagccagcactttatacaggaggcttgggatcaaccatacaaatctttcaactaggtcaattattatgaatgtttgcctctctagaagcctacccaatgtttctgagcactttataagtgctaggcaccatactgagattttgacatggattatcactgttaatttctaactctataaagattgccttattggctgggtgcagtgactcacacctgtaatcccagtactttaggaggccaaagcaggtggatcacctaagcccaggagttcaagaccagtctgggcaacatggcaagaccctatctctacaaaaagcacaaaaattttaccaaatgtggtggtacccacctgtagtcccagctacttgggaggccaaggttggaggatcacttgagtctgggaggtcgaggctgcagtgagccatgattgtatcactgcaatccagcctgggcaatggagtgagattctgtctcaaaaaaaaaaaaaaaaagaaaaaaaaaagaaagaaagaaagaaagaaaaaaaaggaaaagaaaagggaaagattgccttattgttctgcttttgctgtttctcaggctctgccaacttgctcaaggtcacagtaagtggtgaaggtagaatttgaacccagagagcacagctccagagctaatgatcacaactattgcttgagcaattgatttgttcattcattcaacaaatttctctccagtgattctgaatgccagattctgtattagacagtaggaatatggtggtgagcatgcagaagcattccctgcctttgctttgtgcttcattctccctattacatccctcaggagttaggtttattcttagaagggtaagtaaaaggttcatagtgtgtcaaagtgcttagagaatgcataacttggggtcctctctgggggtaaaattgactgtagctctgccttccactggaatcaattgaaagaactacagttacaaagtgtaaagaacccacagctgttgtaaaaccttacactctccagaatgcttgctccctcttttctccctccctcatccccaacagatggctgcaagtgcttcccttgctgcttccaggtgactctgagatagagagattatccaatgtatgctgtaccaaattctgcacgttgtctgcgactgttatagaaatttagatcctttagttgaaaccttcccaatcaaaacaaataacatcttcttagccttcttgatttcagggtgagccacatatttgaggcccaataggacccaaattttaatcggtgcatgatctaaataagcgaagagtttatccatgaaggcctatgcatgcctgtgtgtgttgactgatgaatgaggctactgagagagattagaaaattagaaatgtttgyctgctgtgagcaatctagcaacggatgataaacatccataaaagtgtttatatttttgatcctggtaattctcctttggaggaacatgttgagaaaatataatactaatgtctcagggaatcaaactggtttaatttttcgtgtttttcagcacctgagatgttcagctccagaaaaggagcaggctattcctttgctgttgactggtggtccctgggagtgacggcatatgaactgctgagaggccgggtactgtagtagcatttcctctttggttatttttccagcaagttctattttagaatgaaagaatgtattgtttgctaagatccaagcagttcacttgaaagctgaaatcagctatgccatgtgatgttgataacaccmcttgagatttctgcataggttaattcatttgtcccgcatatgggaccaaccatgtcaattaccattaaattacacagttaaaagtaaaggaataatatggatattataaactcccaaagaggggaaatcaatacacctcactaaatatcttgtgtaaatatctgtgtttgtttaaagaaagtcattttgcagtcatagtacaggactctaattcagacatacctcaccaaggctagtgtgaattattaatacaacacaattcatgctctgtcttgttggatttctatcacttggctcctgggttctgggttcagtgacaaattagagtcatttccttttaaaggaaacatttcttaaactaagaatctctttcccagaaaaaagagatgaaaagaaagcaaatatgctgaaacatattttatacaatttgtgcaaactattacataatagaaatacactccttaggttatatctcagtcagctctgcttaccataataaaatactgcagacaggatggcttaaataacagacatctattttcttggttatggaggttggaagtctgagattaagatgccagaatggttgggttatggtgaaatctctttttggcttgcagatagcagccttttttctgtgtcctcacatggcagagagagatctttgtcttcttataagtctactaatcccatcacgagggacctacccccataaactaacctaacccttattccctctcagaggctccatttccaaataycatcaaattgagggttaaggcttcaacatctgaattttgagtgggacacaaacattcagtccatgacattctatccttgacccctccaatattcatgtccttctcatatgcaaaatacatacattcaacagtcccaaaagtcttaacttattcccatatcaactctaaagtctgaagtccaaaatctcatctaaacatcatagaaattgtgtatgggtgagactcgaggtatgattcatcctaaggcaaaatttctcctcagctatgtacctataaaagcagacaagtggccaggcactggctcatgcctgtaatcccaacactttaagaggtaggaggcaggaggattccttgagcccaggagtgtgagaccagcctgggccacatgggagaccctgtgtctacaacaccttttttttttaattagccaggcatggtggggcaagccagtggtcccaactactcaggtggttgaggtgggagaatcacttgagcccaggaggtagaggctgtagtgagccaagatcatgccactgcactccagcctgagctacagagtgagaccccatcattaaacaaaacaaaacaaaaaacaaacaaacaaaaaacaagcaagttatgtgcttccaaaatacaatgataccatagctgtgggatagagaatcccattccaacatttcaaaagagaaatgggaaagaaggaaggggcatcagctcctaaacaagtccagaacatatcaaagcaaattctattatatcttaaaactcgagaataatcttctttgagttgttggtttgccctctagatctacacrggcatgggagcaatcactctcatggctggggatggggagaggggacttgcttaagtggctctctacaaaggcactacccacatggctctctgtgaaggctctgtctacacagctctgttgagtggtggtcctgcccttcgaaacagaggtggaggcaaccctgctccccaagccagtgcactctggacctgtagtgggaatggcagccctgatgatctgtgaatcgccctcatgatccttcttccttttacttgaaggatagcacatgttcacagctggatagcattacggtcccagcctgtaaaatccaagaagtctgacagcctttctycataaattcaaactggcagcatctgctagtataatcccatctttatttctagcttctgttgtgataactacttgattgttcagctacactctagtgtgctcttcagaacaggcttgctcattttctgcaatatggatagaaatcttcaatttctggttgctttttgcttaattattttttcttcaattcaaacattccctttaacattttactataagcagacagaaggaaccaagttactccttcaaagttttgcttagaaatctcctcggctggcctggygcagtggctcatgcctataatcccagcactttagaaggctgaggcgggcagatcacctgaggtcagtaattcgagtccaacctgatcaacatggagaaaccccatctgtactaaaaatacaaaattagccgggcatggtggtggatgcctgtaatcccagctactcaggaggctgaggcaggagaatcacttgaacctgggaggtagatgttgcagtgagctgagaacacaacattgtactccagcctgggcaatgagagcgaaactccatctcaaaaaaaaaaaaaaaaaaaagaaatctcctcagctaaatatctcatttcatcactcacaatttctaccttctgcaaaatagtagaacacagttcagacaagctccttgccactttataacaagaatcacctttcctccagtttccaataacatgttcctcatttctgtcagacctcaccagaatcacccttaatatccatatttctagtgcatacatccacagtcttccagctcaataactagttccaaagtcacttccacattttaaggcatttgttccagcagcattccaattctcaataccaaaattttagtctgcaatatctgccttcacaaaataccacagaattggtggcttaggcaacagaaatttattttctcagttatggagtctagaattctgagattaacgtgccatcatggttgggttctggtgagggctttcttcctgacttgcagacagcttctttcttgccctcacatgacggagagagagataatctctttctcttctttttgtaataaggccactaatcctatcctgagggctccacccttatgacctaatctaaccctaattacctcccaagggcttcatctccaaataccatcatattgaaggttagggattaaatttagaaattttggggggatacattcagtctgtaacaggttgtatactctcaaggtcccagtgatggatgcaatcagtgattcctctaagaccaaagagttgaagacctgactttaggagcttgtttatcccacagaactaaagaattgggtatctcaagtcatcatccagatactgcagctctcctctcctaactttttggagtcattctttctgctgctgtcaatagccctcttctttggtcccacaacacaccatcatgatttctgcattaaaaatgccatctcccaagtaattaacctattcacagtaagaacagttgttagaagttggggttatttcatcatggtccaatggctttatcttgctcaggaaatcaaagatgagtgtttctaaagcaaaaaaaaggaggatctcacaattgtatctgtttcattcactctgcagggtccattttacacccaaacattcattagttcattgtttgtactcctgcctttcctgargaagtcattgtagcactatttcttaagtatattcaaatttggataagttagtcaaattgatgtgaaaggaccacccttgtaagccaaatgtgtaagtcctacatagggatattacctgtttttatctcctgatgggcttttttttttcaagtttctaaataaatccagtgaacaagtagatacgctactcatgattatataggaaaacagagaagagaaacatacacttacttaaaagtagaaacatatctgctctttcccacttcacccttaatttttttctccccagccaatttactcaccttctgtggctgtgcttctgtgttagacccttgctagctgcttctggggttcagagcaattgtgctctkccctcatcttttatgacacacctagcaaaacagaagcagaggagcgagttgaaacagacaaacgactatctgttattcttcaaacatgcctaggattgtatttaactatcacctatctaaaagaggtattctcgcctgcctggaaagaattttgctaagaaaattgtttctcttcttcccatattattttacctctatgctagttccctgtgatttgatatgtcaactttgacaaattcatttttctaaagcacagatatgaccttttttgttaagaaaaagaaactactgttgctccccagtgctacacacacacacacacacacatacacatacacacccttcacaagccttatctgcacccccgcccactccccacaacaaacttcagatgtcttagcttggcattcttcggaattaggtcaacgtttcagattttgcttccatttgtgtatttctgacccttcatgaactcattttggcctcttagaacttcttcctcttctcaaagcatctcttgggttttttaacctcttgttccttcgcctataaagagagtttccaaggcaaaccttggtcttctttaaaaatcactctgcgtaagatttgaaatcactaaatgaagttttaataaaggatatatcttcattgcagggcttttcaaaatctttatagccaagtattttggtcatttctaagaaaggacacactattaaactattccagttcgtgttggggaggtttttctagatctctttatattcaaattctattcatactttatcacctatgacaaaatagcactttctctaaagaaacattctctgacctccctatctaaagtgatccgaatctcttccaaacatttatttactttatgtatcctgtgaatctttggaatctaagcttattagaaaatatagaaaaccacgaaaatgaaagcaaaaatcagctgtagtctctaaggcaaagaacatttccaattaagaaattaaactccctttgacttttaaaccccatcttagcagtttgttgcattcacttccaacttgtttctgttctcataaggatactctatcttcagatagatagatatagatagatgtgttgttttagcaaaaatagaagtatgttttaccttgttgagcctttttttttttcatttcataagataaaatgtacagctttctagatcagaacacctaaatctattttctttttaaggattaaatctataggcatatcaatttttattttttatctcttgtatattattaggttgttaattcattaaaggtaaagtatgtatcttatataggttagtattattcacagtatttaactgttttttttttcctcaggagagtcttgctctgtcccccaggctggagtgcaatggcccaatctcggctcactgcaaccaccccctcctctgtccaatcaaccctcccgcctgagcctcccaagtagctgggactacaggcatatgccaccatgcctggaaattttttgtattttttgtagagttggggtcttaccatgttgcccaggctagtcttgaactcctgggctcaagcaatccacctgccttggccctgcaaagtggtgggattacaggtgtgagccgccgcacctggtcacaatatttaactttaaataggtatataatacatggttattttcactcacatccatgtgaagagaccaccaaacaggctttgtgtgagcaacaaggctatttcacctgggtttcaggtgggctgagtccgaaaagagaatcagcgaagggagataggagtggggccgttttataagatttgggtaggtaaaggaaaaaggggggttgttctctggtgggcaggggtgaggatcacaaggtgctcagcgggggacgttttgagccaggatgagccaggagaaggaatttcacaaggtagtgtcatcagttaaggcaggaaccggccattttcacttcttttgtggtggaatatcatcagttaaggcaggaaccagccatctggatgtgtatgtgcaggtcacaggggatatgatggcttagcttgggctcagaggcctgacagttattgaatgaatggagaaacaaatcacttagacaccttctaggaaaaaatgaccaactatgctacctgcaattacgtttcaaaatrtagcttatctgaagaaaaggaagtaacatttaattacaagcatcaatacaactcaagcacagaggaagtgtgctaaacaatttcctccatacgtacaaatttttatttacagaaaagtatatgtcttaatgagaaaatgtgctcgaaaacattctcatcatttctgagtttggtttcagtcttaatgaatgtgtcccttaactattaatctgctttgtcatctctctaactccctactatctcattgccattgcaaaggcaaaggtccacatcttttatagtttcatattatccaaaagtgttaacttaggatagatgtgtacatagttttgtactcattgtacatgcttagctgcaattcttttgcctttgcacttctgaaatacaaccatattcacaacacatcatttgttcccttataacatttcaccttttccactttgtttattctctatatgctcactgttagtttagatgctgccttaggcttttatgatatatactgtgactgcatactgtaatttttctctatagcatgtatcccatttatttaagtgtgtgtgtgtgtgtgtatacagtctatataataaatttacatgcttccttaagtagactgtaggccccaccaacatagaaaccatatgtgtcttgttcttcattgtaccctcaatgcctaagaaaggtgctggaacatggtaggcattcaataaataattggtaaataaataaatatacaattctggtagttgattaattcaaattaattttaaaatttagaactgtaaaagtaaattaaaaaataagataaagacaatgtgattattttttaataaaccaacaggtcatggagattttaaaaattaaattcagtcatatggccttgtaaagtaactagagaaaaatgtacacacttaaaccagctgcttgtggcattcatcagttaattcatttgtttataaaatcattttattttctaggtggcccagaaacagtaggttgagaagcagcaatgaattaaaatcaagaagaaacacagaaaaaagtaaaaacacatgtgcatacacatataagcctagaagcttgagtatactaagcctaatctgattcttaatgataaacatggtctgaatcatatggagtaacctaaccctttggctactaaattaccaataaacattgataatggtgataaagcatctagcactcctttactgatattgagttaatgagttatttctactatataattaccaagacatatgatatagctatggtcctttatttagtgttgagggggtaaatatggcagttgtttttagatcttacttaaaaagcaaaaatgtttgaattaatctccctttcaagggccacctcctggcacttcatggttccatgaatagctgacattgacttgccatgtgtaaaattaagcttttcttcccatcacttttcttgaggactcattttgctgttcactattcattcacatttacatatgcccatttttacctttgtgtcaataatgataaaaatctctctcttatattgtgtctaatactattagccactcactctgttgagaaatttacacatattatctcctttaatttttccagcaatctcatgaggtagctcattttacagatgaagtaacaagctcagaaattgagtggagaagtttagcaccaaatccttttaacctcaaacacatgattattttatattacctcttaacactgatttactacagggaaaaacttaaaccctttcatttcccccaatttaggtcatccatcaacagtcatttattaaatatcttaaaagggccaggcatgtgatcaatgtgtatatccatattaactgtgctgtggctagttaatcgaatatggaaattttgttcattaaataaacatgtattgtgcacctactgaatgcttggtctcatgaacaagaatgatataatctctggctgtgagtatcttacagttcacataagagacatgaaatttcagtgttggtgagtcccctacaaaataatatagataaaggctgtcctctagtgtaaagctgtgaaaactacagctaatccacagttttcttttgtttaatttcttttctttttaaattacttttcttcaaaattaaaactgtagaagaacctggttcttcccccaaaattttttttaaaagcttctgcctcatcacaaaattctccaccctgccatactctgtggaaccagggactcatagcatttgtgggactggagttgatgttttctgagcagttttctgtcctgagcttcctcattatgttgcagtgaaagggatggtatggtaaaattctggatttacttgcaatcaacccttacataataattttttagacttccatttattgaggacttgtccagtatttcgtgttaatacttatataataccttataaaacaatttcaaatcagcatctcagaggctgattcagtccacttgaatgttttgtttggctcagtggagtgttcaactttaaaatttatggtattttagaagcgaccataaattcctagtgtctctttaagaaaaagtagggggtctggcaacacaggaccacctacacatatggcaacgcaagagtcagctggacagggttagaaattgatatagatattttatcggttgaaagtttagcttggaaacatttggaaattttttttttcttttgtcctatacaaatgaagacttttacttcttttctcccttaagagaccgtatcatattcgctccagtacttccagcaaggaaattgtacacacgtttgagacgactgttgtaacttacccttctgcctggtcacaggaaatggtgtcacttcttaaaaaggtaagaaggaagactgcatgtccaaacgaagtaacaaaaggaagcaggctctctggcttaagtttagaagttagtatacaatattggggacagtcatgatagtatacatttgtagagtgtattttctagctgttagctttcaaatacatggcttcattaactcaactcagattccccttggatgtcccaaagccatcttaaactcaaaggacttctttatctttgtctttcctgaatatcttctcaggaaattctctcagtgactggcttctctatccaaatccacttacgccagccagcaaccaggactcatttgtcatctgcgtattcaattcatcaccaggttctgaaattttatattttaagtattaaaatatttcacttctctctgtcctcactactatttccctgatccaactgccatcagtctagccttataacgggtttgtccacatacacttttaccactccattctattccccatgcagccccacagtggtctgttaaaggacagtccaggatattttccttattcttagaataaagattaaaataattttgtggtacaaaagttcaaaatacctctcaagccttgttttggacttttggacttttgtcccccctttgactacacataaactgctttggcctttttcttcttcttttctttcttttctccttcttcacttttacataccagtcttcctctcaccacaggacctttgcacatgccagtacctattcctggaacagtgcctccaatcctagttcctccagttcctccttgagagcagtactactcaatgtggttcactggttctagtccatgaattttttctgcaggtctattgtaagtaaagaacttgagagaagcatttagaaacttttatagcaattggacactgctgtagcatctaaacacatgatcaatggacttatcttattgaagagggtccaagcttgtttgacggttgttgaactcaagtcacaaggtgtctatgtggggtgctgcatactggcaatgcataataagaccacatactgatttcagtggattggaaattgaaacagacaaaaacaaacaaaaataactgacccttctacatagtttgggaagcacaactttagctcttagctcaaatatcaccttcttggtgtaagttcacataacactatctttccttcatagcatttttcagtttaaaattatacccagcatttgtgtgatccttggttacgtaccattttcttcttagcttcatgagggtagggaccatgtctgacatgtgttaccattgtattctcagcatctaacacaaagcctgagaagtgaaatttgacaagtattcaaataaatgaggtccacagctttcatcagattttcaaggtacccatcttcatcaaacagatgaagaacagttatagcgggaggtcaaaagtgtatattgagtgatgatacaaaacaagaatgaggggcccaagaggaatgggcttggccttttttttttttttttttttttttttttttgaggagaaaattgcaccagttgtggctggtaatggaaaatagctttagtggctaaggagtcatcatttgtgtctcttgtttttggagtcaagttccttattttggaatagggacattgcatcagtaatgtcaaagacatagaatgggggatcatttttcataagcaaattctgcttagttccaagacagccctgcttcactccacaaattacaccctgaggttgcatggttgtcatcttcagaagcattctcaagtgggactgacaatgcctatttgagccacacaattgctgtgatgttggctcaggaatggttaagggggcaaaaatcttttatctcaattagtaaaatctagaactataacagttactttagttacaccttatctatgccgcccccaatgtattttaattagttgtaaaaacagctacaattcttagtaggaaatgagttctacttgtgaaatgtatcaacatttgtcaccataggttttctactaggtactttgtataaatagcctcccactaatcctgattacaatcgtatgaaatacattattaccactttttttaaacacatgggtaaactaagatttagagaacaaatttgcccttagtaagtagaggagtcaagaatcaaagatatatttgacttagtaggacaagccatttttactcatcacattgcagaatcctacatactgttcattctaataatgtatgatctacattgtttatgggattagggataggggacactgtctattttccttcagtcctacagttgaaagcatttagagggaatttgtatgatttttttttgtscttctatyctttcttatggccttgatgtttgcattttattggcagctactcgaacctaatccagaccaacgattttctcagttatctgatgtccagaacttcccgtatatgaatgatataaactgggatgcagtttttcagaagaggctcattccaggtttcattcctaatgtgagtcaatcctaacaaagccaaataactcccattcagtgcgcattacccggtgtgccagattcacacattgtctcattagataatcacaccagtgttgttaagagagycccaattcccattttacagatgagagaattgagacaygcacagggtaagtttgtcaccaaaggtcacaaagctagcaagtagtcaagctgggattctaatccaggtgtatttgcractgaagttctagcttttaaccactttttatggtctgtttttattgaaaggaagtcctagttccccaaatagtcattctcatgaatctgctggggttttttttaagttttctttgattctaaagatgcagaagtttgtgtccctagagatctgagtcaaagaattgaaaattgttggagttggggtgaggaatttattttagcatttgcccctcatcctttgtttgttctgtctcagggatttatatttgtaaggactgataaccaaagacatataattcccattggatggatagccaaaccaatggacttctgtggtctactgcattatgctggtaagagccagagtccagaagcttaggccaaaggtcccaagtgaggccactagctccttctctctgcctagaactgaaattatatgttcagttgtaggtatattgggcagaataagaggcttctaaaggggcctgtagaaccaattcagttttctgttttggctgtcatggcagctcaggcctgcaatctcagcactttaggaggccgaggcaggaggatcaggggttcaagatcagccttggcaacatggcaagaccgtgtctctacagaaaaagaaaaaaaaattaggcaggcgtggtggtacttgggtgtagtctcagctacctaggaggctgaggtagaaagatcacttaagcccaggagtttgaggctgcatgagcagtgattgtgccactgcactctagcctgggtaacagagtgagaccctgtctcaaaaaaaaaaaaaaattactcttaagcccatatgaggcatttgctgtgggaatgtgagagtgtgatccttcatgtacacacagcaggaggcatgctccaatgagagggtaaggagaaagtacaaagtgagagaaaggagaaagcagggtggtggaattgtaccttatggagcaacaggagggtaggtctgagttcttacctctccgctttgtggggtccattaggggcaacttgtaccataattgacacatgacacaatgaaggtctaggcaccccaactcttgcttccccctccttctatgtgttgcgtccctgcaattagccatcaatgctggctcaaaagaagttctacgttatgcttctctgactttagtgtgaatcggaatcatctgggaagctcattaaagtgcaagttcttggacctcacattctgaaattctgatttgggaagtctggttggagaactgggaagctgagcaagcaacttaggtgattctgagttacatgattattagagcgcactttcggaaacataacccaaaatttattttccactttagaaaaataactgtaagtcggcttttgtttttactcattgaggcctaattgagagtttagaaaaataaacgaagaatatgaaaaacgatgctggcaataaataacgtaaaacttagagtgggaatcccagtgtattattcatggactgctccgttaagactaagtatyattttccgtattaggtctgctgtgtttttcagaatgatacagtaatctgaggattgagccaactgtcttccttgcagaaaggcaggctgaattgtgatcctacctttgaacttgaggaaatgattttggagtccaaacctctacataagaaaaaaaagcgtctggcaaagaaggagaaggatatgaggaaatgcgattcttctcaggtaagcaggtccccaccaaactcagggtcatgggtatccccatgatggctgcaatatsttcgagagcttctactgggaggtcatttcagcttcctgcttttgctgcttagtgaaataggagaagtagatcagccgggtttctaaaagggcagaccagagctcctctgaggatcctagcagcaacattttacttgtaggctttccgtctagagttctgccattaacttgactcagttatttctctcttccagttctcaattcaaaatttacaaatttcctgggagaggaactgtcattggccaagcttaggtcaggggatgattcataaaattatggtaaaggggcaggtttcaaagtacacacatggttgttttggacctcactcctgctttgaggagtttctgggagcagccaaccctagagatgatgtctgttctttgccacaagcagaattttatgatatcaagcctcacagaagagtgtctgttcacaggaatgacggaattctaacatggtggagcactattgctggatttcaggctgagttaaattaactttgtaactaagtatattattctctgtcagagtcagagctcagatttcagtgaagtaacttgcaaacactcagtaggattttatactcacatgtggctctatgaattataatgatgatgaagtaataaagttactttgcctctaaaggtcatctatctatccacacgaccatttccattcctccatcaatccctgcctccctccatccattcatttaggctacttttttttagtagctatgatctgccaggtcctgtgctaaagactggagtgagaaatgattgagatataatttctatactcagtgctgtcccttttctcaaagattgtgtagtcttgtggtaaagatggctctgcaaacaaataagtatcctccatctccttaatttctctagtagtcaggggccactatatatttcaatggacaattaaccaacgttcacatctctgtcctgtttgatcacagaactggcttctcgtcagattcccttcaggaaatattttctaggaccctccaaggaatgcttagctgtgctgctaacccgtcttgcatattgcttgtctctgaactgtcttcttcccaatggtctgttcctcatgatcatgtcataaccaacccgcttctccagacttgctccttcccctgacctagcagaacttggctcaaggtggatacaggcctctctgataacaggacctaacatgtgataaaaaccaagagatcctttttattacaagtttttaaagttttagaaataactgagcaatttaggaataacttttgaccatacgtaccatgctcaacatgatctgcccatctttcctgccacatccttgtactatcccactctgaccctcacttaaaaccctccaacctcacaggccctgcaagtgtctcactctcaagcactgaaccttttgttcttcttcaaggcctttgcccttgctcttccctgttcctagaatggtcttccctttcatcttcacatagggggcttcctctcattctttataccttaaatatcaccttgtcatttctgttgttgaattataggatgttttttacatattctggatattggacccttatcaaatatgtgaactgcaaatagtttctcccttagtcattctacgaagccagcattaccctgataccaaactggacaaagacatcacaaaaaatgataattacaaactgacatctgttatgaatatagatgcaaaaatccttaacatattagcaaggtgttcagttaggcttttgacttaagatgtttcttcttttttaatattggtgtttatagctataaagttccttctgagcactgccttcacctatcccataagttttgggatgctgtggtttgtttttaattcatctctaagtatattctgatatctcatgtgatttctctttttgactctttttttaagagtttgttgtttaatttccacatttttgtgaattttccagttttccttctgttattgattcctaccttcattccaattatttcagtctttttaaattttttgatacctgttttgtggtttccttccatggtttcctttaactctgagcatattcaagacggttgttttaaaatctcactctagaaagctcaatgtttgagcttcctcaggacaatttctatcygttgattttaagtctttgaatggcaatattttcctgtttctttgtgtgccttgtgattttttttctgttgctattgaaaactcgacatttaaatatgataatgtggtaactctggaaatcaggttcctcctttcttcatggtttgctattttttgattgttgaaggctgtagttatccattgtttagygacttctccaaacaatgtttgcagagattgtctgctttgttgtgtcatcactgaagtttctgttactttagcctgtgctcagctaatgttttgactgagatttaacaccaagagcatttttaagttgtttttcttttcttaatttagtgttcacttggttccagtaaacctttgagtgctttccggagttttgacaaagttggttttgacagtatctgcttgtttttttgatgtttctgttcagagatggggcttsgaactgcttacatcagcatttttctctagattcttctaatyttgtaccccaggttcaaaaataaaaggtactttgcttyaaaacaaagaatagtctttcttccaagaagaatcagaaagattatgaactatttttctgattcttcactctattttctctcttttacattaaggcttttaaaacatgagtcaatcttaccttattatattattaacatgctcgttcattcattcattcatttattcagatgactgtaaaattcctgctttgttaggaaatatttctgactaggtggttaatgctatggttagatacacaaagtgctgtgggaattgctcactggacctgagtgaagggttaggataggctttccagaggaggcaacatttgatctggttcctccagattgagcagaggtaggtgagcatacaggaaaggacaagagcatttcaaggctggcacatctcagggcacaggcagatcttaatgttacagaggaaataaaatgacaggtggtttctgatcataggaattacccatgctgtgttcaaaaggcttgtgacattactcatcctccctgcctttagtcttatctagagccattcactgaaggcattccttcagcaaaatctaacaagaacatacaccatatcagtatcatattagctatagcttagccccatttctgccccactgtgtgtagctcagagtcaccttgttactctagagccaaattcatcactgtttaggtaccacattagaaaagagtcaagtgttggcaagggaattccaatcaagccacaagcctggaaaaggagctctctattctgagctctctgagttctctattctgtttaattggtctatgcgtctgtcgttgtaccagtaccatgctgttttggttactgtagctttgtagtatagtttgaagtcaggtagtgtagtagtgtaataatgcctccagtcttttttttttttttttttttttttttttttttttttttgcttaggattgtcttgactattcaagcccttatttggttccatatacatttgaaaatagtttttttttctaattctgtgaagaatgccaacagtcatttaatgggaatagcattgaatctataaattactttaggcagtatggccatttttatgatattgattctatctgggaacctggaatgtttttccatttgtttgtgtcctctctgatttccttgagcagtggtttgtatttctccttgaagaggtccttcatttcccttgttagctatattcctaggtgttttattgttttgtagcagttgtgaatgggagttcattcatgatttgtctctctgcttgcctgttgttggtgtataggaatgctagcaatctttgcacattcattttatatcctgggtttcagtattttaaaaacttacttcaggtgattctatgtgtgcaaccatgattgagatacactgttatagaatctaggatgtgataaactagaagaacataactaaagttttgcatttttcssgtgtctcagtttcctcatttatagatggagttggtatgtgtaccaagttcataggcttgttctgagtaaattagtgcatgtaaagtgctccacagaatgttagctgttgtgatgctttactttccattgcacttcctgactcctagcctttcttttccttggctctttttatgctcatgtcagatgcctctattgtttctttccccccagaatatcctccactttatcttgctctgctcaacatctttaaagtatagaatcaacagactgccatgccacccagtctgtctgacaattgaggcaaattccctaagtcctcttgttctccttctgagatttccacctgctctaaccccttccaatatttcagatgccgtctccagctatgataatttaatcagtgtttgctctgctcatccttgatatgtgagtcctaagattttaagcgatcatttcccttctaagtcatgtatgacccattagtccctccattcttttttcttacccctcatttcatattctctttatggctactcctgttgatgtatccatttggccacacttcttaaacttctccacctaaagcagaggaaaaagaacaagttgaacatgaaccctttaagggtaatggggtctgaagtgtcacactaaaaggtcatctgcaagtatgtatttcatatctttgtttaaataaaatagttacatagtagagggaaaaaaaatccatgtggattttgcatttcactcaattataaccttgatttttaatgctaaaaattatttttcctaaaatcttggggtaaaagtgttgctccaaagagcttttatcagattatgtttatcctgtagctgcctgtcccctgtgaccgatactggaaaccctcaggattacaaatgcytccgtttgcaagtaagagtgaaatacagcagaactgtgtcttctcctttgtcttgttccccatctctcttctgtgctttgtattgtttcctctcctgtcacctaaacaggcactctgaaagaaaactctccagtactggagaacttagcatattctaattmctaggttaaaaaaaaataataaatgactgaatgattttttttaaagaatattttccatcagaagaaatttggaagtattttgttgcagaattttaaaacatttgatctgggtctaattctgtcctgggactggtaatcatctttttttgaggctaaattttctcattttgatgaaaaagtcatcaatagatgttgaaagctggacagtgcagtgtcaaagcaaatgctttgcatgtctgcaagaaagtcacaaataaagaaggctctgctgactaaaagagaaagatacttaatcaactccagtaccattgttgaggggaacattctatcaggattcagtatagagagatatttttaggctattcacaaaatccaggtagaacctccaagctacatttacaataatactagcttttagattaattgttgttttttaaatatgtattagcctcttatacaaatataaggagttacaaattattattacaataatcttggctttcgtgattgtccratgtatttacacgtaccgagagctttatttctccgtatagtttcaagttactgtctcgtgtcctttcatttcaccttgcaggactcctttgagcatttcttacagggaagttctagtggtaataaactccctccacttttatctggaaacatcttagtttctctctcacttttcaagaacagttctgccagatagaggacccttggttgataggtttttttcttttagcactttgaatatatcagcccactgccttctggcctccaaagtttctgataagaaatctgcccgtcatcttatgatgtacttgacaaattttttctctcttgctgctttcaagattctctccttgtctttggctttagaaagtttgcttatattggctggacatggtggctcacacctgtaatcccagcactttgggaggctgaggcaggcggatcacttgaggccaggagtttgagatcagcctggccaacatgatgaaaccctgcctctacttaaaattcaaaaattagctaagtgtagtggtgcacacctgtaatcccagctacttgggtggctaaggcaagagaatctcttgaacccaagaggaggaggttgcagtgagctgagagcatgccacttcactccagtctgggcaacagagcaaaagtctgtcagaaaaaaaaaaaaaggaaagtttgattatattatgtgtcaatgtgggtctttttgaattcatcttacttgggatacactgtgcctttttggatttgggggctcatgcctttcagctatgatttctttaagtattctgttttcctttttctctctcttctcctcctgggacttccacagtacgtacactggtttgcttgatggtgttccatacattctgtaggccagggatgtccaatcttttggcttccctgggccacgttggaagaagaggaattgtcttaggccacacataaaatacactaacactaacgatagctgatgagctaaagaaaaatcaccctcaaaaaaatctcctaatgttttaagaaagtttacaaatttgtkttgggccacattcaaagccatcctgaggcacatgtggcccatgggctgtgggttggacaagcttgctataggctctgttcattattcttcaatcttttttctttctgttcctcagactcagtaatttccactgtcctgtcatcaagtttgatactgattccttccttgcctgctcaattttgccgttgaaaccctgtagcaaatttttaaattttagttattgcacttttcagctcaagaattcctttttagtttctttttaggttttctatatttttattaatactttagttttgtttgcacatcattttcttgattttctctatatcttcctttagctctttgagcatctttaagatagttgttttgatgtctttatctagtagatctactgttaggtctttttaagggataggttttttggtttatgttttttactgtgaatgagccatacttctctatttcctggcatgccttgttattttttgtattggacacttgaatctaataatgtgataaatctaggaaaatcagatttctcccatccccagggtttgctgttttttgttattgwttttatttttattttttattattgttgtaagctgtctccatgccaaggatcagctgaggtgtaaacataagatcttcttaggtcttttctgagcctgcacccttccctggtcatgtgcagtcactttctaattttccctacacatgcagttgtttttgaatgtcccagcctttcacgtgtggctcccaaaaggaggaaaggagaaaaatgaagagggygaaaaggtgctggccctttaattctcccagaagtcacttcagcctgagggagagtggctggcaacattgtgggggaggtgcaacaacaatggccatcaagcattttgtttgcacctctgtgatcagaagcagcagtgtcggaagcacagatcctcagaatttggagaacacagttcttgctttccaccctgactctcacaggctgtgtgcaaactgctccggaacatgtgtgtgctcagctccctcccatggggctggaggatgagggatgggtagctgctgctgtgctaagagcttaagttggtcataattaactgcgctttgccacccaagccttccctgaaagttgcaagctttcaatagactccagagttctaaaatagtgacattagacagattctgccagtgcaatcgctgtctaggaggggagacagattcctggtgcttcctgttttgccagcttcccggaatcttcttcacmtagcatccattttgaagatactacttacttctcaatttggggctattcattgaatagactgtcaccaggttattggctgtttgaagattctcatttgtctgctaactatacctctattttttttctacgttcacctggaagacatgtcttcttcaagagcaccttgactctgtccagaaggagttcataattttcaacagagaaaagtaagtaattcctgggagaacaacagccccagaaatggtggcatgtttcagccagactttacttgcagagaaaatatatttttaacattttaaaaattattttctaattgggaaaatgatgcaatctattatagaaaatgtagaaaccttttttgtaaggtatttaacattttttaattgataaattagcctagcatcaagtttttgtttgtgagaagggaagaggaattaggatttaaacacttaaaaatcaaagccttttaaaagatttccttggctcatgcttatttataaattattgggcttaatattatttcaaaagcttaaacctttcattttatttttcaaagaataaaacatctttttttttcttttctttttaagagtaaacagggactttaacaaaagacaaccaaatctagccttggaacaaaccaaagacccacaaggtgaggatggtcagaataacaacttgtaaaggcctcatgtcttcttcttgggacaatctcatgccagaaacttctaattacatatgtcaagaaaagctgacagtagttcttgccactccacacaccatgacttagaaaatgtgaatgaatatatttcaaaaaaggcagcacaacacagtgaagggtcctgggcctgagctcctgggatgtcatttcacatcaatcaactgtgtgatctagagcaagtcacttagccactttctgtgctttactttatttatctaaaatgagagggttatactagacgagccataccctgcctttttagtgctatagttgttattctaaaccgcctttatttttattttaaaattaatatatgaatatagatttatttttccactccttctaattatgcagtgacaaatggacaaatggacacaggactcagtgagacttttcagacctcgaaagtttcataaagtggtcagaatgccccaggctacttggataaagataaggaattctatcagggaggcatgaatggaatcagattaaaagtaacagagatggatgagggccttccagtgatatgcgtgaatcagcattagatccgcttatctcagctggcaggagcctgctgtgcacaccacttcccagctccctcttcaacaatgtgaaagtggtaacttgaaattggtaataatgggagcatttacaccacggaaactggtaaatgctcgttttttccctcctaacaagtgaattgctaaatattagcccaccactccttccaagaagcatgttccttgagggctaattgtcctctgaagattagcagagacctgtatctggagaggatcagaaaagaatgtcatcacactgaaagtatgtccaccttgcagttcagaaaagttgcatcttatatggggtttattgtctaagttagaaatgaatttagaagatagtaaaatttaccgttgaaaaaccccttaaattacccataaagtatatgggaagtatcttttctcagtaaagcccaatacagtgtcacctttcactaatgaaacaagccattgcttttgttttgttttgacttagttatttttatttttggtctcattttggctaataccagatgagctaaaatgttgaacaaattatacttgtttttatagactagaattactcttttttttcttttcaggcagagtctcactctgtcacccaggctggagtgcagtggcatgatctctgctcactacatctgcctcccgggttcaagtgattcttgtgtctcagcctcctaagtagctgggatcgcatgtgtgtgccaccatgtgtagctaattttttgtatttttagtagagataggattttgctaagctggccaggttggtttcaaactcctggtctcaagtgatccgcccaccttggcctcccaaagtgctgggattacaggcgtgagccaccaaacctggccttagaattactcttagaacagtggaatgcccacacatccaagacaggcaagttcatggagactaagggaacagtggtatcatgtctcccttctcccttgtgcttactacaagaatggcaggcagaattccctacttatttaaaatatcactgatgtctcactctttttctttatattttatttattgatttgccacaaagtttaattcacctaagtgagacgtgcatatgatgtaactccactgtacagatacacagatctttacagaagaactatttttggcaacccctatgcccctgggtagggtccagaagtgaacaggcttggtgggggattgttttcacctcttggctactcagagtacctaaacctgtccttacttatggagagcatgtgtcacaccaagatggcagtaagctggcaactgcgaagacctgactgatgcccatttgggaagccaggcaagtgaaaatggaccgaagaaacagagatggctgtcttttatgcagggcttttccataaagaggttacactggggcaaccaagtatgtgtagaaagccagagctaaacttcagcttggcattcacagttttctcttcactgagctaayaggcccagagtttcgggcagagctgtgaaatagtgcttctctaatagcaaccatattattgttacataattaaaagccagctcttttgttgtttgtttgattccttttccctacagttcccacatcatttgtctgtgctattctgtttttctccaaacactataaacttgaagcaattgccctgactcgatttcagagaaggggatgtgttggaaagagcaagaataagaaagtgaccagattctgctgcagtctggtaaccccacgagtgtcagggactacttgcatgtttacttctatccttcatttgttttgattcaagcctttatgtgctgtggactcacctccctaagtaaccaggttcctcctctcgctgcaaccttgtttgcatccttcccaagaagaggctttgggaaatttttctgtaattacacttaccaaagagccatggaaccattaggatctccactgtgatgagagttaagccatagtgccatttcacacgtatacatttatgatgggatgggaacccgatacaatctctgtaggctgaatccctagttttatttccagtgagctgcttctgtgactgaagcacctctgtgggcttttgggaaccatggatgcacagatgagagagcacaggctcagagagtaagatggatttctagtgctagccaggtgaatgacacacagtgtatttcaagtttgaaaagcaaaaccatggtatctgacagtgctgattgtaatcacctcccaccactgtgcattttaaacatgagaacaaaaaacttttccaaaatttaaacttttcctaaatctttgtggtcattgctagttgttgacatcagatcctttggttttattctataacttgggctaaacgttaatatcccactaggtggaacatgtctcttccggagttgtgacaaccgaggctcagagctgtgatttttagaaaacaagatgactattaaatcctttggcctggtattcttgaatgtttttctcccagtgcttcccttgcctgtatggagcatctgcaaagtctgagcaggttttgaagtccaagagcatcccagctataaggctcttgcactgtgacagagctgcccacctccagtacaccctcagtgacctcgagtagatgygtagggcagtcaaacccggcaacttatgccacaaccctaattccaggaagtcgtctgctaatggctaacccactgccatggtggcactggttttgcctgaggtcattgctagggcaggaatgaacagcaaccagcacagagcattgctaaattaattacagtaatctaattaattagtagctagkcttcttctgataggaaagtttcaaccagaaaccactagatgttctattatcatagcttttgtagattggatggaagaataagtaggaagaaagagtattaatgtagctagtagggaccagtgttgctgcttgtggctgaggcagtaatgctaaggctttagctcttcaaaagcagaatgaaaaggcacaaaaagcacttcaagcttgtttctgtacccagttgtccctgtattgtctacataaaatcctgtttcctgctatctgtctgtgattcctgtttattacaaattcagtgtgtctgactgatattaaacactgatattaaaatttcaaacttcacttatctgtgctgttgtgaacaggcagctgatctggyagccctcgaatgggaaacaagtgcttctgttgagctgtagcatatataatataaatgtgcctatgtgtattaaaatgtcttctgtaaacaatgagccactgacccttctttgtcagctgtgtgtgtgtatgtgtgtgtgtgtaattgttttctccagagatagcattgcgggtgcccaaagtaacccgttcttatgtctatttcctattgtgaggaatgtcccttaccagaaataatattctgtgacagagatgatgttctgcaactatggaatgcagtatagcttacttgacccacatgtataaaaactaaaaatccttacctctctagtagtcgcatttcagggaacacagcccagaattccagtttctgcctttcactatgtccctaagtccatgggcagcctatgcacctctttctttagcactctgccttcctacccctcaacatccgtgccccattccatataccaaagcagcaggcagaagttctaaggtccatcacctgggacagaaagttaacaggcaactctgaactcttgcagctaaaagcaacctctgctttaggagagaacaaagggcactgtcaccacctctcagacccacagtgggtgggcagccagcaagctgctggctccatgggcttgtcctgaaatagtaggctgttgtaagttttgtggcctccgaagttctgcatgcgaagtaccctgttgtccaggtcatgttaagtgtcctgctgtgtgcttagcagccatctgagcaaagggcaggatctagaactcttcagattctgaaaagtaccagccttaagcatgtgatctcatttcctcaggttactttggcctttttatcccccatctcctgctcatggtcggggtctcctttgtgatgggttggtggtagaagagctgattccagaaagttatttggaaccagagggccctttttagtctcctactcagcattctcattccccacctggtcaacgtgactcagccactgaacagctccaccctgaaggaagagatgtgaaagtcaatgtgtatctttcaccatttaagaagaaaaccacttcatgcctttcagactgctgcatcctgagtttaagtgctgactattgcctttaaacccactcaaatcctaaacagagctcagctgctgcctcggtcatgagcagggagaggcacttcaccaatcctgagttagagccataaaatggggctataaaccaaagcttattaaacatcaaaactcgaacttcaactgtaaaataattaattctttatgcacttagagtagcttgtgactgggattctgagcttctgtgttaaaaggtataatcactctatgctcctgtatcaagggcattgttctatcagaccaacagggggtcatcacatataaaagcaattaatcagaaatggccatcccctggtatcccatctcctccccacccgtcccaacttccacatcaccaggcaaaacattcatgccctgcaagcttgcgaatggtgccacagccacggctctttttgccttccttgcatccatccctcttcagttatcacaaattgattttctttgtggagttattgggagtccatgtggttcaggtggctcaggggccaggtatgttatccggtgtggccaattggtcccacgtgctcttctggccacagtgactaggtcaatgatgagtacatgccccaagccagactgaatcagtctttttagcgggaactattgagggactctctccctcttctgaggttactaagcaggtgaaatgaaaacctggagatgctgacaaccaactttgtcccacataaaaagagctttcctggccaggtgtaatcccagcactttgagaggccgaggcgggtggattacttgaggtcaggagttcaagaccagcctggccaacatggtgaaaccctgtctctactgaaaatacaaaaaattagccgggttgtggtggcgcgtgcctgtagtcccagctactcaggagactgagacaggagaatcgcttcaacccaggaagtggaggttgtagtgagctgagatggtgccactgcactccagcctgggcaacagagggacactcatctcaaataaaataataaaaaaagagctttcctaagaaggaagcacttactgaaggcacacagggccgaagtggaaagaagcaacgctctgatgtcagggtctagcacttagatccaactacacttgagtctgcctgactgaactttatagttgcaccagactttaaaattccactttccaatttccccctggtaaactagtttaacttttgcaatgaaaatatgatctgcacaacaaattacaactggattcagcagtgtttccctcaaaagggtgtagtataataggtttggtgggatgctaaaagatgggatgggatagaagggttcagtagtcaaaagcttgagaaccctgaattaggcaaactttgaaagacctttatcacgggatttctcagagtcttcaagttgccgatatgtacctgaaagctctaagaagagcagatatagcaaataatgcttccgtacactgattttactccttgggatccatttgataaagaatatactttggtatgggtgtaatttgagtttttcttcaagtctaggctattaaaaagaagcagaaaatgcttccaaaacaatcaaatagcaaggctttaggggaaagaccaaaaaaaaaaaaaaaacccaaaacaaaaagctttatggctctgttctggacttagctagatttatcccaaatggcatataatactaaatttgatgatccacagaagaaaaaaacttactcattctccaaagtttcaaaatggccatcaagcttggtggtcaaaactaacaactcaatttcaaaaatagaagcccccaatttttctccagacaactctgttatcagcagatctgcctgcccctcttactaaccctttcagttctactgggcaattttaatattataggtgaaaatgcacatcacacaaagaagaagactggagaacaatgttggtaatttcatagttattttaataaccaggtttacattaacagtcacgtgatgaacttttttctttaatgtcagctaaactcaaaacacagttttgttcacggttcaaaccaaacagctcttcacgttccagagctgcctcacagctagcacagatcacaggagattactgtctgtccatacccaccagacacagaactgaacacccacacaccagttttcaaagagggaacttacaatgaatgctggctgcccagggcagcccatgagtgtatctgggactcaagctggagttttccaggggagaaagcctgggaagcttgtggcaaggaagttgggaattgcccaccctactggaaagggcttctcagggatgagtgaaaatccaggctcaggtgtcagccctttgtggaaacatgacactctcagtatagacagtcgtgaagaacaaggctgagggattttgaagtaaacccattttcaggatgactacaatccttccacttctagaaaacttagaagtacaagaaatagctctactacgggtaactgatttaacaatttcccaaacaccctttccactacccaagcccgtggccctcagagagaaccgggatggattgccatctgggttcagaggcaatatgaggaggttggggggatggcaggggcatcctcagggttggggggcaggccaagggatgagatggcaaaggacagctttggaatcagatagacgatccagcgtgccttcctacacttgcatgaggtgccagtgaattcgaagagggccgggactcaccattgttttcttttcctaaaccttttgtataggcctgtttgatgtgtcttatgaaacgaaacaaatctgaatataaattttaaaatagtgggagttattctcgcaattcccagggatttctatgcttggagagttagtaatggtaagtgaagaaagagaggcttcctgagctcatgttgttcctcccaagggcatttgggggttgttcccagagcaaggaaatcttgtgcagaatcaaaggttctggtggaatggttcacttcggaagtcccaagggcagtgcggatgaccgatttggccatggaagacttatcttcatggcacagagaggttgtgcagagatgagtcagactcaggggctgagtaacagcagagcagagagtgcagaagtggacgctcagaagcgagtttatgtgtgtcttttcctctatctgctggctgtggctggtactgcaacctatcccaaagtaacagcctagtcaatgaggtatatgcttcagatctggcaaactctctctgcacataaaactgttattcttagttctctgaaagacccccacatctttgaagtgtaaactaagagctacattttcccttttactacatctcccttaaaagaaaagcactacaagagctttaaaatagcaagcttccctattctaaggggaaatagtcttttttcatgatttgaacagaaggtagcttgctaggggaaatcctgttccttggctatctccaaattcctttgtagcccagtgtgtacttttctctggtcttcaacttattcaaacctgcagtcagagacaatggtttctcctaagcaattaaaaggtgtctgaggcctgctcttctcttcaaagcacttagtacacagggttacaggtgctaccacttggattccccagagcatggaagtctgatcccaggttgaacatatttcttctgaaaatgagcatcttggttctatagattcttatcttgctcacaggacttgctccaaaactgaattttcagaagcagcatgatagggaaagagatattcaactctgacagacaaggtagatcgaagcacccacactaatttctttcaggtgccccatgaggaagactgcatcatgtcacttccactcacttggggagattctaggactgagacacaaagttcccccagagtttctgctaatggaaggggaaacaggtggtttggaatggaaaggtggaaccaggtccacaaaatgtgctccctctgctcaagactgactttggctttcccagttccccacttgactttcatataagctgagatgacctattacggtaaaaattagggaacacctaataaaaccaactttcaaaaactcctatttatcatggatgtgccaggatcgagagaatcaaacacaaactgcctgtaagagaggcccttcattctgcctcatctgagctaaaatcctgacttgggatgccagaagcatgccactcttctcggtttgcaaagacagaagagtgagaggtgacctcgccgtgtttagaaggaagcgtctttaagctgtgggtgccctcaccacgtgggcctgtgctatgttctcagctgctggcttttaagagcaccaaagaggcagggagggcaagaggaagagaagtgtcatttgctctgtccctgcctggccttcccaacccaggaaagagaaggatttgaaagcaacactaagaaagaggcctgagcaaacactggcacaatcaagcaggtggaagaaatggttgggtcttggcattttaataaacgttcaaagaaacaaaatttacttgtaggggacgtgacaaagaacagaacccaaagactgcctgccttctcggcagaccctagggagctgtggtgatgtgacagctgccacagcggctatcttccatggaaataacgtacgtcatcaacacaatatacaacaccccttccactcacctgacccacccacctccctcctacatgccctaccccagcccctctgcaccctccaccttgctccaggctcccaccacccactcaccccaaataacctgcgtcccttttgttcatttccctgacgtcccagcttgtctgtccccttgtcataagatgcagcactacacacgctctcaacactatgatagagcagactcttttaccttagtggcctgtctgattgcatgcatgtaaatggggggaggggagtcaaacaaatcaaggctatgcataaacagaaaac
